United States Patent Application Publication US 2026/0058010 A1 - sequence listing, part 15

SEQ ID NO: 168 - DNA, 1004576 bp, Homo sapiens
  source 1..1004576: mol_type = genomic DNA
ccaattgctcgtgcacatgtcctaatgtttttgaatatacatatattaatacataatgtatcattcgtgtttgcatgtgggcattgtggataacttacatgtaattacagttgcaattacttagaatcatctacttcttcatgagctcgaaagtgacctcttattcttttttacaaacggagatttttttgtgaatgtaaataatggaaaagcttcccaaacccctcccagactccagctcccgccatgcccttcccctcaggcgctggcacgcccttacacacacacacacacacacacacacacacacacacacacagcctgatgtgtctatcagctctgaatctggtttttcaagtggcttgggtgggtctgcatatgaatttgaccaacctctgcgcgcgctcctgggagcgcgcatctgtgtgtggtccagggagccaaccgcgtttgtgaatggatgattgatgggaacagcgcccaggggcagcaggtggagacgggaacccaggtcgcggtcactggtcaacccgcctcttggggtggaggttagagaaatgggcgctgggatttggccccggccagtgctggggttccagggtagggagagccgtgggcgccagactgggctgcgggaggtcttcggggtcagatcccgcaggcagccaagagcgagccaaagaaacaaagccgccgagggacgcggctggggcggaggcccggagggaagtggaggccgggaagccaggtgtgcggcggggagagcggcccctgccacccgcgctggtagccgggcgctgccattcactgcaaggtcctctgcgccctggaattgccgcggcggcggatgcagaggccaacccagagtgcaaccatggagacgcgacgtgtgtcccatagtaacctgttacaacattatttataagctgccatccctagccttcccccgcttcccctccgctccctcgccagacttgcgggcgacgggcacagccgcgtctggctcttcccggcctctcccttctctcgcgggcgcagccgatcaatagttaacacccggctgcggacggcggctccatccgcggcaatcaccgtagtgcttgtttgtggaagccgagcgtgcgtgcgccgcgcgcgcacccagtccagcgcggagtgggcgtctacccgaggaggggtgtctggggaggggctgccctcgttacccaaacagtttgcgctcgcttaaccttgatgcagctcgaggcttcccagtccagctcagttcagacagaaaacctggcgcgcgcgcgcgcacacacacacgcctcccctggcgtcgccgcccggccgggtccctgcccttagggaccagagcggcgaccgctgcaccccgcaccgcctgctggaggagcccccggagccggggccgagccgccggcgtccccgagtgcgccccctgtgcgtgccgccgcgctgttgctcgcagtgtgctggcgccgagctcggtggacacgcgcgcagtcagagctgcctctcgccctcgctagctgggctcgcagcctcttcctccctccctggctcctggctttttgtttaaagcaacacccaccctccatccaggctttttttctttctttctttattggtagcggccaaaaagagttgattgctattgggatccgctgagtaaagacacgggcaggggtgcgcggaggtgagaaaactgaagacctggaagatttttttttccttcaaaaacccgtttccatccagtcttcagccagtccagtctactttaatcctcaccaggacaatggattaagtttctcttccctggaccagaagtcgggttcggacttggggcaaaatgaaggaaaaggccatgatcaagaccgctaagatgcaggggaacgtgatggtgagtgccacggacagggcgcgcgctgggtcggggggacccaccgtgaggagcgatgctgggggaggtctgtccttctcagtcccgaacctccctggaaggacagcgaccccatgcccgcgcgcggcggcgcttctcccacttcccacccgagcccacccagcggcagggggatgcggaggagcaggcatttctttgcaaattgcaactttgcggctccgcggcccctctccttcgggcatgtggctttgtgttttgggcgcgggatgggaggaaggggctgcggggagccctcgctgaccgcgggtcggtccgagccccaagcagacccccagggctcttctggggaaacgcggggagaggtggtcacttcggccagggaagggccactgggccctggcgcccgcgccggcctcggtgctccgagtccccggaactcgagacctgttgggtctgcggagccttcggtgctctcggggcaggcgccagtcgctccgctccgttccagacgccgccgccgggcgggaccctgctccctggattggggacgctgactcccccaaaagcttgactgtgccggaggaggtcaggggcacttcgtcccccaggagggccgcgtgcctggaaacgcggctggtccgcggaaggctccgggcagctggccaggggacagttctgcacggataactttctaagtggaggacccggcgatccgcctccccagcgagcccacccgcctcgccgctccccgctgacccgcgcggcctgggcgcgcctgctctcgggctcacgttagtccggggcacggggccgaggggtcagggcgctggagtctctggcgaggacgagagagttgccatcttgttctgttgaaattgtttgtgtgccttcgtgtgtttattttaacccattaggtcatggtctgagaagaatcctctgacggtcccttattttaagttgctggctggcactttttttttttttttttttttttttggcgacagacaaggagatggggattgccttgctacttttgaaggttctgcagatttgcagatgctacttttgagggttccgtaagaattgaagaaattctttcaggggcaaggtccagagttgtttacagaagtgggttgggtccaagtgatgggggtgcagaggcacctttgcgggaacccaggcagtggtgcattttgagatctcgctttaagcaaaacaggcaataagtgaaaaattctacattaattgaacaaatacccagctggcttaaccacacccacggcagacacctgttgcctggcagagagaagcgccgtgggttcagaacttgactctggacggaggtgtgagtctctgggttcaagacacctcgcagggaagtaatcgccgcatggaggggcttactcttcaggaccctccccactcccgagacgacaagcccccatctaggggcggttcgcagtcctcggtccgtgggttctctgactgacctaattgcttgtttatgaaaatgcatctgcttccctcatttttcccactctttttcttttttagccattgtgttgttcagcataatttcttgcataaacaggatagaaacgtgtatggagtaatgctttttcattaaatgcccaaccacatccatcattcctaacttacgtgatgccatcatgtgctagggaaacctgtatatttagggctgaggctgaagttaaggattgaggttaattatactgataaggcaacattattgactcattacatcaatctaccgccaaataagtttctacttataacttgcatggcatgaaagagccaaatcttcatattacacctttattagaaaccttatggtctttgccctccccctaacccctctctgcgttttacttcagaaaataaagaatgaaaggattgctaattacatttctctcttctgctctgaataaggatattccatgtgatactcattgcatcccttcccctgtgtctaatgttaagaagtgtcatcggagcaaggtgaacctgagcctagagaattctacagcaacccatattttcagagttatttgtgggcccaagaaaacaatgagatgcacacttactcaaactttgaatgttcttatcaattcttgaattgataattatggctccacagcctgctgtgtaacttatttgaattttcatgttccaaggaaatccacgtggcttcagttgagtgatcatttaggacttacccatgcctaatctctcaagttgctttggaagactcttgctaatcacagcctctcttggattagatgactggcaaattctttgcactcacaacttgattgaaattcaggtgatattttacattcaagatgaggactgaatgatttactcctattactgacagctgagctgccgcacatctgacagctacaaaaagtggcagaatgttttctactttgcagtaacagtgaacccacatacacacagagaccagatctcagttcaggggactcaaagatctctgagctgtctggactcgcatttgaggtttgatatttaaaaaagagaaagacactttgcactgcccaaatggtcacggaaatgtcaaatccagttcagccatgcctgtaaactgctttctaatccagcccctgctcgctgacatccacattgtatgattgttctggacctgcagcctgttgtttcaccgggagttctacaagaatggtgacaatagcctcccggctggtccttgccatgccacattgcttagttgaaagtatgttcttataaaatctttaaaaaatgttttattcctcacatattgctttaggaatttatttctgagtacagctagaggattaagagaaggcagatgcaccagcatactatctgatcttgttttgttttagtaaatgggtaaaagaaataccacaggtggaatcagtttagaacttttttttttttttttttttttttttggagacagagtctcactctgtcacccaggctggagtgcagtgcagtagcgcaatctcagttcactcctcccccagggttcaagccattctcctgcctcagcctctcgagtagctggggactacaggcgtgcaccaccatgcctggcttttttttttttttgcatttttagtagagacggggtttcatcatgttggccaggctggtcttgaacccctgacctcaggtaatctgcctgtctcggcctcccaaagtgctgggattacaggtgtgagccaccatgactggccagtttagaacttctattttaatttttttttttttttttttttgagatggagtctcactctgtcacccaggctggagtgcagtggtgctatctcggctcactgcaagctccgcctcccgggttcatgccattctcctgcctcagcctccccagtagctaggactacaggcgcccaccaccatgcccggctaatttttttgtatttttcgtagagacggggtttcgccatgttagccaggatggtctcgatctcttgacctcatgatccacccgcctcggcctcccaaagtgctgggattacaggcgtgagccaccttgcctggcccctagaacttctattttaattcttgagaagagtctatttcataaacttataatactgtgagaattcacagactaaccatgccatattcaatctgtaatttaatatactaagagataaatattttttacttgctcgaaacaaaaattatttttttaaaaatagctgttattttttccataaaatctacatttcagagttccaagggaggctgatgtgcactttttcaacctaatcttcctttattgctgtttggttgatattctgcttgtttaacagaggtatatactcttgcaataggttctgaggttaatgggaaatgtcatcagaagggtgttgcttcgtgctgaattcccctactctgtccatatgagcttttttcagacattgagttgcttaatgaagttggagtaaagattaaagactaaacatcttggggactgtcctgtgacccttggcgtctcccccttccttggtgtgtgcattggtggctccaccagtatgtggtgggtaagtgagggctgtgcaggcccatggtgactacagcagtatcagaggaggttcagacctaggacacaaagcatcagaggtctgcaagccatgttgatccttgagaatcccactgttgattgttgttggttttaaatgaaagtggctgtcttgagttccctgtatagggaaagctggagttcttccttgtgctcactgacactggttttaggcctttggtcactggttgatgtatctatggcatgacgagcctaggatcttttcagaactattgtcttctcttttctatgttggataaaacatctgaatgtgaactttccacagtaagagttctctttcgggcatttgaccgttttgctgattcagttaaataaagcagaatggcattccagcgatgatgctgtacttgtaattagcccaggtgagcagaggctcgttgaggtttttagataagtcatgagagctcgtgtgggacacaaagcttctattatttttttttttctgagatggagtctcactctgtctcccaggctggaatgcagtggcacagtctcagctcactgcagccttcacctcccaggttcaagcaatcctcttacctcagcctcccaagtagctaggattacaggcatgtgccaccacacccagttaatttttgtatttttagtagagacgaggttttgccacgttggtcaggctggtctcaaactcctgacgtcaggtggtctgcccgtctcggccccccaaagtgctgtgagccacctctccctgccaaatcttctattattgaagtctgtggggacagcatttctaggagtgtggccttcagtaatgcaatatttttcctctgtctgagggtacttggtatcagattggtcacttggtaacaaaatgcttggtgctggttctaaatgggagcagtgtagcacagattttgagggaatttgccttctcaaaatgggttccaaaaattctaaggtcacagttttctgagagttgtcaccatgtgtcccagtggtgtgatacttaggttggtctttctctgcttgctagttgttcaacatcccttcataaaatcatcacccttataactagacgtttcttgaaatattgattaatcccatctgtgcaggaaacagtagctaggcatgggtctgtttcataatcctccttgcaggatttataggaatggggatactttaaacatgtttatggcccattaaaaaatgcagatttccagaaagaagatcccaaagccagaggtgatcagcacaggatgttttataaaatttcttcaataaaactgtagtgaagagggctgtgctgttttttcacagagctctgtttagttctttagttcatatatccactgggtctgagtttttcaacatataaatgtactaaattggctcttccctgttgcacagccatcatctccttttctgtaacctgtcctggtcagtaatcacaatactgctaacttgatcatcatttggactttgaaccctctgtgctattaccaagaggtgtggtgcttattgaaatatgaacatctagtattcattcgtccccatggacaagggctttgcacaggaagcatttgagcggatgaattcgttaaatgaatggatatttgttccttgcttaggactgcttagcataggctgtgcatttgtgagaaaggctcatggttttagttgaacgtttaagaactccttcaagtcctaatacatcaggtaacaggagagagaattccctgcatagagtattttccactttcagctacaaatggaaacttaggctcagtttagattgtaaacagctgatgcatcaatcttctttatttgaggaggcgtagaagtcaaataaaatatagagagcaatctctcaacttaaaatgttttacttgggaagcaagaattgcaatctgaggcatacacagaccagtggtcttcagtatgtctgaagaacaaagacgagattgtggattttattaggaaaggaaatgttacttactgttttggaagaaaactcattggccctggagaagcttttgagagctggcaagctctgattggtgagttgactgtggtaggtaaagctagagtcactgcaggttgtttcagcagttactaggtaaaactggtcttagaggtacagcaggctgtttcagcagctgagcttgtgggaaatttaattcttggagcaggtgctatgtgtccccagtactttttccctggccccgcaactcacacattgagttgcttaatgaaaatggagtaaagactacagactaaacttcttggggactgccctgtgacccttggtttccaaggaccacaaggattttattgggtatgacaagaatgacccaatttgtataatcagcttttgcagaggtaaatacatttagtccagatcattttaaaattttctgtttattaaactaaaataaattcagcaacatagaagaattccatgacctcttttggttgtgggagccaattttatttgatagcaagaccacattttagaactcaagagcgtgcctcagatcttctaggtcccttgaacatactaagctcagaacagacaggcaggcagaaccaagcagaattccccctttaccattgtggcttcctgggatgatgggagaaagggttccattcgggaagtagaagtttcaaaaacccatcttggacagtggctcttggcaatggctgaacagtagaatcagctggaatgttttgaaaaacccagtcatctatgggtgttgtggagttgggaatgtttggttaagtgtagaggttctcaacattgcctggagccactggttcctcctgcccccgacctcttccccagtacccacccctggcctagagatacccaggggattctgattccactgcttcaaaatgcagtctgtgcactcatatgtttaatagtgcttctgttgtgcagccaagatgcagaaccagtggatcagaggcaaattttttgaataaatattgccatcaaagcctaaggaaataattataacatttataagggagcttcttgaaaaatatgcaatcaagtcttgttccctgggttgtggaggccgccaaatacatggaaagatgggcagagaacacagaataaggagaaaaatgaagtgaaacatgcatgagagagaaaagtaaatagtcaccagggaaaagatgaggaaacatgctgtgtttttaagttttctaacctcagttatagactgaatttggggaaaaacaagaatctttaaagaaattcaattgtcctcctttcctttttcttcacgcccagaaaaaattaatcttcttgactgaaagatactctattatgtgtctgaggtccccccgaaaagttattacaaacccaacagggcaagtagaaacaaggagggtgatagaagaaagctgaaggctgccctcgaccagcagaagttgttctgggatttgcaatggcctctgaggggcctctgcaggcagctccctggactgctgtttcctcatgtgtcgaataaggaaatttgaatagattgattattcttgaagtccctttcaactccctctcccagttaagggtagcctcattactgtctcctcaacattgctcttaggacatgctttagaagtcaccttccatgccagaacaaatattttgttggcatcatgatttcttctgcattgacttatgtggcatctctcagctcgccagtcttgtctcagcaagcatgccactgtatacggggaaaacaaatagatggcatcaatgtatagtcctattggacacaaaatctagagcattcatgcaccagccttgatgacccaggaagactgtatatgtgtgtgtgtagcacaccatatacatgcatgtgcatgcgtgcacacacacacacacacacacacacacacacacacaatgttcatacatctcagatgtaaaatactggcaccattgtccagcatagctgaagatctgttggataagagctcctgtgggtgcaatcactttgactgcttggctttcttggatattaaaaaaataaccacactgtaataaaacaggagtgccaaggatgttctggtttccagtgtggtgttactcgtctgtgaaaataaaagtgaattgctggctagccaggccggccacaaggcctgttttgcaaggcaccaattggatgggatgggactgcactgggtctcactacgagaggtctaaggctgagcacattttcttcactgatattggtatttgaaaagtgggattttcttctctttttccctctcctactggactaatgcccctattaagccacacatagttttattttaaataattctcattttatggtattggtcctatataaacaacttttagtaaaacctccactgacagaaactcaactacaaacttgagcaaactggactaacagtctcatacgtttcattacattaatctaaaaaatggtacttctagggtatgttctgacttcattatacattcagcttaatattctataccttcttgtcctatatttttgggaagtgagaattaataattttcaagcctaaaggccaaatttttttttcattcttataaaaattattttgattgtggactacattttctatgatgaggtaaaaatgaattaacacatgaacaatttatctttaacaggctgggcacagtggctcacacctgtaatctcagcactttgggaggctgaggtgggaggatcacttgaggccaggaatttgataccagcctgtgcaacatagacagcatctctacaaaaaaatttttaaaaataattatccagaagttgatattatattatgtggctgtcatcctagctactgaggaggctgaggcaggaggatcttttgagcccatgagattgaggctgccgtgggccaagattgtgccaatgcacttcagcctgggtggcaaagcaagaccccgtttctttaaaaagtaatacataaataaatatacttatttataacagaaaatcaaagattatcttgttaaatggtagttttctagaaaattgcatttatcagaccaaatcatatcttgagcaaactttttataagagggttctgttttgttatttttcttcctatgactctgtaaattgtgcatctatttttttaagatctccaccctttcatttcaaacttaattatattgataacttatagttgtagagaacttacacagcttccaaaataattttgtctgtgctatgttattatgttagaacaacccattgtgttggaaagacagatattagttctttttttatggttgaaagagctaagattttgagagagtatatagtggggctggttatttgaggaggagctgaggtgctgacccatttccagcccaggttctttgcacaccacaatgtattctttcagaaattatcttctttccagttgcaactgaaaagaaacatagtgcctggaagatgggggagaaaaataagagatcaagtgggagagtatgtcttctgctctatcctcataggatttctagcctctgctggaacacatccaaggactggaaacttgtgccattgttgacaagttctgtttgttaaaatggtatttcttaagttcggaagatacatatacatacctccattgaactttcacctacagttttagcttgaagccttttaactacaaaaattttcttatccctacttcacatgacaacctttcaagtaagttccaacagttgccatgtgaccccttcatagtctcttttctagggaaaatgtctctatttctttcaacttatatatgaaagtttgatcagggtaactgtgaatttaacaacaagacaccatattttttattcaatcattgccatcgttatctgtttcttagcttccacaaatttcttcctatttattgttgttgatttgatagtcttcatactgttttccacagtggctgtactaatttaattcccaccagcagtgcacaagtgttcccctttctccacatcctcaccaataaatgctacttgtttttgagccattagtgaactgatagaaaacagcattctggaccgaaaaagtagattgtctccaaaagctgtgtggataaggagcaatgaaagaaagataataccaaggcaaatacctggaggatgtgaagccaagagcatcagaggagaaaaggaaccatcaagaggttggttagtgggtacaaacagacagatagaaggaataagttctcatgttcaatagcacagtagggtgactgcaattactaataatttattgtatatttcaaaacagctaaaagagtctgggtgcagtggctcacacctgtaatctcagcactttgggaggtcgaggtgggagaattacttgagtctaggagtttaagaccagcctgggccacacaacaagacgccatctctaaaaaaaatttaaaatatgccaggcttggtggcatccacctgtagtcccagctacttgggaggcttaggtgcaaggattgcttgaggccaggagttcaaggttaaagtgagctgtgatggtgccacggcactccagcctgggtgacagagtgagaccttgtctgtaaaaaaataataataattagaagagaagatttgaaatgttcccaacgtgaaaaaatgatcactgtttgaggtgatgaatatcctaagtaaacatacatcaaaatatcacatgtacctcataaatatgtataattattatgtatcaacaagaaaatgaaaacgagaatgttgaaacaggtggaaagatattcatatagagcctttgggaaatgctagtcactggacatgggaggaaaatggccgtcttcagttgcggtatcagaggccttccacaataagcagtgttaattggcaaacaggggctatgagaaacacacaagtgatgaaaaccagccttatttctactggaatctcaggtcttacctgacttaccaccatctaagtttgcatagtcacctctaaaagtgtgagcatcttttctgtgctttgctggtttgtatataacttttattcagatatctttcactctaataagtagttctttgcattctgattagttggctttatgaaataagtcaccattattcaagaagggaaaggcgagagacaaaggcattcggcttccattagtgtttggaattacagccacacacaaattaagggtgaatgaaaacaaatgccctcctgtagctgctgctggtattcctccccacctcctcttcactctctctcctcctcctcctttttctccttctcttatttatcctcctcctcttcttccttctcctcttcctcttccttctcctcctcctcctcctccttctcctcctcctcctttgattatcttaagccagatgtgtattcttacccaggtttgtgatatgtctacccttgcctttatgttgggaaacgtgaggaagctgagcccagctcccaggacagtttggtcgcctctaatcataccatccagccataatctcaggctgaaggaaatcattcattggcactaaagagagctggggagatagctgacagaggaatgcaatggatcgtctcgctcatccaccttttgccatttgtttgattttttcctgcaatgtgttttcttctcgtcaacttggccggaatggtggtaaatgctgtttttatatgtggacttacttgaaaaactgatctatcttagtcttggactttgaatatcattaaagttctccaaggaccttgcaaatagctgcttgccaaacacaatagtttaatataatttgatctctcactgctgcttagcttctgagaaatgtgttgtgctcaaagtgttcaagcattaattaaaattgagagcactgaaattgtcagcgcccactgactccatgtgagtgtgtaggtgagtgtgaatgtgtgtgcacaggcaggtgcaggtgtgtactcacatgcgtattaacgcttaggaagctgaactttgcttctttctcattaagagttgaaggctattatctaatcatgaaaataaaaactctgatggaattaacttgatgttgactctcagtttgatttctgaagataaaccagagtcatctctactctgaaatattaacgtattctagagagtggttcccaacatgatgtgacgctggacctgcgttatcagcatcagctgggagctttagaagaacaaaatcttgagcccacccagacctactgaatcagaagctcagagggtgggtgattctgatctgcattaaaatttagttctaagtgtacccattcgcaaactctttgtggtgaagtgccagtgatttcatttttgtttttaaaatttcgtggctcagtactttctcccatctttctgttttttttttttttctgagccctacaaactttttcaacctctgccctaaagctgctttcagattttcaggtatctttgtagcaatgccccattccttggtatgtgttgctataaaggcatacctgaggctgggtaatctttaaggaaaagaggtttattttgctcacggttctgcaagctgtacaagaagcacaggcaccagcatctgcttctggtgaagtcctcaagctgtttccactcatggcagaaggtggaggggagccagtgtgtagaaatcacatggccatagagggaacaagagagagaggaaggaggtgccaagctctttttaacaatcagttacccagggaatgagtaacgggatgactaactcattatctcgagggtaacaccaagccattcatgaggcgtctgcctccatgacccaaatacctctcagtagattccacctccacctccaaccttggggatcaaatttgaacatgaggtttggggggtggataaacatccaaactatagcagcacccaaaagctgaaagtgccatgtcttattttttattttcagccttatccgtagcacgctttatggtagcaaagaggtctacaagctgtggccccaaaataatttaactttcttactgtaacctttccattttaaatttgattcactgtagagcatttccatgggtagaactgggtcaaagagaagtctttcattttagagttttgttattaaggaagaattgggtattttcatactttttaaagtttatttttggctatgattacttacagtggttcattttttatagacatctaggaaatgttaattactgcagataagattcccaattcagaagccaaccacaaaggcttttcttcttcttcttctatatatatataaaggagataatgctaaaatgctcttatgcaaattttaaaattccctagtacattaacaatgctaatgacagttaatgcattcctgaagcttctgtgtgatccaaaatattcaaaatgcttagaaatgttttaggtccaccctgcaaatatatgggaagtggaattttgttcatggaaattagttccttgaaaatagattcagtgccaagtttaagagatgaagaagagctgaaaagtcagtgtagtgcaatatagagtcttctgcggataaaggtcgaaaccctcttttcccagaccaccatagtgggtaggtacagaatctcagataatcactgcagtttggttagaagaggaaattgcccttcataaagcaacacagaagaaggtaaggagaaagtggtattagattgataggtcaactaatgataatgaagaaactttctcttgctgacggtgatgtcagcttctaccaggactaacttcagtgagcacaggaatggcattgctgttcaatagggttataccctcaggtgggatgacagaagacagaccctcgttgtttctttgctgacctagggaattctgcaaagcagaaatatgaagaatgaagatgctgactctttacagacagctttatttaggtgaattcaggttgttacatggtcttgccacaagtgcatcttattctagaagttgtctgactacttcaacatgcatttctttccttctttcttccttgagctccttaatattaaatgcaaatgaggggaggcgtgttgaagttacactaaggtttagttgtagcaaaaatgtgctttgtgcacctactggaaattcccttgtggaatctttatagtaaagcctattggggaaatataattgaaaacaaaatcttcttccaacctagaaatcctctccacaaaggtagtagagaaagagaacacttttcttatttgaataagcattaaaccagaatggtgatgcacatcacagacaagatgctaaaagatcacaaagacagaattctcttatatagccaggcagatgcaacccattaaatacatgttttcaagataaacagtagctcaccctgaagtaagaggatttgacagcatcatttgtcaaatagttcatcctaactttactagctgcttactggctttatttagaggggggaaaagcctctcatatcttcatgatagaaggtagttttgcatattagagcaaagtgtccaccgatgttaggctccagaaactgggagacaggggttctgtctcccttgatgtttgcattttaaaaagatggttccagatctttgggaacaagatccccgggtcataaagctaacaaaagccctccctatctagtcttcacaaggatgcacttccaagagatgaaaaagtgcttataggccgggcgtggtggctcacacctgtaatcccagcactttgggaggctgaggcgggtggatcacctgaggtcaggagttcgagaccagcctggccaacatggtgaaaccctgtctctactaaaaatacaaaaaattagctgggtgtggtggcaggtgcctgtaatcccagctgtttgggaggttgaggcaggagtatcgcttgaacctgggaaggggaggttgcagtgagccgagcttacaccattgcactccagcctgggtaacaagagtgaaaccccgtcaaaaaaaaaagtgcttataattacaagttttcttaggtaaagctctaagaaaaaggagaagaaaacactttcctcctgattttcaacaggaagaagtaagtgtcttatttctagcttgtattagtccttacaagccagagcattcaaatgagtaaccgctacaatagccagcaaagctacagacacccagtaagaggaactggagcctgtcccaggcttgcagatgctgagtgctcgagatgttgacacaatttagccaaaattgaggatcaggagactgccaaggacaccggtgcttgatggaactattccctcttccaagaatttaagagcaagaaaaaaactcagccatatacttggagcagtggctttcatattcaggactaggagcatttgggttctgcaggatgtgggatggaggcatggctaaggagcagccataggggtgatcggagtggccacaggggtgatcaggcctgaaaagcctgccactcagaagcctttcttccaagagttgtttattcactgcttagcaatgagatcagcactttgcctgctgcatctcacaaagccctctgacaaccctggatgaaggtactaatatctttagttttcaaatgaggctcaaagaagttcaatgagaaaactgcccagggtcacctaggtagtaggtagaaaattagtatcccacttagatgtgtgtcactgtgtcatctgaagagaagagattaagcattgggcttgctagacaacaaggatactcttcaacatataaacaatcttattcaataaaatcttattaatgccctgttgactgaggttgcattaagagcatgtggaagcttatccgatgtttccattctctggtctctacttgtgactttgctttttattttctcttctgtgctggaagtgctggaaagcacctcatcttttgtcttttcagttgttggatttaggttccatgattaagggttgtgttgctattgttttcagtactttgttctctttctgtatcccaggaagtcagcaactgggccctgtctcctacagaagcaggaagaggactgagggttgagggacttttggtggttttctaaaactgtcaatcatcctatgtgtgacaagcagagagtttcctgtatctctgttgcctaagcaaaggagcaggtgggaaagtattttgctaactagcgatctaagatgaggtttttgttgttgttgttgtcatttttgagatggactctcactgtgttgcctaagctggacggcagtggcatgatcttgactcactgcagcttccacctcccaagctcaagcaattctcctgcctcagcctcccaagtagctgggactacaggcacgcaccactatgcctggctaatttttgtattcttagtaaagacggggtttcactgtgttggccaggctggtctcgaactcctgagctcaagtgatatgcccgcctcagcctcccaaaatgctgggattacaggcgtgagtcaccacacctggccagttattctttgattctcctgcaccatctttcaattttttacacttggggcattttccctgttctcagcaccctcatcagtgtggaccaggacaacgggagagggtaaacctgaattcctccaactctaatgactttattaaaaggcttgagggggagggcagaaagggtatagtggtaacagtgagcactttgaatctcacttaccctaatcatttcttgaatgattgaaggagtaatgggaccctccttattccttactcctaaattctcactattgattgaacgtctcatacgcaggcactgagacacctcagtgaataaaatatagtcctcgccttccttcttggggcttccattctagtggcagaaatagacagtgattacacagctaattatttaattacaagtctgatgcattctgcaaaaacattgtaagggccaagggaaagcttctcctttgccttctgaaggttcactgaaaatcaactgatgaaagacaggtgaacaggagaagaggcttacaaatttgatcacagttttacacaggagctttcggaatgaagacgcaaagatagacaggaagctgtccatttttatgcttaggttcaacaaactgtggacagctgtgtggaaataggattggcacaaagggtctgatctaatgccaatacagtgagggggaaagcccagtaagatctgcccatctagattcttcttggcctctctgcagaattccttccttctgggcatggggcagcaccctctctgtaatgggaggtcttatgacccacagtcgaacaaggcaggtcaggtgatttcgttatggtcagtttttacacagaaaggtggggaaagttggagtagtagttttaggttttatggctggcttttgggaacagaggatctggttcgtatgattatgttgggagagaggatcctagtttctctggccagcctcgggagaaaatgaggggccagaaacagaagagcaggagggggagtggggagaaatgtttgcttctgaggccttcattttgggttatcattttctgggcctcagcaaaagcagattgagattattattatattaacataagcattgtggtctaggtttggatgtttctacaaggtgtttcgaagcgaatgactcagtgaaagatacaatgggtgagaaagatggttctctcacattgtcaatccaaggcagaataaaaaagtcataattaaaaatatttcttaaaggggataaaatgagtatgtattggcaatttgctactacagtgaggtgtttaaaaagagaaaaaaaattaaatgaaatgtaaaatgaaacctgggtatctataacttgtgaaggctgaggaatagaagatacttcactgagaaaaggcagaggactcccttgactaggtgtaaggatgtgctcttgagatgctgggaacaaggaagtccgtgggagcaatggggaggaccaacacacgagcagcatctgctttgaaaagtggagactgaattgcggtttgatcctgggagcaaacaccaaagaacttagagctaataatagcgaagccataggaagagcagcaacagagaagcttgggtggaaggacttcgaatacataaaagttggaacaaaataaaccaaggagacaaacggaagtgttacacaggtatttttctttataagagaaatatattttaagagcactaaagggcctttgagctcagcttttatgaagaaatctgtttcaagatagaagagatatattgtaggtttctgttaaattaatggcaaataccactagctaagacaaagctagtgcttaagagctaagcattctttattttaattagtttattcttatggatttaggggtacaagtgcagttgtgttacgcggatatagtgtgtggtggtgaagtctgggctttttgtgtgctcatcgctcatagactgtacattgtacccactgggtagtatgtgacaccccacactcctcccaccctccaatctttggaatctacagtgtctattattgcactctatacgttgctgtgtatccattgtttaactcccagttataagtgaggatgtgtggcttttaagtttttaatttctgagttagggtctcactctgtctcccaggctggggtgcacttgcatgatcttggctcgctgcagcctcggcctcccaggctcaggtaatcctcccacctcagcctcctgagtagctgggaccacaggcacatcttaccatgtctagttaatttttgtatttttttgtagagacagggtttctccatgttgcccaggctggtctcaaactctcagactcaagcaatccacccgcttcaggcagctagggtgtgaggattacaggcgtgagccattgctcccaaccccagtttttaactttttgttgtcgagcaatttcactaaggataatagcctccatttctacccctcctggaaaagacaagttttcattctttcatatggccgagtagtattccatcgtgtatacgtaccacattttaaaaatccagtcatccattaatagacgcttagattgcttctgtgactttgctgttgtgaatagtgctgcaataaacatgtaagtcagatgtctttttgataaaataagttattttcctttgcatagatacccagtagtgttattggtagatcaaagtgtagttccatttttagttctttgagaaatttccatactgtttcccatagaggttgtattaatttacatttctaccaatagtatataaccattcccttttctctgcatccttgccaacatctgttgtttttttgactttcaaataatggctttctgagtgctgtaagatggtatctcattgtggctttaatttgcacttctctgatgatgagtgatgatgagcattttttcctgtgtttgttggccaagagctaagcattctgatggcttcgtgtggatcaaatcacagctggattgttcagttttggatgccaaatataaagagggacagacaaactggcattcatccagaagagaggaatcaggatcacgagagattagaagttgtattggtaaagggaatttgaataaatgatattatctaatctaggtgtgatagctaaatttatgtgtccacttggctgggctgcagtgcccaggtacgttgtgagacatcattctggatatttccatgagggtgttttggatgagatgaacatttaaatcagtggactttgagtaaagcagattgccttccctggtgcagtgggccttgtccaatcagttggaggtctggatagaacaagaggctgacctccccagagtaatggggaattctgcagcaaatggcctctggacttgaactgcagcattgacttttctctgggtttccagcctgctggtctgtccacattttggacttgccagctcctataatcacatgagctcattccttagtataaatctttctatatacgtatgtgtacgtcctattccttctgtttctcctgggaacgctgactgatacactaggaaagcagagatgtgggatggaggcatggtaagtgtttttagatatctggagggcttttatggaaatagacacagatttgttttctatgaatttgagagacccagatccctggattgaaatttagaggctggaagttttttttttttttttttttgcttaattgaaagaagacaacaagaattgatacattgatacaattcttttttagctgattgtgagtcagcaaaattcaaaacattgagttctttatagcttccgtgcatcaccacttgtgcaaggtactgtagaatggattcaatgtgcctgttgggaattagaattataaagaattttggaagtttctagtctgtcattgtttctggtaatgcatgctgtgaagggctaagaaatgtgttcatcccacagaggatgaaacaacagacttggtcaaaaaagtatagttatggtccttttaaatggaaaaattcagaccacagctggataggaacaaaatcctgaaaacagtgacagattcagtgtctggttattttaatactactcatgtgtagacatggatagaaaaatgcagatagtagagtaccaaaaaatacctattggaagtataaaaagaatggtaattaaatgatttctataggcacacagtctgataagagagagacctcattttatgtagctcttttactgaaaatgtggcatttatttttctgtattaattcaatgtatttcaaatgaactaaaaacctgccatcttcaaggatttcattatacgattccttatgaacactgtcataaaatgagtagttaactcatttaattttttgtgaatgaaaatatgaatggtcacatgttgaatttatttttatttttttacttttttgagacagagtcttgctctgtcgcccaggctggagtcagtggtgcaatcttggctcactgcaacctccgcctcccagattcaagcgattctcctgcctcagcctcctgagtacctgggactacaggcacgtgccaccatgccgggctaatttttgtatttttagtagagatggggtttcactatattggccaggccggtctcgaactcctaacctcatgatctgcccgcctcagccttccaaagtgctgggattacaggcatgagccactgtgctcagccctaaatttactttaaaagggttatacatgtgttggtaaatagcatcaagaaatacattccttctatgttatcgttattttaattctttatttttgtccccaaaagatttacttacagatcttggatgatcttgggtcttgaatgggcatgctgaggttctacctctgggcaggaagataggtgtgaagcaacctctaacagcttgtgcggaaaattacccccaggttagcaccagtgaggcacagttgttcagcagagcaggggctgggcattgttgtagagcagagccacgcccttccattccagagcacttggagcagttggtgtttatgctgctgggttgtttttattgaggacaaacatgcttttacatttatctatcttaaaaaaaacttaaaaactcacaagacaacttccctgatatgccctgtccccctccagctaccagtctttcccttgaataactcaatactataatgccactatttttaactcctcctcatttcctcttaaaaatctcccatctgactttggttcttaccactgcatggaagaattacctgtccacatcgcaaacgacctccttcccactatattcagtggtcagttcccacttaagtctctgaaggagctcaggaaatgacaccccaaaatacaccgctttggacttcaaacttccccagtcacttggtgaacagcaaattctgagaggagctttctgagtaccttttacctaccagacggatcctccagaggggacacaattgtcatgaatcccctccctagaacttcatcaaccagggactgctggctgatatcacaggagaggatattggagctgacactgcacccagacaggttttgtctcaggctgtcttctgtcctgctaaggggccattcacccgccctagaaatcatttactctcccctaagttgcctacatccaccctctctctcctatggagagggtatataagctttcggatgtctctgggtttcgagtattcatttttctttcatgtgatgctccgtgaatgtaatacacatgtatactttttctcttgttaatctgtcttaagtcaatttaatttgtagcccagccaaggaacttccaagagtggaaggaggccattttcacccttccagggcctggcagcacttttttgaccactttctttctttctttttttttttttgagatggagtctcgctctgtcacacaggctggagtgcagtggtgcaatctcggctcactgcaacctctgcctcctgcgttcaagcacttctcctgcctcagacccctgagtagctgggactataggcacgagcccacacccagataattttgaccactttctttattgagcttccaggtcacccttccctccatctcaggggctgcttatttccttttcctggctgcctctccagcccagggctcaagcatcattcttctgccttttcctagatggcctcattcatctacatagctttaagcagaatctgtgttctgaagacttctaaatttgcatgtcagcctctgagctttaggcttttacaccaaatttcccccagacttcacctctcacgtgcctaatgggtcataaaaaccagcagagccaaaacagaactggatttacctcttccacccctttctccctgggcttcctgaccttggtgcacagaaccattgttcatcctaatattcaggctctgaagcttgcagcgacctttggtttcgttctcacttcatagctcacagccaatccccacatcaacaagcagctcgggtttcagatgcatcacatctgaccacgtctcccctccctcaggggtcccagttcagtcagtgccatcatcctctcctacctggactgcaagtggactcttacttggcttccctgcttccactttgggtcagagacacatcatgtgtcctcagagacaaattatgagtccagagtgatcgttttagacacgggtcagattacttcactcactagctctgcactctgctaggataaaaccatatttcttactgagacactggctggctgatgtagaggcctccagcctgacccctagccttgctggggtctcaggggcacattgagtcttattgagtcccagctcctttgcacctgcttctccttccctgaaaccgtcttcacccagatgttggcttgctctttgcagagtgctcttcctgtagaccttcatgctcaaatcgttgtccacactctgtgccccttccccagtatcatgatccctgctcagtcactcgctgtccacaccctttcctttcactgagatcatagtgtatgtttattggttggcatgactattatctgtctccacagctaggatgtaggcttcactctcagggatcttgtcttgtcttgttcactttttgtatccctagtagatgctctcccaaatttagatggaatgaattaatgtgggggaggagttgttcagaatgtgatttaatacataaaaaacttttggctccccactcccttcctctctcagtttgcaatggaaagtgattgcaaagtaaagatagtacagattggtaatttggtaatcactgtgtcagtgtggctcacagtggcaacattatcacatgcagattaataaattgaggtcaacagaaactgcttctgcatgcagagaatataggaggacagagaggacagagatacatatagtgttatattactatcaccaattcagttacaatgctgttaggttttgtcacctatttttaaataattgtcctgttacatctttttctttttgcggaaggcaccagtttagcatagtttgtgcaatggctgtccattaaaatcttagtaaggtgataatccaaatcagatgctgtatagcctatgctggtttaagtcctgaagtacttatctgaaaacttcgggttaaattaggaattcagaacttttcagaattcaagaagctaacacaaattgtctttattatgtattaggtaacatccccagtggtgtctgaggcaccatcccacaaacccattgtaatttctgccaaaaaaaaatatgtacactaagtagaatcaataaatttaccagtggcttcatatcagttcctgtaatttttgccactgaagaagttcagagaagaaaagattttgtctccaaatgagtttttaaggagctttattggatgaaattactgaaacattgaaacatatacacactcaaataaaacgaactggaaccgtcgcaaaggatgcagaggaggtggcctgacatcagctgagaggggaggtcagagagaacccagggagcgagagcttcatgaaagagatgcagctggagttgcactttagttgaaggactcctctgcaaaaagctgaatcctccccagcctggatccaaattctctttcctattacatttcagctgccaaaatagctctttgaatttggtgcttagaaggatttagagatactaaaaattgcagcatttcctacagagctatttgtaagaggaaagcaatggaggtagagaagtgggttgttgagaataatagggtgaacttgaaagaggaaaagatgaggattaaaataggggcaatcttcctcatgttgaaatttctgaaattcagtattctctaaggagttgcactctaatttttcttaagggggagaaaatgaaagttttcaaatcatacacgtgcacagacacacacacctatgttttgcagggaggaatagctgagctgttagagccccacacagcaggtaatctctttggcctcctcattaacactctaatcagcccttttgcagccattctaacttaagaaaaatagtaaacctctgaaatagccttaaaaaagatgagtgtaaaccacttcagtctagcttttgaacatggtgtctattgaaaaccctattatgttagctggtaaccaacgatggaggtttcttctccagtagtaactgtgtgtaaaggtttttatgcttaggactgtgtttaggagttgtgatacattttatttagttttgagatggaatctcactctgtcgcccagactggagtgcggtggcacgatctcaactcactgcaacctctgcctcccaggttcaagcaattctcatgcctcagcctcctaagtagccgggattacaggcaagcaccaccatgctcagctaatttttgtacttttagtagagacagggtatcaccatgtcagccagcaggtctcaaactcctgacctcaagtcatcacccaccatgacctcccaaagtgctgggattacaggcgtgagccactgcacccggccaacatatcaattatttggtttgagctagcttacaataaaatcactcttacaacagagattcattgtttcttcatgtttctgtaagctgcatttaagtatcataaagtctaaaaattggataaaaatatgatgactgaccttaatttctacctccctgggacttggttctagagctgtagtttggaccagcactaagtctgtcttaccttttttcccctgataaatattcagtatttgaggaaatcatcacatctccctttagcattcttttggcaaggtaaaagactactgaatccagttttggggaccattgttaaactttgctttttcagaccttagaaacatgttaaagtcttgcaaaggagcccttggcataactgtgtgactagatatgctccaaagctctagaacatgatgatgttccatgtacgtctccatctgagtaagggggggaagagggcttggctggtgctggatgggtctcattcaatgcaatgccaaactcttaacatttgaaaattatatagtagaaatacggactttcttatgaatgccaagaaactgcttgcttctcctattgtctgaatagccagagagaatacttgcacttactattcactgaaaactgacttatttggtgataacggtttggctgtatccccacccaaatctcatcttgaattgtagctcccataattcccacgtgttgtgggagggacctggcaggaggtaattgaatcatgggggtgggtctttcccatgctgttctcgtcatactgaataagtcccacaaggtctgatgattttataagggcagagtttccctgcacaagttctgtcttccctgccaccatggaagacgtgccttttgccttctgccatgattgtgagccctccccagccatgtggaactgtgagttcataaaacctctttttctgtataattaccccagtcttaaatatgtctttttcagtagcatgagaacagactaatacatatggctaagtcagatcctaagtccaggaattccccagttctccataccttccctggagctgtatgtttataagaattttctcttcagtaggagcccttttaaattgcagaagtgctttcttctgaccacagccctatctttgagggaatagctttattgagttattgtttgcatagcatatttaagagtacagttcaataaattttagcatatttagagttgtgctaccatcaccacaatctaattttataacattcactgcatttggaaaggaaacttcatctcatctcatgagtttattttgaatgtggatcttcttggaaaagtaactgattcctcttctttacagataaagacatcagcgttcggagagattgagactgcctttgttctttattccacagggcccagagtgcatcacccaagaaagctctctgaccatgcatggtcaagtataaaacagtgtacgaatgttaaactagtgttagatgatttttgtctatgctgtggggctcacctctcccatctctcccagtctcatccataactgggtctgaactcttgcttttatttattatttaaaatttcaaactatcttgtccttgtctagctaaaattgctaatgccctttttaagctttccttaaagggatttaattgttcagcagtagaatcttttctgctgtacgtgtgatttctcttggaggaagtgaattctttcttataagtgagtgtcaaggggaaagcacagaacatcaggcttaaagcttgagttgtggccctatgatttcagttccatatacagaaatccatccgcccaacaaagaaccttctaaacattctacagacttgtccaaagtgactctactgtgtagcagagcagagaaaccaagtttgtgacccattttctggcatcctaaaggatatctaagaacctagtgatgacacccccagtccctagctcctacccccatgccaagctgtctcccactcattgcctctggatcatggtgcaacttgccactccaagaagatccacatgcaaataagctcatgaaatggaacgaggtttcctagggccatgtcctactcacatttgaatgaccatagttttagcaagatcatctttttaagaatagtttgcttctttctaacaccgaagtgaaattggtagaaacagagagaatcaggatcagaattaaagagacgagatagctctggaggcctttgaggacagtcactcccatgtgaagtgaaaacaaaccaagggtagcagtggcccctaccactgggggcagagatgctggttgctagaatggcaccaggggtacagaaagtcaccttctgctcctgtgacttgcttatcccatgctgcatgggtgtgaaaggttctgatgctactctttgtatttttggtagagagacaatgaatcagcatttcaagctacaggcaaaataaataatatgtttagacatgtcttaaaggattaatacttcagaatctgagaaagcaaagttagtaaacccaacctgggccagtggtggacacactaagataaatagctcctctgatttttatttatttatttatttatttatttatttatttattttcgagacagagtctcgctctgtcgcccaggctggagtgcagtggcgcgatctctgctcactgcaagctctgcctcccaggttcacgccattctcctgcctcagcctcccgagtagctgggactacaggcgcccgccactgcgcctggctaatgtttttttttttgtatttttagtagagatggggtttcaccatgttagccaggatagtctcgatctcctgacctcttgatcctcccaccttggcctcacaaagtgctgggattacaggcgtgagccactgtgcccggccctctgatttttaaataacatgttcttggagaaagtggggcctgaacagtcagtcacattttcttcccctatctccccttccctcctgtcccctcctatctcctcccctctcctcccctcccctctcctcccctcctctctcctcccctcccctcccctcttcgaagtctatctctgtcacccagactggagtgcagtggcacgatctcggctcactgcaacctctgcctcccaggttcaagcaattctgcctcagcctcccgagtaggtaggattacaggtgcccaccatcacgcccagctaatttttgtatttttagtagaaacggggtttcactgtgttggctaggctggtctcgaactcctgacctcatgatctgcccgcctcggcctcccaaagtgctgggattacaagcgtgagctactgcacccggccttcttttttatttttacatatccttaaggactaggaaacatttgggtcacactggtgcttacattcaaacctataaacaggaattaatgtatttctttgccatttattttataaattttattactctgtgtgtgtattttaaagaagaatttctggtgagttttctattcttatttgtatctattacttacctcaatggcttgttccaacatgattgttgtgtgtaaaagtaatttgtgaatagagcatcgctgattagtgttgtcacaattgagcgagtgtgtcccagagctttgcttttcacactcgcacactcatatggatcatctgaaaatcttgtgaaaatgtagattccattcagtgggtctggggtgggacctgggattctgcatttctaacaaactccagagagatgtggatgctgcatctgtgagctgtgctttaagtagcaagttcttatagggtctacagtgtgatgaaccagacagggccaagcaatgcaggtttccccagagatgagcacttcctgcccctcagtctgtagggattaggacacagtgcctatcacagttggcttgtgggaatatattctgggagcagaggcctgcttggagaacaaatgtcctctttgctacgtttttccagcatttaaattgatccagtatgggactgtacagatagcaagaaatgcagatgaacttgggcagtgttaaaacctggatatcctccatgaagcagattgggtctggcccatgctggtggcagtttacctcctcccgctgttccctcttccctggccactgagggtttataaacttgtgaaggcgtggagactctcaggaagttgctgccacatttctctctcttacagacgctaagattccctttcagtaattgaaagtggtctgaaggctctggaaagacagaaatgaaggaccttctttaaaaacaaacgtttacagcaccttctcgaagattcaaatttcgtggattatatgtggttattctagtgtgacatgcgaagggtggataggtacctgtttttaaaaggtatttttgttttgacatttcgtatttccattatttcaaattgcatcagactgaagtcctagcaaaagtatacattacttttatctttccattcatgggaaaatgaaagaaaatgtttcagagacttttctaaaaagatttgatctcctcagtgttaatatccttagctacccaattcagaaaattacagatttccttataattggtttacttgattatttaggatgttttctgtcatcctgggggatgtagaatgtgtgtctgatacagtgattgttagttttaaacaaataagaacatgctatatgtgacacatgcacacctcgtgagctgaactggtactttaactaccacatggcacatttattcccaaagctattgggtcagataccattttctggaaataaccgagtcataaatgatggcgtcttattggtctctacaacatgaccctaggacactttgactgctgtgaaactggcacttaaaatagagtgaaatataattgaaaattgcacattgaagatttcttattcattccttattattagctgcagaaatcatgtgtttatagacctttttcagttggatatcttttgctattttaaaatgattgaatacgttagtcagtttgactatttctgccaaggcaaaaagaagagttaattaaaacacacacacacacacacacacacacacacacacacacactctctctctctctctctctctctttttctgccaaggcaaaaagaagaggtaattaaaacacacacacacacacacacacacacacacacacacacacagtctctctctctctctctctctctctctctctctctctctctctctctctctctgtctctctcactactggtgatatcatctctgtgtagccaagcagaccactacagatcattgcttttcttagaaattacagccgggcatggtggctcaagcctgtaatcccagcactttgagaggcccacctgggcagatcacttgaggccaggagttcaggatcaacctggccaacatggtgaaaccccgtctctactaaaatacaaaaattagctgggcatggtggtgcatgcctgtaattccagctacttgggaggctgaggcatgagaattgcttgaacctgggaggcagaggttgcagtgagccgagatcatgccactgcactccagtctgggtgacagagcaagactctgtctcaaaaaaaaaaaaaaaaaaagaaaatttgagtaataaaatcagaactatcctgtgtgcctcggtacagtggagtaagaatgtctgttcctcatgctgtaccccattcaaaacagttgaatgcatggcttgagaatgggttgtaaaccacagctggatttccttggccttattcttgaactgtttgtaattggtgagaaagcagtgagcccagcagatggagaatttgctacctgaggacactcggtgtcatccaggtgctaggtgatctgactctatgtcatccttgcaccagtggaagattgggttatgcctttcccctagcaaactctcatgcagcctcctggggcaccagtgcattcatcgtccgaatgcctggctggggacaagaccagagggcctgaaggaaagctggttccaggaggaacccaggctcattcttggcctcatgcatgtgagtccttaaacaccagtttgcacatattcagtgctacactaaactctacctctgcctaagttgaatggttgtctactttgatgaaaaaaaatgtgtttaatagaggacttcctcatgtaggaaagcagaaatggtaatttacagaggataagaaaaagtacacgttaatccaagaaatacaaactcaggtggatgaactgcagaggccaggagtcagggggaaataagaattagccccaataggtctgttttataagcacagagaacaacatgcatgtaatattgtgtcaaatacttctaaaaaatgaaagcttcggcctctgtttcatgaatttctccgttaaattattcagtctgatttatgagctactgtttaatgtattttagattggggaaatcaaataggagtggggtggatgtaattgtatttattacaaatgtgagttgcttgttcattgagattattataaagttggccagagaatggattgacttttcaggtcctagacacacctgcccaggaagtaacgtcactaatagtaatagtacctggaggtagcatgagcttattgatttagttttacttctgcctgaggccaaaatgtcctgcagtagtaatgattcaaatgtacctcatggaaatcaagtgaggtaatgcaaagaacatgaaatccacatacttgctgctgttgacagaaaactgttccatgccaggcaggatctagccaacaggctgttgtagattgctgataattagcttccctgaaagtcgagggggtgacctgcagacatgtcactgggttaataatttctgtttttgtttttataacttcccttgaagcaaagttctttcctgtgtccgggtcttcccagaattggctgagagaaccgacaagcaactggcttgctatccaaagtgctaaagaatcttttgcgatgctgtgtggcaacaatgttgcaatcattaatagaactgatctaaaaggaagaaagagagaaagacaagaggcctcaaagcagcgagaaaggttgctggaggtactgttccagaatgggttgtagaactcccagctggtggacccttcacttacttcctgtgtaggtagtcaacctttttcttttatctctctctttttttttttttttttgagatggagtctcactctgtcccaggctggagtgcagtggcgggatctcggctcactgcaacctccgcctcctgggttcaagctgttctcctaccttagcctcctgagtagctgggattacaaacgtgtgccaccatgcctggctaatttttgtatttttagcagagatggggtttcaccatgttggccaggctggtctcgaactcctgacctcatgatctgcccacctcagcctcccaaagtgctgggattacaggcgtgagccaccgcgcctggccctttcttacacgttattaatattaatacaaatgtgtcaccaatttcactatcatcatgcaccaaataagtcacttcctagattaaaatactaagtctcagaaggcttaaataagggcatctacccacacgatcctgaagttctgtgggaggttgtatttatctttcacaattattgaattccttgctctatagcgagaagatctggccacatgactttccctggccaatgatatgtaggagaaagcgagtgttaggagccacttgtggctgtgtctctctttttctgctgttagatcagcatgtattttaggtacaggctgtgctgtcagcctggatcccagagggaagaagacacagagcagggtacccttggtggatgctcggcaagagccgggagcaagcctctcctcctcaggcctctagggttctggaattgattgttatcacagcataactcagcccagcctgactgataacagacatcttaagtattaggatcttcagtttatatttatttaaaatgatgttatcttgtcacattgttccaaaaactattaaatgctgcttacaaaatacatccaattcagtggaattaaaatgaataaagcacataactcataacatttttgagtaaaagaaaatgagggtagagaaatcaatcaaggccaaggctgacaccgtttgatccagtaaagtgtgtgacgtgtctgcccaaggccagccacagtgccactgtaaagagggaacacattgttcacagcctaaatatacctgactgttttcatctccagcaagctctgcacacagtgagtaatagcagagtgagaattaaagtgtgctactttatcagtagctgaacaggtacataatggccctttaaataaaatgctggattaggacacatcacttaggtctccagacttagtagagtgtcttaccttccgctgtttcttctcaacccccaagtctaaattttgattcaagcaaacttgaaagtatctgcaaggcgagaaagttagctgggtctgaggagcaggctctggccaagctgacacacccagctgtgcattttggagagtgctgcaaagcaaagtctcaccagggcctgcctctctgcctactgcatgggaacaggaagcctatcagagccgacggctttgcacgtcaggcccagcaacccaagggcactattgatctggttcaaccgatacggtcctgagtgggagtctagaggtaaggacacggtgtgtagagtcagtgatgatgactcgatggcaaggtagaaacacttcccacgctcatacaaactgtaaacccaagtgggtgtacttttctttgtttaaaataaaaagaataattggctgggtgaggtggctgatgcctgtaatcctagcactttgggaggctgaggcaggcagattgcttgagtccaggagtctgagaccaggctgggcaacatagtgagaccccgtctctataaaaaattcagattagctgggcatagtggcatgcttttgtattcccagctgcttgggaggctaaggtaggaggatcacctgagcctgggaggtcaaggctgcagtgagccgtggtagcaccactgtactccagcctgggtgacagagtgagaccttgtctctaaaaacaagatgaagcaaaatgataatctcagccacctgtcaccagcttaactgcatttctccaggtctgagaaacaaattctatacatatttttatgtctctgatatcattgtatatcttataaataatggtataccatattttaattgggagtaatttttctttataaagtggtccataaaacagtgttacatattacaatcaataatctcttagatttgatgaaatgtggtaaaagaacatttaccatggcaaaaataccaccttgcatcaggagagaaagggttctatcctgaatagcccacgctgggtttaaggagaggccttagcgagcccccagcactctgacgtgtctgacatccagtctttggacaacaatcaaaaaagggacatccaaagctggcccatttcagaaaaggcaacgcagacacctgcagtccctgacatcagtgattccaaatgggttgggactctttgatcatttttaataaacccaaagtttgcagctcaaaatggccagagccacgtagtgagtgatttgcagaagcaaatgcaatgcttggaccttcaatccccagaaagcaaggatggaatggtgaaaccagctgccgccaaacagccaggcagtgggcgtcctagcgggaaagaggaatagaaggatttgagattaagcaggcactgaacacctaggagaccatccttagaatcccagtctctttatgttgaaaattattgcctgttagaaagacctgtttcctaaggcaaagggcaaggtgaacataacatccatggcattaagatgcctaatgccaggtttattatggtatgtgtatgtgcacgtattttctatcctgcatgctaagtatttgaagtggaacttgcagacaaccatgtggagtgatggattaaatttcccctttcttaggaagttcagaagtccaaggaggcagtgttcatgaatagaaggttccttcatcttggcccggcgtggtggctcatgcctgtagtcccagcactttgggaggccaaggcgggcagatcatgaggtcaggagatcgagaccatcctggctaatatggtgaaacctcgtctctactaaaaatacaaaaaattagccgggcatggtggcgggcacctgtagtcccagctacttgggaggctgaggcagaagaatggcgtgaacccaggaggcacagcttgcagtgagctgagatcgtgccactgcactccagcctgggcaacagagcgagactccatctcaaaaaaaaaaaaaaaaaaaaaagaagattccttcatcttagcggggaggatctgaaggagtcaccctggttacatctttgtatctcaccctcacaatgctcatttagtcatcggtggatccctttaaatatcaagtatgggatacaaaaggataatactagaaaataaatactaactcagccatgctatggtttaaatatcaccaggcacacaagactcaagaactgcttttcaaatccatgaacatacgtgtctacagtcattttctagctgggtaaccctgagctggttatgcagtctctctgttagtttccttatatgtgtaacataaaataacagtaatgtgtattattgaggatttttttttttttttcgagacggagtcttgctctgtcaccaggctggagtgcaatggcgcgatccctgtgatctccgcctcctgagttcaagcgattctcctgcctcagcctcccgagtagctgggattataggcacatgtcaccacgctcaactaattttttgtattttagtagagacgaggtttcaccattttggccaggatggtctcgatctcctgaccttgtgatctgcctgcctcagcctccccaaagtgctgggattacaggcgtgagccactgtgcccggcctcattgagggttttgaggaggtttaaatgaattgatattggtgtttgatgatgatgacaatgatgatgaaagttgttattaaaccatcgctccctccctgtggccagccttcccaccttctgggagatcttattcaatcttttaactctccccttttctagagctttccttctgctttctggatcacagcactgggaatgtggatctgcttttagatcagtgctttgagaagtaggagaacaactgtggtcgtggcggttggtctttgatgccagtaagcaacagaccatctgccttgttgttgatctgagtcattgatggccagattgaaagagcagagggttcctgagtcccaggtgttgcaggacgttgtgtgtgcccacaagccaggctacatggcttagagcagcagcccaagtgctccgttggttcagggggtagcaggggtccatggagaagtcagagtcctgactgccagtgtttggaggcatggtttctgtaagcttgttgcgcagcagtcaagaaagatctggactcgaggacattggtgtcagtgtcacctacctagctacacttggtctggttgttgacattgtacttcagggctgtgggtcttccagggccaggtcagaagcctgctgatcgacccaaagtgtggatgatggaagctgtggagcagggctgagggtgaggagagaaggagcccattaaccacaagctcagagtatactctgattccctaagaaggctggtccaggaccttctgagtcaagtctgaggttctgatgaagggagaccatccgcatagtagaaggtccccaagattctgatgaagggagactatctgcatggtggaaggtccccaaggttctgatgaagggagatcatcccgcatggtggagggtccccgaggttctgatgaagagagatcatcctgcatggttgagggtccctgcagttctgatgaagggagatcatcccgcatcgtggagggtccctgaggttctgatgaggggagatcatcctgcatggtggaaggtccccgaggttctgatgaagggatatcctgcatgatcgagggtccctgtggttctgatgaggggagatcatcctgcatggtggagggtccccgaggttctgatgaggggagaccactccatatggtggagggtctctgcagttctgataatgggagatcatcctgcatggtagaaggtccctgaggttctgataaagggagatcatcccacatggtggagggtccctgaggttctgatgaagggagatcatcccacatggtagagggtccccaaggtttggatgaacggagatcatcccacatggtggaaggtccagcctggcagtgtgacccaaagtggcttccctaatctttctgagcctctgtttctacaaactctaaagtgcccactcaccaggggtaactgttgatttttactttggctccacaatgtgagtgtctggtatatttccagttacatcgtaggaactcctgtgatggcatgaggagggtgagggtgatggcatcccttgatgattcctgccgaccacagcaggtacctgcagtccctgtagttcctcagggacactcctcacacccgttagggaacagttcaccacagcatccttccacgtcctctctccaggtgaactcagagatctgttcattcaacaagaattgatggggcacctgagtcattcttctaaggtagttgacattcccagtcctgattcatggttgttccatccttatctcatctgttacctgtcaccgatcatgtacacctttctatctttgagtctgttttgcacatatatacaagtaaatcacatcgaagtttaaattgtctcattaatttgtgaaatgtgattacaaaattcttgaaatcacatttctatcctattaggaaagcaaaaaggagaaaacaattttgaagcctaactcctaagagaattgctgtattacaaggagacagggatgctgtgaattcgttacaggaaagaggatgtcagccctcatgcctttgtctcccaagggcctggactttcctccacttgatttgtagagagtgcttttggaagatgggtgtgttttatttagatggtacaggtgtcagaaggtaagaggtgtgatggaagttgataggtgactgttacttgaaggaagggggaatgaagtctaaaaggttagctacacattttatctccctgatctccctatgatgcaaagaacccaagaatgtgtctttgtaacaaaaactggttgttacatggacagtgatcagagaaatcacttgccgattagaatttctccctatgtagcattccatgaaataaacagacagctgctcctggttcccccagaaaaatacagatttgtaaaaaaaagaaaaaaaaaaatactacttgttaccaaaatgttttctgagtatattcttttatcttacagaaaacatctacgtattttaaattattgttgtggaaaatgtatacacacacctacacattcattgtaagaaattccaaagtaaaagtttacctgaaattctgtcatgctgatatttattttttaagttaaatttttttttttttttactgaaagtaataattggctgggcatggtgacttatgcctgtaatcactttggaagacgaaggcaggaggattgcttgaggccaggagtttgagaccaatctgggcaacagagttagaccgtgtctctaaaaaatattgacaagttggctgggcgtggtgctgtactcctgtagctctaactactcagaaggctgaggtgggaggatcacttgagtgccggagttcgagtctgcagtgagctgtggtcgtgccactgcactctagcctgggcgacagagcaagacccattctctaaaatcaatgagtaaataaatcataaaaataaaaataattgtagatatctgtggggtacaatgtgatgttgtgatacatgtatactttgtaaaatgtgatatatcagctttaatattttggtggacaccctttaattcatctctgttacaatatacatatactgtatggaattgtgtgtgtcataaatgaaaccatggcttctacttcagtgatatccattgtaacatctactgggaaggttggatgcccagaagatatggccaactaaattactcagtgtatgaacaagaagcacatcatgtcgtcttaaaagtgattgtgttcttatacatttttattgtggatgagttagaaaatatggagaagatagaaaaggtgctaagagtataatccaaccaccctaggaagactttgtcttagtccctcagggctgctattaaaatgccatggatcttctggatagctaaacgatgggggctcctggagggtggggctttcaggtaaggcatggataccttgccctacccatctcttcctttggtgttcatcagtatcctttgtagtatcctttattaaaaacagtaaacatcagtgcacacttaaaagcatgataattgccaaaagaatagcttctgaagaccatgggttcagaggtctgaaacttggaaatcactcaagggaccctccgcctctctttctcttgcgctgtctcccagatgctgccacaaccagttgaatggtataacattaacaataacaattaattaaataaaagatatcatacactgggtagcttaaaaacagcagaaatttatttctcacagttctggaagctggaagtccaagatcaaggtgccaatagatttggtgtctactgagggccagttttcttttctttttttcttttttttttttgagatggagtttcatgctgctgcccaggctggagttcagtggcacgatcttggctcactgcaacctccgtctcccaagttcaagtgattctcctgccttagcctcccaagtagctgggattacaggcgtgcaccaccatacctggctaatttttttcttttctttcatttttttttttttttttttttttttggtagagacagagtttcaccatgttggccaggctggtcttgaactcccaacctcaggtgatctgcccacctcagcctcccaaagcactggcattacaggtgggagccattgcgcccacgagggccacttttctgagtcaaagagggtgacttcttgctatgtcttcacatggtacaggggacgaagaagatcctttgggctcttttatcagggcaacaatcccattatgacatctccacctccacagcctgatcatcctggaaggccccaccttttaataccatcacgttggtgattacatttcaaggtacaaattttgggggacacagacatttgcaccatagcagacttacattgattttgtgctgtatttttttcctaggcctttaacttatatatttcaaaacctaattagaagggtatagttgagagacaggatagccaagtggacaagagtccatgccgagggagcaactcgtgtggagaccctggacgggaagtctccccgcacgtcgattcagagaaaggtaacggaataaacatgggagatcttggtgggagaggtcagagagagcgcggagggccagaccctggcaccttacagcatcctacatacttgggctttacctccagagagatgacgtgactggaaggtttgagtcgaggagtgaggtggcctgaccaaggtttgatgggactgccctgtctgctgtgttgggaagagaccacaggtgaccaagggctgaagcagggacacccttcaggaggctgtttctctaattcagccaacaagtggctgatgttcctgcacactagggaggtggtgatcagatatgaaaaaacagcattccaggtcagataagatgtggggaatgagacatgaggatgggccaaggatgagaccaagatctgggcctgagcaactggaagaatgcagttgcttcgtgttgtgattgggaaagctgtgggagaagcggtttggggttgaagttttctgttttgcagatgttgggtttgatgtcctgggaagttgaataaatgagtttaagagcaggctagaagttgggctatcttcttaggagtcatcagcaactagatgatgtttacagccttaagatggatgagctgagaaagggagtgaatacagatagaggagagagcagccctggggaaagtacagacttgtcaagctattgatagcatatttgcaaatggctttgaagaaagacccagggcactttcccaccagcagtgggtgggaatgagtgccgtactgcacacttgtctgttctctgtattactaattttttaatcatgaccaccttgaaagaaaagcttttcttgctaaattactgtttgaattgtaatttatttgattgtcagacagggtgaattttcataaaggtattagtcatttgcattacttgaagtgaattatgttcattttccataattctaagtcaaagagattatgttttattctgacatcgtggaagccactgaacatttttaaagagcacagcatgatgcagatggctatttgggaatattaatgggaaagttcctatccttgcatcctcttttattcattcatcagtgagtctgactccagagcttcaattttctgaaaagtttggaaaaactagctttggataattattagtcacgtgcaaatgagttaactgggtattaatggaatgaaaccactgccatttcttgctggctacagtgtgaagcaaccacttagggtcatccgtcagccttgaatcaagacacagagtacagaagacagatttccatcctcttctttgcctttcttcttaaagctaattatcagctcaatcctttatttcaccccttcctacaacaaaatgggatgcactagcattattcatatccagccttctctcagtgtgtagtcagggtagtcactggtgggtcattgtcttcatggaagatggtgtgacttccatacttagaaaccagcatcctctgatgttctcagcaggatatggctcctattgtattgtattgtattgtattatatttttcaattgacaaaattgtgtgtatttttcatgtacaacatgatgttttgaaatatacatacactgtgtaatggctccatctggctaattaacatactgcacaccatggcaactacagttaataacaatgttttgtattttgaaaatctctgagagagtagactttgtgttcttaccgaaagactttttaaaggcataaaacatgagtggttcacctgctggctctcactaaatcctctcatgcaattggctcaaaaatcatggaatagacagttcagggaggcagagtttggcttttggaattgctttcaggacctgggatatgttgtaaggacatggtctcttgaatatctggaatctgcaaaaaatgagtagtggcaactggagggactgggtttggggaaacatctcttgagcttggctctcaactaagccaacagtgccaactctgcttcataggcgcagcttgttttagaacaatgtgactaatttttttacacagttctgaaagcaattctctaaaaggaattccaaaaatattttgaacagcagcattattaagattagctgtgttccatcccaaggtgactcctgtataggaaatgacgctcactgggatgtatctgtctttcttggcctttcagaagcagtctcgggagattatggtcacacttgtgtacttgcagctttcccatagaattaaaaaccctgactaattaccagaaactcagcatttaaaatcactgtggataagagtcaggctagaactataagatcatgttacccactttctgtagggaagtataattcagcatttcaaatcagaatggaggtgcttcaaagatttgccattttaagaagaaaaaaaaaaggataacattcatcagagcatttgccaagagacagtcttagcactaaggcagctctcatccttctggaagcttgacagtcttaccatgatggtgaatgagacaagttttactatcatttcaggctcattgctgtaaatgtaacctttcttcaggtgaatgtcctaggaagaaaaatattgttccttacagaaaaaacaaacaaaaaaactagttaaagtatttcatgggaaaaaaactatttaaattcattattctgtcagattccgtggagggcctccgaggctgccagaaacagccctttctttgagcacttatttctgtgataccctgagtacacaaattccttttacaagtgacttttcctcagacaacaattgaattctaatgtgtttatcttgaacttgtattatggctggtagcctaagcattgtatttcaacagcctcttaaaagtgtccataatagatgtggaaaatcaaagtgccacacatccagttgtttttcagcttttggtgccttaatttgcatcgcctgatcagctgaggatctgctgagtgcagaaacaatcttcgtgcaccggctaatttatagcatggcagaacagttgttttctagacaacttgtaaggaaactgcttctcctcatttgtcttctgatcagagctgcacaagaactcttgatcatttacaaatgacgaaagtgagacttgtaaaaggtgagagtaaatcttctatcttattctcttattgtttgctacttggctttgatttatcattttgtgcctttttttttttttttttaacagaatctcattctgtcacccaggctggagtacaatggcgccatcttggctcaccacaacctccacctcccgggttcaagcaattctcctgcctcggcctcctgtgtagctgggattataggcatgtgccaccacgcctggctaatttttgtatttttagtagacacggggtttcaccatgttgaccagggtggtcccaaactcctgacctcaggtgatctacccactcctcggcctcccaaagtgctgggattacaggtgtaggccactgtgcccagcctatcattttgtttatatgaactataagccactagcatccacaaagggggaaatgtcttctgattgatagagcttccttttcttttttgaacaaatgctaagaagtagcaacagccaaaggacaagagctgtattgtcttctctcatgtgtggcaagaacaaacaagattgagaatctgattgcattgaagaggcattgttcattaaacttcctccagacctggggaagaggataaacttcctccagacctggggaagaagataatctgttccacagaaaatacagaatgcataacattcaatgaactttgcacagggatcccagaagtcttggctgtgatccaggacctaccatgactttctttgtttccacctcctgatgatcttaacccgtgtcatatagtttggctgtgtccccacccaaatctcatcgtgaattgtagctcccataatccccacgtgttatgggcgggacgtggcgggaggtatttgaatcctgggggcagatttttcccatgctattcttgtggtagtgaataagtctcgcaagatctgatggttttataaaggggagttcccctgcacacgctctcttgcctgccgccatgtaagatgtatctttgctcctccttcaccttctgccgtgattttgaggccccctcagccacatgaaactgtgagtccattaaacctctttttctttataaattacccagtctcaagtatttcttcatagcagtatgaaaatggactaatacactgtgtaacctctaagtttcctcaacggtaaacaagattttttttttgaccaatgatctctaaaattgcatttggctttaatattctgtgatttcatgaaaatttatattaaatttgccttatgttccatacagctctaagctgtctctggctaaaatagggaaacattgtacaggcactcccaggaagggaaggacgctccccttttgttctgtccaatttgggtaaacctttgtctatgtttatttataataactagaaggaaaaacagtacaagaatattctgtgtctttatcaacagcacgaacacttctgccatcttaaataagttaatttctctggatgcttcactatctggcgttgcaccagctgctgtgtggctctttaataggcatagaggaaacaagactataagcctttcagatcatgcaatgatttctctctaccaccccatcctttaccttttgttaaaatatttgcaatgcccttcacattgccacattctctctctctctctctctctctcacacacacacacctgcatagaaacacacaccacaggtcgtctccccttcccttttagttcccccccagcaggcagatttctctccctagccatgtcctgtgcagcctacactgtgccgcatcctgggttgtttagagtcccatagggcatggattggccagccacagcctgcaggccgagcaggcccccaatgtgtttttataaatcatgtatcgtggatcgcgtgggaacacagatgctgtttgtgttcatgctttgtcagtggctggtgcaacaacagcagagttcagttgtgagggacaaccatgtgtttgctgcagagcctaggctatttactttctgggcctttgcagatgaaagaggacagccctgctgtagggtgacgccatcatcatctctaaggactgctctcagggacaccatccctgaagtgtgagggattcaggggctcccctcatctaatttgaagcaccttttgtttttccctgtggggcctggcgacagggtacttctgtggctcagcaggcagcaggcaggtgagcgagctgtggccaggtgctgggaggcctccctgtggccacatgtagccttcgagggaatgtactctgcaggggtgtgaaagcgccccttctccttttttttttccatcaaggctgttcttgtttattttgaccagataataaaataacagtgtggaataaaataatagttgtgtaaaggaagatagttgaggttctaaggccagcatttgaggttctcttccacattttggggtaactcatgtaaatacaatataagcataacttctggaagctcattaccctaaatttgacctgctctttcccaacttattatagttctagagtgtctatttctgtaaaatatagggatatgcccaagatattcatctgaaggatcactgcacctgtgtgtgtacacactcacgtacatacaaacacgagcagacactcacagctgtcatctggaagaggagagtttctaggaccacagagacagcagtgcagaccttgttttgctacaaaacccacttgcaggaaacgaggaagcagaacactgcccagatgctttgctgagtcagggcagcgggagactgtctgtgagctgcacagtctcagcatatggtgaccaggatggatcctggtctgcaggtcacatgagccgacactgccagtaccagggaggaggctcagtgccagcacgtttggatggaaatgaaaacaaggcttcggcactgaggtagcggagggtccgtcatagcccagggtgccatcctggctggaggtgcagggacagaaggcccgggggaggagctcagggaccagccccagggatggcgaatgtcctgacataacgctgtgcccatcccagtgggtgctgaggaagctgaacggcagtgctgactctgggcacagtgatagccaaacaaactcctcacttgctgggctctgcggggcagacagtgaaggggagctgcaggtcagcagacagagagggaccagtgtcccgtgcatgccagagaaggggggggacgtgcccggtaggagggggagtgagtcatgaggggccctgtccgagagggatgccggtcaccacaccgggctcctctaaccctagcgttagtcatgtgccctcagctggaaagtagacaacttctcatgtcagcgtggcacatcccagcattgaaatcccacgtacaccggcctaacctcccacccaggcttctctccctaacctgccgcacagagtggaacctgcccctggctcagctggtctccctgccgtccgaggccccgttggcccctctcgattatgatccaggcttagtggatggcagcacagtgcatggtacataaagaaatggcatcatgcttggtacatgtcattttgtttatcctttacagcagccctgggaggtgtgcgaccttggtcccctctacaaatgaggagactcaggctccgttgcagaggcacaggggcccctgggctcacagcctggctcagaccccaatctgcagacttccccaccaccacgcgctgctctcccgttcacctgactccaagcttccagtcaaagtcggctttacaaggctttggtgggctccccagcccacacctgtgccccctgatattctaagggcggttatcacttgtagctaagacctggggctggttacatgttgcatcactctccaaaggcctggcccggagctgtgctcatgatcatcaacatgcatgtgatgatctaatcagcagtctgaaatgttatttaattttcttttatttccaagaaatctaatgtcacgtgaagcccttagtccagcacggggctgggtgcagttcccttaagggggaatgtaaagctattctgtctgtaccggcatctgcgctctaatactccctagaaaataagtaggaatcacagcaaagtgcaataggatgcaagttttgtctcctaagaagcttataaactggtgggtggagacaaggcattaatatctggatgggacaagcagggcagtgatgcagaaaaaaacacctctcagtatatgaaatgttctccaggaggtcagatgatccctgtcaggagctgaggaactgaagacaggccagcaggatggctggagcggccaggatggggctggggtggggaacgtcctgcagctgttctggggagaccgcgagctcgtcaccccacggcctccacctcttttcagtgcatagatagacggtgttcccatcttcccgcacgtagacagagtctgggactgagttaatgccactgaaatgtgagaggaatagccgggcgtggtggctcatgcctgtaatcccagcactttgggaggccgagacagccggatcacaaggtcagaagatcgagaccatcctggctaacacggtgaaaccccgtctctactaaaaatacaaaaaaaaaaattagctgggcggggtggtgggcgcctgtggtcccagctactcgggaggctgaggcaggaaaatggcgtgaacctgggaggtggagcttgcagtgagccgagatcaagccactgcactccagcctgggtgacagagtgagactccgtctcaaaaaaaaaaagaaatgtgagaggaagtgacgcgtgacccttcagtactgcctccagagccagggatggtacgcttctgtcgtttatgccaacagtgtttgtgggactttgtatggcagccagagtggactcacccacaaccagagttccacagggagagaaaaactcaaggtcaggactcagaaatcttgatcaacggacttacttgcaattggcctctaggcaggtgtggtcgctggtggacttagggtcccatggaggaccttggggaggctcagatcccaggaaagcagctggggaaccagggcggctatgaggagaaccccttgactcaggaaagtagtctggtctcaagttctagggccacccttaggatagccagaggaaggctagaaagccctgtgggcctccagcttccagccttccaaaagtgaggaggtggggctgtaagattacgctggctgatggctgtcgcaaaacactaagtttattacataaaagcctcaattccctcctaactatcaccaaaacagatgagttgtggtgtccagctcatcatcattgaagaaagaacacctcctttcttcaatttgttcttttgtgttttcttccctcttcagagctaactttttttttttttttttttttttttttttttgagacagtctcacttggttgcccaggctggagcacagtggcgcgatctcgcccactgcaacctctccctcccgggttcaagtgattctccttcctcagcctcccaagtagctgggataacaggcgcccgccaccatgcctaactaatttttgtatttttaatagagatggggtttcaccatgttggccaggctggtctcaagctcctgacctcaagtgaccatctgcctcgccctcccagagtgctggaattacaggcatgagccactgtgcccagcccagagctacctttgatgcccattttcatcatgttcagcttggtgttggggaaagcacaccaggagattcctgcccagggatggccctaggacaggtcctggagctgcccctcagagtggcccactgcatcacgtgaagcaagaacgcaccctttggttaagcctgttggaattacacatgccagatcccattcaactgagggaaaggatgacataggttcaaaaaaatatatgacaggtgctacgagggctgtcctagttctctcttagtaaggagaacctctgagacaggggcaagaagctccttcctgcagtgtattacatcctattcagagtccctttctctctgaagaatatgatgagctccctgcaaaatctgatctcctccctggttggaaggaatgagtggaacctgaaaagtgtggcatttttattgtccctggaatctgatctattaccttttctgtcctctgcctttcatcttcgttctactcatgcgtttgccccagatgagcaggtaagcttttcagatctggggattggggacttcccattttagatggaagtcctgccattgggttggctgaaaaggtgcgtaaggaatctgtcagatttatcacatggaagtctagggcaggcactgaaatccttttaggaaaaatgagtttccagggtagagaccaaacctctaagtcttaaagagagcaaagcaaagaagttgacatttagatctttcagcaaaccatgaagattctctgcctgtaggtgactagatgctagaaagagcctaatggatgagttgagaaagaaaacagccgagtcaagattgctaatgcgttcattacatgcatgtgagtgctttgctgtagaaagttatcgacgtccaaccccatgagaccattactgtcccatttagcctgacttctctcacacggcctcctctcgccttccctgcaacttcatttttagtttcgtattcctcaagacctatcccttaaagaaggaaagcaaagaatggtggaaaaattcacatccataaaagggtttctaaagctaggagccttgctaagctgcctgagttgtcacattgcagagtgcacggaatggccggctgagtctcatcagtgtggtggtggttacacacgctcattttgcctgatcaaatcgtttcattaaaaattcttaagctgtagacacaaaagtactttttcaaatacatcagtggcaatacagaagtagactgtaattcatttgtgtgcacttataatacaacacacctccccaaataaaatgcattttttttctgggtgttcactgcaatttgctacaatcagaaaaatcataaagggtagaatgatgtcattttttaatatattattttcatttttcaatgcctcgaagaaggtgcattaagatcatccattaccttagcgatagtactgttagtcccatacttcatatacagtacaaattcgttattatcagttaatattgacttagtgctcaaagtgttctagataacacacagtctataaagtacaagcgttaagtcacagccatttgcaatttctcttctgactgccaagaattaatctcttattcaacaaatattgttaagtgcctgctctgtgccacagttgggagcaaaacagacatggcctcggggctcagagagtgcacagctttccagtctagcaacaaagtcagacgttaaaccaacaattactgaaattagtcttaaattatagttgtgacagagacacaaaggtgagtgtggggcactgtgaggagtctgaaaaaaaaggacctcactcaggctggggttagggattcctccccaaagactggtttctttgaatggtttcattcatttgcttgccatttatttgaatgtgtcaagtcttgtgctagatttaagaagataagaaggtgaataagacagaattctgattctcagggaactccatgctctcatatgaaagacagctatgaaagcaaataattgcacagactttcatcatatcactttattgcattttgctatgaaagatactatgctgacatgcctcctggaaagaggaaccagatggaagctacacagattagataaaccagctggatcttagaagatcagttgataacatggcagttcatacagcatgaagttttctcttactaagctaaagtcgagaaacatgcccgatcgtaaggagcatcatcaaagtggcagaaggtgtaaagggaggttagtgttttgactgtatgctgggccagccaggacaagacatggcatggctccttctcacaagtaaaatcatgctaacaatgcactgtggccctctagcttcctcctccctcttttgagtctgtctgcagggaacaggcttttacagttccaggacataggatgcagaaagcacccagaaggaaagagggaaaactcattttgtcagtccaccgaaaagctggtgctgacctagccatgacagcacttccttccaaaccagaggatctatttgaatattggccaagggtcacagacatggagttcccatatatgaaccctccgttttggctttggtgggattgatatggacaaaacacgccgcaacttaagtgttgaagtcaagtgttgaagtcaagtgcagagtcacttgactctgtagcaatattgtctcaacaatagactaagaattacttgtgagtggttttgcactgaaatagtctctatgaggttgtactaggtgggccctaattttatagctaggggaactaaggtcccagagaggtgagctgatttactccatgtttcatgacacacagaaacggggatgggaccacggtctacccaccccagctgcagtgactgcaccatgggaactatttccccttgcatctccctgtaggactctgatgattcatgttgacatgtgttaaatgccagaggtgaagactttgacccatagagaagagagcccacctggggactaagcaggacttagttaccactccagctgccacctggagtaatcttcctgtctctactctttaagccccaattcatgtaagatctgaataaaagcggtgtgttcgccaagcatatgcgcagcttcaagacaaggtgtctggccttttctttcaaccagattgcagctccgaaatctctcctgtagcgaaacctggaacttccatagacattggtgctcccatctctgcacatgggagagggcacagtctgttttccaggagtgactgattgccttcaatagatcaggaaactaaccgcggacagaatcagttctacactgattttatactgtgaatgtttaaagtgaggcgttgtccctaacggaagggttagagaaatgtgcattgcttaatgggtttcttatgaagattaaatgagttcgtgcatagcaggcatggaacacacagcagtggctagcacaaaaatgagcccttgatgtgttggaatgtgttgtcattgtaaaccagccactgttggcaccagacagcctcggggtgctagagctgcctgtgacccacgaatgccatgtgaacaaactgacacagccatggcattttctctaaagcaaacacatgaactcagcaggtccctgaccacagatgtccatggtgggaggtggtgctgggtgatgtctgtaatgaagcagagattcctgggcccctctggggtttggtggttaacaattcatcccagtagtccaggcctggatcccacagccatggaatgattccctggcaggacactgctggagagagagggccccacagactccatcacttgggtgacctttggtataaaaggaaggaagaaacaggaaacaggaggtgactgcatttatctacagcagcctcagctgtctcttggcctctggggtccatgctgcagctctgagtctttttcagaaacgggaattcaaaggataaggttttaaatcattgaccatagagctgaaggtgtatcaggtacacagcaaggtaagaaatgcagtcccaatcttttcactggagtttctgcatggataatcagaggagttttcagaacatgctagataagaaacaatctctcttgcactcctctctccctctctctgtttctgtttgtctctctctcctttcctacacacttccccaggaaagttcgatttccataagctcttgtagctgcatattttacctgtggctgggaaaaaaaaggaatgggtagcaagccaagcacctctgaagcgtttctgcaatggcaacttaaatcttctgtgaaaagatgctggatagagaatactggatgagctgctccagtgtggaatggtgcctgaggaattgctattccccacctctattcaatttagcaccaccgttgtgcatgtttcgattaaaaagaggaacaaaacatttatgtactcattcaattcaccgctgcctttttatcacgcatcttctgtgtgccaggcaccaccccacgcctggcatcctgccaatggccatccttcccagggctggattttgcctctcctctccttgcgacttacaagaatttgcatttaaactgcacacttcacctgttggttgatacccaaaaccttcttaagagggaagaaagcttcttcatgacatcctcaatgacacgtaagtgccagttccctgtgagatcttgagggtgtggacaggtggccctcagaggcattggctggaattggatcctttgctgaatgctgcatactttaggaatggacggaggagcttcctgaggtggagaggaggtcagtaatggggaggagagagggcaggaagggaggcaggagaccggtctgtaaaatcaattttcccaactaaaaatgtaatgtcaggaggtagctgtgctccaggctgctcagatgtacatctaggcctgtctgtgtgacactcttgccagagcgggctgtgtcttgtgcagtgggcacaggaaggtgggatccctgggctgctcacgaggccgccccacactctgttcaggagacctagttatgagacggctgcctgtggttgcctaccattctgcctcttccctgccacctcatcagcacttttacctgtcgcctgcttatttaaacacgtggtccagcaatcacagtgagtgtggtgctgactgttgaatgcccatgctcagggaggcccttcacaaattctcagcaaggacttctctctgatgcatggttgacctgatgctaatggtcagctggccccagcgacactctggcattattttaccccctctacactttccctagattcgcctttccatcccctttttgaccgttctgattttgtaaaagccttgtttttcaggaaataccaatatacccttaataaagttttattaataaggtgtttaaaaaggacccagagtcaatgatttcatcaattagagcacgaaatacaaaagtctgaagatccaaaggaatgaatctctaatggccagctcatgacactatgtggcagctagggagatattttcgggcagaggtcttcccttgcctctcaaattctagaagtaaacatctgttgattttgtaatcaacaaaatgtattatatgtccgagagagtgacttgtcttggaaatttcagacatcagatcaattcggtacttgagtcctataccagggccactaaaggacttccagtccaaattccatcaaatcatgtagagccctcttttttgtccttctccatttgctcagctgtttttcctcccaagtagggagggcagggctgggaagcttcatcaagatttcctttgacacgctctggcttcagatagtgatttactttctaatgacgtgcctctgttttcattccctttccagtgtcaatctcagttgcaaacacccccaggaagccacacactcagctccattcagctccagccgtggtgtgaatgaacaaggaagtgagaagagtttttcattgcttattgccagaaaaatgtgtctgccagcttcagtgtttataaaaagcaattttgcctccccctaagctagcagtgtttaataaacatgtaatagagaatgtaggtttaatatttaagcatctctatgccccgagtctgagtgatgctctgctacattctttctgcaaaagggaatttaaaagaatgatgagatccagccccggcctgaaacaaaggcagttccagtggagtctgcagggttcactctttccttccctctctcctcagatagctgctccacggtttccccacttaggcaaatgagcatctgctgtgttcatggaaatcggtccaagtaacacaatagaggctgctgctcctggtgtgtgaaatcatcccccgaattatcaattgaaggaagattgcatcgtaaagccctggagcacgagcctcgttagcacgctccttccagcacagccggggctcggtccgtctggccatgtatttggcaaccagtgtgtgctccggcccaccctcaactaatgggtgtttgcatgggtgtgcgtttgtgcatgtgtgttcaccgccactagagtgagttcttttttggcagtttgtttgaacatatactcacccgaggcgtgtgcttggacctgtagatggacaaaagaggaaggcagcagggccctgccgggtcatgtgatgttgcagcggtgttctggaggacaccaggagggatgggaaggcagcgagaagagcgtgttggggactgcggtggtgacttctcagccaccttcctcgaaggggtggccttctccttagagggatagccagtcttgctgtgacgtggactgggagggtagtgccagcacacaaggaggaggcgggtgtggtgggaggcctcacaacacacggggccttgcaggccataactaggagggaccatcagtttcttatttttgtgtgggttttttttttttttttttttttgagacagaatttcggcccactgcaacctctgcctcccgtgttcaagcaattctcccacctcaacctcttgagtagctgggattacaggcacacaccaccacgcctggctaatttttgtatttttagtagagatggggtttcaccatgttaaccaggctggtctcaaactcctgacctcagtttcttgtttttgaaagatactcaggatgaggctgcagacacaggaactgtctttctcttctttgaacaaaccaagctgttttttgcctcaagcgctttgcgttctctgttcctgctgctgggagcaccgctgtgctttgccctgtccaagatgtgttctttcccacaggtgttggcttagggtaactgactcaggagggtcttcccggcagactgcaggctctgaagggtcacccacccttgcgtacactcatgttgtaaatgagttttgaccctgctggtgccaacaactgctgctctgtgtgttcttttagaatgctgcctggcttggaatgatcttgtttctgtttacttgttgattgtgcatctgctttcttctctttttgtattttttgtgagaagacaggtccatctccctagtttttccctctacggaagttcccagccatgcctggtacagagcatgctaccaattaatatatttctaatggaagccagaagctgggagtccaatcagaaggcgaattgaggtatcacagagcaggaagaatggctgcttggactacatagaggcagtggagatggaatgaagaggatgggtatgttttgagaggaaatggatgacttgtgagactagaaatttgggaagttagaaggatagaggaaatggtctctagagagcacctcgtataagaataagaggcacagggttggcggtggaggcgcttggaggcacagaagggtgctcttcctacttttttcttatcgtaattctcctctgaggatacaagtaaaggtcttattcatgtggataaaattgccaaattttatgtttctcagaagcagttttgtgaatcagtaagtgtgaaggaaatagcccaggtattaaagggaggaatctggaaaggtttgggccgagcagcttccaggggctttgtggccttgggttatccttgtcctcgtctaacctgcatgccgtgttgactgagtatggaattttccccaaatctttgtttttattgacgtagaacacgattgattttcaatcagttgatcaaattcctaagtggagcacactggaatgtgtgtggccaccttctgagggttcatgaaaaagaagtggaaggattccaagagcagccaggctttcaccttcattgaagctgcagcctcgtccatcagaggcacagacacaagaaacatagctctgagcagaaaacacagaatacagctgttactggaaaggggtccagtccagacctgaagagaaggttcttggacctcacgcaagaaggaattcagggcaagtctatagagtaaagtgaaacttgattagagaaataaagaaacaaaagaatggctactccgtaggcagagcagtggcataggctgctcaattgagttagttatttctggatcatatgctaaacaagggctggatcattcatgagttttccaggttggggcagagatttcacggaactgagagttcctccccatcttagaccatatagggtaatttctggatgttggcgtggcatttgtaaactgtcatggtgccggtgggagtgtctttcagcatgcgaatgcattataattcaagcagtgaggggtcactttcattgacatcttggtttcgatgggttttagacggcttctttactatatctcattttatcagcaggacctttgtgacttgtatcttgtgctgacctcctatctcatcctgtgactaagagcacctaacctcctgggaatgcagcccagtaggtctcagccttgttttacccagcccctattcaagatggagtcactttggttcaaacgcctctgacatagctgagcattaagtaccatagcagtttggataagtgggaagtaattgatatggatgggcacaccaggtggggaggactttctggaaatagtgatacattgatggtaaatacgatttggctgtgccaaaaagatggagaattttaggcagagggagcaatttggtcaagtgtgaagacagagctgaccatggagcagtttaacttttcccgacataaaatgcgaatttccaagctgaagaggagcggatctagagcccaaggtggctaacgctgccataagctagtttcagtcccgtctttgctgacggtgtgatattcctgaggccaccggggatgattcacaagggtgtgccgtgattccctttcacagaagcagtttaaaaataaaatctcttgcactccctcttagccaaaggaatccattgaaagccaccaatgtacttcgctagcagtagaagcgtcccatttggtggatgatgcctttcaaaccaggatcacttactgcattcctttcccagagctgccgtaaccagggacctagacctggcaattttaacagcggaaacctactggctcacagtcttgggagcctgtaggtctgaagtcagagcatcggctgggttcattccagggctgcgagggagggtctgtctcaggcctgtcttctcggcttgtagctggctgtctttgtgttcacccagcattctgctttgtagaggagtaaaaataaaatttacctctatcttcttaagttctctagccaggccctataaactagactggcaaaaaataataataataataagagaaaattacacagatttacttaataagtcccatgtgatatggaagccttcctaaggcagtggagacctgaagagacagtgaagacctgaagggacagtggggacccgaagagacagtgatgcctcagcgctttctgtagtatgctggatgaggacgcagaggtcatggggaagcgtgacaggacaaagggagtgagctgagggtgatcggtgggaaccgcagcaaggtctgtgtgctcagcctcctcccggctgcctctgcctttggagatggggatgctgtctccagtggggcatttggagggtgccgctcacaggtgggtcctaggacctccttctggggaggcggggaagtcggatggtccttcctgcgcctgacactgctcacattcttccagcttataatattcagtatgccaaggtagcatctttgtggtagtgtgtcctgaatcacaccagcctctgtgccagtctgtgtccacatttccccttctcataaagacactggcatgttggattagagccataccggtgacctcatggtaacctagttgcctttggaaagaccttgtcttcaaataagctcatattctgaggtattgggcattgggacttcagcatatgaatttgaagggatacaatcaactcataaaattgccatgattttttttcaaataagctgctatttacttttaaaaaataaagtccaatactgtggccatattgctttctgtcaccagcaggtggcatttctatagtccagggatggcaaaggaagagccgagtgctttcctgttgttttatttggaaaatgaagcattgttatgtacgggtgagagagagagcacagattaaactttggaaatgatagtcaatggtacatgatgatgcatggagacttttgccataaattctagacatattacaggaaaaccagcaagcccacaccggttcccatggaagtcaggaatcacactggcttctgggcttgaccctgtcaataaccagcttccaggctccgaccaaaacacttagaaataggaatgttaatactgagataattgtggcccagagacattttcttctctaccttcctcactgtttttttatttttattttttttaggatcagatgagataaaatatgtagacttattcaaaaatgaacaaaatataatacaacttaaacaaaggtcccacttacctgtcctctataatatagactaccttcccttcaaaacaccctccccgagaacagtaactgcgaggaggaactttatttccttcaagcagtaatcaagcctggcccatacgagatattaaacaggcatgaaataaacaggcacaggtaaagatgactgaagaagttattctgattcacatttaaggattgacattacttcaagcaaaattgggaaagaatatgaaacaaaagacgtgtggtctctactctttaaaagctcacagttaattttgctgtatttttaagagaaaagcaaaatggatatatataaaacagattaatagacgactgaattgctccaaaatcattcattcgtttatgacacagtgcggtcctgagactcctcctgcaggcagctggggtggtctctgcccggagcatcggcatgagccgcactgcagtggagtgagtgttgcctggtgttgcccacactgatggatgtctggaagtgcagctaagtgcagccacagagattcactgtaagagcactggatcctttactctgagaaggagatgtggcagtagcgcctggtagcataggccccgtggccccttgtccctgaagcttcttccgttaacagacctcacagagcccagccctcatttccttgcagctcaatccatttctttccagtctcggagatgcttttcttatgactcaatcaagggcttgcatggtgtgtggtgctggcactgctttcagaggctgcctgatgattccgagatccctctgctactttttcgtgcctcatgcgtcttagggaaggtgtttgcaggtgaaggaaaaggtgggtagggtagacgttcaaagggaatcatgaacttgttttgtgtctcttcaaaaaaactgagcaagctgattctcacacacctaaacacgaaagcattttgttactaagctctggactgtaacaccccaaactgcatatgtccctgataaactttattttcctctaatcacttggaagaaccgagtttactgtgtgtaactgcaaggggcaaagagacattggtgagtagaaggtagaaaattcctccttgcatgaaagggaagctggcttctctgtaacaattgttgctatctaaagctagtgggaaccagctggtgggaataaactaagcgccccttgaaaggctgaaacagggtctggagggtgagtggctactctagggggatcccagcactgggttagaggccaagctggattaatctagtcaacacatctctaatgttttcctagcttgagtcagcactgagtcgatttggtataagaaagaaaggaaacatattcctgtggggagacagacagggcaagagcacttcttataaaaattagcatacagagggatcattaggctcagcctcaggtggaacaggtgcctactggaaggagcacctcggtttacctggggacagggtaggaaaggtttcaagggacaggaggcatttaagaattaaaattaaacactgaggcttctgggttgaataggagtttgtcaggtagacatggtaggaagggagtccaggcagagatggcggcatgtagaaaaataacaaggcccaagagagccgctgaaacttcatggaatgttaggtgtgagacaagaggaggtagagctggactaggaattggaagcctggttttgaagatccctgtacgttatgcgccgggagtttgtaggtgatgaggaggtatgacataagtctcagcaggggactgccacgatcacatatgcttgttagaaatatgtttgcaggtggagaagagactggtgagaagtgagggtggataaagaagcggtattgagaggtaataccacagcccaggaaggaacgcctgaagtggaaataaggaaagattggcagccccttaggcggtggactcagatggactgtagcattgcttacagagagaggagctgtgagaaaataagtgtcctatttcttaccttgccagttgggtggatgctgacctcattcaaggaaaataagaaggagcagagggcagagaagatggagatgcagacatggacatgtacaatggcaaggaacatatcggtggtggatgcagtaaagagttggctctctaggtctggaacatagaggtcgaacctgaagatcaagctgggggtcaacatgtctcgtggaatgcaagccacgtaggtgtgcgtgcggtgccctagggagagaagacaggatggagcacagggagcggccaacacctaggtgagcagatagtcttccctaggacagctcacggcagggagagaaaccatgagacttgagaagcaacagaagggaatgcagtgagggaaacatttcaagtaagagggaagaaataaaaaaaccggaggtcaaagacaggccaaagttcccattgtctatccactgcactttggtggccctggcgagagctactctgcagaaaagtgagaagtgaaaatcagagccctggggctgagaagcgcattggaggttaaaaaaacccgggggagtgagcgtggaactcgccaacacgcacagttgctcaccctagcacaggtgcatctggacgcaaagcaagggggagagtgagggagaatatctgacctgctcctgtttcagctgagattccagcgggttagaagcgctcgaggtcagtcaggcaggagctggtgagatacacgtatgggggcaaggaaacgctacgagactgaggattgagctccactcttttccactctgtcaccgaatgtgtcaccctcctcaaatggagtgacccaggtgtcggggactctgtctcagtctggatccctccccctggcagtcgccactgacatgctgcagctgctggatgtgcaaataactgatcagccttgctgtccaggaatttacaggcgtggtgagattattttattttattttatttctggatactatcctaaaccttcccacaccaaacacaagaagttttcccttgctttcttcccccactccttgccttggaacatgataatcaagaaaaactgaccaggtgcagtggcttacacctctaatcctggcactttgggaggctgaggtgtggggatcacctgagctcaggagttcaataccagcctggtcaacatggtgaaaccccgtctctactaaaaatacaaaaattacttgggcgtggtggtgcatgcctgtagtcccagctactcgggaggctgaggcaggagaatcacatgaacccgggaagcggaggttgcagtgagccgagatcgtgccactgcactccagcctcggtgacagagctagattctgtctcaaaaaagaaagaaagaaagaaaaaactactgaatgaatctcattaaccttttgaacaatcctgtcactgtgggaagtttgtcctcgtgggttgtggtagaatgtagacctcttaaatacaagacccagctcctgttagcctttgtgaaaagaatagtgttttaacacttagtatatgctcaattaatgtgatatcaaaagcaattttctaccatttgtgttatttcagcatagctgcctttcatgtgtaccctgcaaccacattgtgaaatagacattttcattcccatttcacagaggattaaactaaggccagaaagattaagaaactgtttcaaagctatataggctgctgatacatcacttatatcactaggtaaatctcactcagattcaaatccagattttaattctatcaagtatatgcaaattaaagaaagtgttttattatttttttcctggaggggattccaagaagaagggtaatcgcattttccaaattcagactgtgatgagcacagtttattacggagcatccatccccacatggggtgaaatgtggagaaccaatgtcttatgagcacctttgaatgaaaatcttgagtccttccagcagagaaaggactttttgaaaggtttatttattcctttactacattccattcttatcttattaatagttcataagtctcagctaaatctctaggtcatagtaaatcacatccttcactatgagaacttgagatgacacaagcattcagttatagcaatttatagcaaatgcttaaaattggtatacccacaatctttcaaagccctgtcaaatacaggagtcagtcagatacaattttaaaaggcttaccatagaaagctctaaatctttgcatagtcaagcatatcttaatccaggagaaaattatttttgtaaacctttcctagaagaattttatgtcctgtattacaatcttataatgtggcagagggaaggtgggaggaagggagataaatacccatgtttatctccagcctgcagcagtgaaatgagatagttcaccatgtattccttgaaaaccactgaaaataaatatcaatactaccattatcttttaaaaaaattcagtagtctttcccacttgtcaaaacacttttttaaaatcttcctttaaatttccagagtgtcctcatatctagtttgcattttatcctcaacaccacaagaattaaataagggttggtattatcactgccatttatagataaggaaacggaagccaaagaagttgggtaatttgcctaagatcacacagctatttagagatggaactaaggaaatgacacagatctccaagcatttctgtaaattttttctaagtaaaagatgtttccttcttttcccaccaaccctcaaaattccgtgtgctgtctgtggaattcatgcacagattgctgtggttcggggaaagatcatgcccaggacgtaggggataaagagggaccagacctgcctcatctgtgccctcgctgcatgggcctgggcaagtcggtgatctgtcagtatcccactttcctctccataaaatgataaagctgggaaggaaatggtaaatatcacctgatcacctggattaaactctgacttggaggtttcttggctatactgttagtcagcattctccagagaaaaggaactaataggatgcatgtgtgtgtatatgtgtgtgcacgtagacacacacatacacacaaagaaacaggatagatgagtgcatgtgcgtctacaggcacacatacaaagacatttatttcagggaatttgctcacctcatggtggtgctggcaagtctgaaatctggagggcagcctggcaggagggaaatgcaggcaggtcttccatgttacagtcttgaggcagcactccttccttcccagaagtcctcagtttttgctcttaaggccttctgcaaatcaggggaagcccacccatattctagagagtcaatctccttcacgtaaatgtcagctaattacagatctccatcgcttctataaaatgccttcacttgaacacccagacaagtgtttgaccaaacagctgggcaccatcgcccagccaagttgacatctacaattagcccttacaagaaaatgtcctttggactataatgtttgtctgtaaagtgtcactatcgcaactatgatgtgtgtttctttggacaaaatatacattagttgaatagtaaactctgaccaaagatgtttagtattaaataactttcttaatagtcaaactgcagaactaaaatttaaatttctactaaattttgtgtgtgtctacccataattatctgctgattctcatactttacatttgaaggactctaagctcctgaatacagtacagatattcataatttttggagacggtttaccagattggcacctcatgaaaatggaatcaaactgtgatgggtaattttatgcatccacttgggtaggccttggtgccttgatgtgtgttcaaacattattctgggtgttttgtgtgagtatttttggaagagagattaaatttacatcagtgaacttcaaataaagcaggttaccctccatcatgtgggtgggcctcatccaatcagttgaaggcccaaatagagcaaaagactgaccgccccagttaagagggaattctccagcagacggcctttggacttgatgcacctctttcctgtgactccaacctgttggtctctcccatgcaattttggactagccaagcctccacgatcatgtgaaccaataccttaaaataaatttcttcgtctttctaaatgcatatatcctcttggttctgttcttgggagaatgctgattcgtgcataaacaaggctgaaaggcaatccttactatcgggaaggtaagaaaaatgaatgcaaggtgtcagaagtgatggttggtgggtgtgtagcattggggcaaattgatatttaaaaattaaactctgttcggctagccagccttcttcagtcttcagactgcgagaatgtagcatctctgaattttaacagggcatcatcaagttctgtcataatgttgttatagataagatggaggaaaatcttctgggaggtaggaaaacaaggggtagattaatgtaaacctagagggaaagtcctagtaggtttttagggaccactgttctttattgtgtcctagtgaatatttgtctagatggcttcatggagaaataaaatcttcgtggataaagaaatcatcatcattatcaccgtcatcattaatgggtatgagtacttaacatggcctattttgtgctttatatgtgttaccttatttaatttttataataatacttgttagaataggcattattgttgttatttatttatgtatttattttgagatggagtcttgctctgtcacccaggctggagtgcagtggtgcaatctcggctcactgcaacctctgcctcccaggttcaagcaattctcctgcctcagcctcccgagtagctgggattacaggcacccgccaccacgcctggttaatttttgtatttttagtagagatgagattttgccatgttggtcaggctggtcttgaactcctgagctcaggcgatccacccacctcggcctccaaaagtgctgggattacaggcgtgagtcactgcgcccggcccgttgttgttattttagaattaagaatttgaaacacagaagatgttaacttgggaaaggtcacacagtggtaaatgggagagcagggatttgaactcagtaagtatgatttcagagtctacactcttaacccatgtgcactctcagatatagctactgaatcagaagatgatataaagaaggaggaagtagtgattgtgtggagtgacagatgtggcccttcatcccatcccaccaggattcctttggattgtggtcctataaaggtgcgtgagaagcagatggatgttcagtaccgcccctgggcccagttcacagctgcaaaagtaccggatggagcagacattaaccaagagtcctgtgaccgagccaagggtagacccaatacaacctggtgtaggaggcagtgaagttgacgaacacttcggctgtatcatcagggaagcaacacttagatgtgggcaggtgggggctggtccagtccatgctgctcagaccccacctgcaggggtgctcagtgtagaatcaccattcagaagggagactgggctgaccacggagaggcaggagacaaggcaggacatggaggatggacagtagtgcggtttgaggaaggcctgaaagaattggcagtgtttgctccagaaaagagacagcgaaactcagggctggggataggagatggacgagcatcatgatagcatctcggcttacagagcatagaaagcccaggtgataggtcttcctcttacctctgcagcaagttcatggtgtgactgagggggtggccacagtctcaaatagcttccccaggtgggtctctgtgtcacaggccatgtgacttcaggatcccaagatgctcattctggcacatttttcagcaggacccaaaggatcaggctgtcttcagctgctaagaggaccagtcttttgcgagtctttcttactttcagcctgtcattgggcagatttctgaagcggaacccagtcctggcagcaatctttcttctgtctcagctaatcccagcctcagcacacagtgcaacattttcagtggtcttgtgtctgtaattatctttcactgtttctagaagcaacttcattgtgcaacaccattgctgtctggaagggtcattatctggaatcggttagttctaaccagctccttacaaactgcctttggtagcaaggctcttaggatttttagagtgttaaaaaaaattccgaaacccagatatgttcttagttgtaaattctgactaataataagttataagaaagaagacttcggaaaagtgtgtttgtaaattctttatattgtttctaaatggggtcgattacctgaggagagatgagttcctgccactggtgatgttctatcagagagacaagcaaaacatggaaagctgaagtaaaataacctcagggtaagagggagaaaaacagtaaatggcatgggtgtggggttcagggtactgagatgtcagaaaaatcagtacagaatgtgagggagaaggtgtgaagagtccaaggacgccacctgctcttgcactccgaaccctccccgctcactagcaagtccacagactgtctgctgaatttgtctacaaacagaaaacaaggcactgtggtgcctgttgtatagatgagagagcataggcttggggatggtgaaatgagccttctccggcctctcagactcaggctttcggagtttttgaataaacctaagttagtccacttcccggccacatagaagttggagcagtaaagctgatgggactgtttttcatatgagatgcaaactcctcaggttatggcaagtgagggcgagaaggaggcctgggcaagagaaaggacttgctttattttacatcgctagtttatggaagtaccagccaacactgaaacttcctggcctccaatccagtggggttattcatcctactctccactctctctgttttctgatgtttggaaataaaaaaaatcagaactacctcattaacgctctctttcctctttcatctgaagcagtgtgttagttaactttctcaacaagtttacatgccctttggctaataattgtggagaggacctatgactcactgtcattagtgtagactagctgccctagaaaaattgctcgggcgcggtggctcacacctgtaatcccagcacttggggaggccaaggtgggtggatcacctgaggtcaggagctcaagaccagcctggccaacatagtaaaaccccatctctactaaaaatacaaaacttagctgggtgtggtggtgggcgtctgtaatcccagctacccaggaggctaaggcaggagaatcgcttgaacccgggaggcggaggttgcagtgagctgagatcacaccactgcgctccagcctgggcgacggagtgagactccatcttaaaaacaaacaaaaaaacaagcagatagaccacaaaatagacaatggcttgaacacaataactgcttctgttttcctgtgtaagaggttagtgaggcaggcgcagggctgggggagtgcacttgtaagtgggctttgtcatcttcacagtatttttccaatgttgtcctgaagcgttgcctcattccctccacccgagcaggtagagaacagggaggaccccatgcaggagctgttgcggttctaacacgcatcctattctcttgggcagagctcagtcactcgaccatgcccagctgcaaggcaggctgggaatgtagactaactaggtgggtgagccagggaggaggaggagacctcaccctagccccagctacacttgcaggtcgagccaagagctgagggttttgcatatactgggtacactgattcctgttgagtctgcagcctgatttattttgtgaaactctagaatcatcggaggcggggttgcatccttggtacagccctctttatcattgccccatggctggggctggaggacagcaggaacagacactacaacaaaatcagctctcttggctccaatccctgaaagcccattgctatttctccctgaacatctggcctgtttcctggggtgtgtagagagaggccttctgttccttcagggcctcagctcagcacctgcgaacacagacattaaaaaaaccctcaagaactgcttggcaagcgcttggaacacagtctgctcagtatgcaccttcccacaccccctgcttgtagtaataatctttacctgcttggcagagcacgccgttgaggggatacatcacttcacctgctgagatgagtgcagagattttctaatgagaggcatttggtggcaaaaattaattatgacatatttcaaaggcaggccaagaacctggcctcctctccgttcccatccgatgcttctggtcactaagggaaagagaatgacaataacaataagtcaggacttttttttttctgttgtataaatagcagggaaggctggggcttctgacttcagcaccacagaatttttctgcagtgcctctttccctggcacatagcatgctcgttactaatgggtcctaaatgaaccccaggtgtcctggtgctcacctgtgggttgaatctcccttgctcagtaagtgtagaatccctctagggtccacctattttggagggactcaaactaggagtcccctaattgcattcttaggagaaggatatgacttcttgagatgataaaggagacattacctgcagacatttcaggtggaaagccaaattgtgaactttttcttgtgcagcttctccatcagcacttgctgcttcaccttgcactatgttatggagatggttttgctccttaaacctcatgagccaatctttgctagcttccagcttttcttctgcagcttcctcatttttctcagcctccatagaattgaattgaagagaggtagggccttgccctggattaggctttgtcttaagggaatgtggtggctggtttcaccttctatgcagaccactcaaagtttcttcatgtcagcaataaggctgttttgctttcttatcattcatgtgttcactggagtagcacttttaatttccttcaagaactttgcctttgcactcacaacttggctaactgtttagcacaagaggcctagctttcagccgatctcagctttcaacatgccttcctcactcagcataatcatttctaatttttttttttatttaaagtgagagatgtgtgactcttcctttcactttgacactttgaagctattgttggttgattagctggcctaagttcaatatcagtgttgctttttgaaaagagtaaaaaaccatttggagccaaatcaagcaaatgaggtgtgtgatcaaactctaatcacttagatatctgatatcacttagatatctgatatcataaagtaaaactttatgaagtttggggtacctgtggccatttcttaaaataagacaacagtgaggtttgccccactgattgactcttactttcataaaaggttctctgtggcacgtcatgctattttataacattttacccacagtagaacttctttaaaattggagtcaatcctctccagttgacttccttgtgtacgcataattttataattcaaaggcctagttttagttggacaaaaacacattggtcacattcttaatagccgcaccccaagtgagccaggaaaaatgcttgtaggaaaaagctgtaggaatgtgctcttcaccttcctgcaaaagattagggatggttgatatgtgagggaaggtgaaagctggaaagagtgagtgataccgaactttattttttcataggaaatacaatatttccttcactgagctgactggtcatctgttggaccccagcccagctcagcttagcagcctgtctgtgtgtgcacgtgtgtgtgtgcatgtgtgtgcgggtgtgtatgtgtgtacatgcgtgtgcatgtgtgtgtgaatgtgtgtgcatgcgtgtgtgtgtgtgcatatttgtgtgtgatttctccaggtgccctcatactgtgtggggacaatgagttgattgctcccctgctgtgtcactgggtgatctaggattatatcactgcctgaggacatgagtaccttttcctttgctgtcccctcaggaaaaagcccagtgtttcacagttggctgtccaaagggaggactgttctccaaccttcctaaaggcccatgtgtggggaaggatggcagtgcttctgacattgggcatggcaggtatgttaatgaggcagctggaaagccatgcccggctttgggcttccatacatgtgattatccctaacaccttcttttatgattattaggctttgaaaattgctctgagctatttttaagaagtctcagaataaaaagagatgatctgggaaggtgagaggagccgatgcccagccactgttaagaacaatggtgtttggcatttatctaggtctctcatcatggttcaggcaggaactccctagccaggtggaacctgtggcaggaatccacaagctgtgagttcaagcctcatgccagctgcctaagctcctatgagaagttggtagatggttcatgtcctttttcctcatttttttattttatttttttttaccagggccagtcttctgtgtaggcagagtgggcagaggcacagatcgtgtgattctaggtttatggagagcacgctcttttcaaagagcttccctcgctgctgtctgtgagtttatctgtgacctgctacagcagcagtccccagactttttggcaccagggactggtttcatggaagacaatttttccatggaccggggagtggggtggggtgggatggtttcaggatgattcaagcacattgcacttattgtgcactttatttcttattcttattacattgtaacgtataatgaaataactgtacaactccccataatatagaatcagtgggagccctgaacttgttttcctgcaactagacagtcgcatctggggatgatgggagacagtgacagatcatcaggcattggattctcataaggagctgacaacctagatccctcagttcacagtagggtttgcactcctatgaggatctgatgctgcagctgatctgacgggaggcagagctcaggcagtaatgcgagcgatggggagcggctgtaagtacagatgaagccatcattcatggctcaagttggggacccctgtgctagagcacacacacagccattatatgtcccctcttgtggctgatttgtttactgtgggagcacagactacactgcagaggagagcagagctggggggaaagaaatggcggtggcatcactttgctgggaaaggctgtcttgttctggaggcaggataaaggcagcatgaatgcttctccagaagactttatcttacaagagcctgaatggatgactagctctccaaaagtaaagcactggaagggaagtgaggtgccaggagataatagttttgaagactagtcctgtgaaacggtgtttctttgtactccaatggcctattttaaatccttatcctatttgatactgtctgcagaatctgatgctagtgactccttcttcctttctgaagctcacttcctccttcgctcctgtggtaatagccttccttgccttctctgcaaagttttcaagttctcgtcttttgtgcttctcttcctctgcctgaactttcaatattgacgtttctggttaacaatctaagatcatatggtcactgtgtgatttatgttgtctactccttggtgtcacaaccacccaccatcatgccgtacagtcggtcccagccccttacgtgagctgggtttttattttggaacttcctaacaaacgtttctagatgaagcccacagagacccgatgctcaggaagtaaacctgtcaagaagccaacacattatttgctcctccaaatgttcttgtttctctgtgtttcatgtcttggttactggtactatcatccacccatgtggaaccatctagaagcctaagaatcaccttcagacaccaccttcccaccccacaaatactctacattttagcagtataagactgtagcagtttcttgaatgtaacatgacatttctcatttccataccttcatttatgttgtttattcttggaatgctcttccttcattttgatgcttcacacgctaatacacatccttcaagacccaattccaatgtgttttctattttggggcctttttgactctcctacgaagactaaattaactgttccttcatttgtattctctaaagggtttgtactattttctatacatttattaaagacccctgagctaagacaacctcctaagaaccctcattgtttcaaggaatataccatatggaaaagtagaaaatgagagtaaaagggaagctaatgtgagggtaggagggaaggtgaggcagaagaggtgaaaagaaagaacagagtaaagtccaagggtaggggagttgagtggccacgctcataaggagctttgccacccctcggtttcccgagcacctgccacgtgccaggcactatgggggctttagtgtagatgatttctccctcgtcttgctccttcatagcaagaggaaggaagcaccaaagtaaaaaacccgagaaaacctggagaaggtgcccaggttgtctcactggtatttagtgctcctagggtggctggaaaaagcatcccgcttcaagaggccaccatctgacacagagcacccaggtactctttcctgtaaagcagaagtccccaacccctgggctgtgaatcaatatgtgtctacagcctgtgaggaacagggctgcacaggaggtgagcagcaggtgagtgagcatgactgcccaagccccacctcctgtcagatcagaggtggcattcgattctcataggagtgggaaccctattgtgaactgcatgtgcaagagatctgggttgcatgctccttatgagaatctgatgcctaatatctgaggtggaacagtttcatcccgaagccatccccaccccgtgtcccatccatggacaaactgtcttccacaaaaccagcccctggtgccagaaaatttggggactgctgctgtaaagcatgcacagtgcacgaggcctggttgagctctgagacttggctgagcccttgcagcagaggtgactgatgaggacacagcatcaggtcgtctactgcttcctgaacttgtactgactttcaggtctttttaccttttatttatttatttatgagatggagtctcactctgttgcccaacctggattgcagtggtgcgatctcagctcactgcaatctccatctcccgggctcaagtgattctcctgcctcagcctcctgagtagctaggattgcagacaccccccaccacgcctggccaatttttgtatttttagtacagacggggtttcaccatgttgatcaagctgatctcgaactcctgacctcaagtgatccacctgcctcggcctcccaaagtgctgagattacaggcgtgagccactgtgcccagcctgagtttcaggtcttcaaacaaaagttcacctgctccagagttgttgaaatgtaatgcattttctggaaaacgtgtgtctcattcatctcttgttggcgtttctgaaaataccacaggttctggagacgctaccgcttcatgtctcctagcagcactggccatctacctgggcacaccagggctccgtgaaaatgtgttcctgggatgccagtgtttccaccctgggatccaggaggcctggctccaaaccccaagtctgcacccactacctgggagatgtaggggcatgacagctgctcagaggtctcagtgtcctcacatatattccaggaacagtaggctggttgggccaccggcgccaacatcctgtggtgatttcttcatcatgacagggtttcgtgtctgtgagatgcctggcgagaatctgtagcaggttgcatgagagctggcttggctctgatgctccacattcttctccgtggctcctttcctttcctttcctttcctttcctttcctttcctttcctttccttttccttttccttttccttttccttttccctttcctttcctttcctttttttctttcttccctttctttcccttcttttcttttcctttctttctttctttctttctttctttttctttctttctctctttctttctttcatttcttttcccttccttccttccttcctttcttccttccttccttccttccttccttccttcctttctttctctcagaattcagactttggttaattgtgacaaacctattaataatttctgctctattagtttcctcatacaatacagtgctttatctgtcagccagagtttccttggtgtgtaaccgtggctcttatccagtgtatctcataatatttattttctgaaataatcgagagcatatgcttgttaatgcttttattagttcacatttgagaatgggttgccagtttgcagtctagataatattatggtgtctctgcatctgcctgtcagctgcatctactacttgaatgtttggttatttctccagcctcccctcattaaccattccggttcctccttaggcagcgctcctcatggccactgagcatgaagccaaggtccctgcagtgatatcctacacagacaagggtgtaaatagcttagtttcatcaggctgttgaaaatgacaccattctccatgcaccaattctttttattttattttttattttttgagatggagtctcgctgtgtcccccaggttggagcacagtggcgcgatttcagctcactgcaagctccacctcctgggttcacgccattctcctgcctcagcctcccgagtagctgggactacaggcgcccaccaccacgcctggctaattttttgtatttttagtaaaaacggggtttcacctgtgcggtggctcacacctgtaatcccagcactttgcgaggcccagacaggcggatcacgaggtcaggagatctcccatgcaccatttccatcatatttttgttactctgagtggtaacagaacctgtagctgctctgttaacctggaaacgggcttgctttgtacaaaaaaagttacctgctttcagatggggccggtgttcatttaatttttctgatgacacaaacttgatgatgatgaagttccctacagagaaagtcacactagaaagactgataagttttcagacccttgaggttggccagaactctaaagaagaggtagatatggagagacttggtaaaaggaatcatcctgacgtagtgacagatgggatgtggaagatgaaggagagggtggaatcaaagacgaatcatgaaagcgacccctctcgtggcgttgaaaagcttctcagttgttggagaatctttcacattgtgagctgattagattgaaaaacacacatatatggggctgtgacctgaactatatctgacgaagtcagcaattgctttgtgtgtttgtgcacgtgttcatgtttgtgcatgtgttcatgtgtgtgtaaatgggcctggtgtttgtgactcagtaactttttctaagagaaaacacgcatcctcacccttgcaggggaggcaccagctgtcagtggtgaaagagagagaagggtcttcattcccctcgtcttccctctgctgtctccccagccctttacctcccgccttggccccttctcccgttcatcttcctctcctcctgctccagagaaggaagtaattaaacggtctgtcctgtgttggctttttttttttttttttttttttttttttttttactgcatatagccctttttttttaaaaaattatactttaatttttacagtatatgtgcacaacgtgcaggtttgttacatatgtatacatgtgttggctttttaaggatgtgagacttgtaaaaacaaaatactatgagtagaagtatggaacaaaatgacaagcctcatttaccttaaaataagaaatctcttggccaggcttggtggtggctcatgcctgtaatcccagcactttgggaggctgagacaggcagatcacttgagctcgcaaattcaagtccagcctgagcaacatggaaaagccccatctctaccaaaaatagaaaaatgagctgagcttagtgtcatctgcctgtagtcccagctacttgggaggctgaggtgggaagatcactgagcccatggaggtcaagactgcagtgtgccctgatggtgccacagcactccggtctgagtgacagggcaagaccctgtctcacaaacaaacaaacaaacacaaaagataaaaaaaaaatctctaggtcagaagcagatgctaaagagatccagtagtcaaaggtgaggggaaatgttagagtgtggtcagggttcatcctgcctgcatgacactgcccatcctgtgctggggatgctggtggctttgggcttgtgtttagatttgcagttggggtcatattccaggtccaatgcattttcccatccctgataagctcagcacgatatgtgacttagctctcagtttctctgaaggagatggccttgcagtttgaactccaggagctcctaggagccactgtggaaaagaggccggagcatgaacaaggagcatctaacttcagcctgacaggacagcagcttgcagtgcagtagttacaacaactccgtagaattaccaagcctgccttgtagtgattggggagggagagttggtccgttgtcacattgttgctgtgactagtccattagctgacctcgggggtgtttctctggctcgtcgaacacagggctgttcagctgttacaaagctcgtgtccaacctaacatcagtgtctctctctgatttccttttgcgagcttgagagctgcctgtgatacactgttggtggtgcttcatggaatttgtcctgtgtgcatgcgagatagttttaattctctttcacaaactattaatgagctcacgtctagggttgctagagtttaggaacaggaatcagatgaggaataatgaatttaaagatatagatagaggactctgagaaaaacagctgagttagtgagtcctatctgtaaagggtatggtttcattctttttttatggccgtgtagtattccatggtgtatatgtaccacattttctttatccagttcaccattggtgggcacctgggttgattccatgtttttgctattgtgagtagtgctgcaaggaacatatgcatacacgtatcttttggtagaattatttattttcctttggatatatacccagtagtgggattgctgggtcgaatggtatttcaactcttagttctttgagcctgctcttcacagtggctgggattatcatacactcccactgacagtgtgtgagctttgctctgtagccttgacagcatttgttgttatttgactttttaaaaaaaccatcgagttggtatctcattgtgcatgagacggtatgtcattgtggttttgatttgcatttccctgatgatgagtgatgttcagcattttttcatatgtttgttggctgcttgtatgtcttcttttgagacatgtctgttcatattctttgtccactttttaatgtggttatttgctttttgcttgtttattttaaattccttgtagattgtggatatcagaccttttgtgaaaaatggacatttttaaagctacaatattttggtttttagcatatccagagagctatgcaacctatatcatgacctaagtttagaatatttttatcacctcagaagagaaacttcaaacctattagcagttattccccgtctaccctgtcccctagctcctgaaaaccactattgttttagtttctatgaatttcctaccaccactccatcatactctgccacccaccaaactaatgccacttccattgctaagcccactaggacactccctaaaacttcaatgcctgaccctcatgcctccgtgtattcctaaatagccatcgctgtagtataaccaaaaacaactatcattccgcgcaactatcattccatataagtggaatcgtacatggtgtcatctttcatggctggcttctttcacacagcgtgatgttttcaaggttcattcatgtagtagcatgtcagtacttcattgctttttatgactgagccatcccattgggtgtatttaccacattttatttatctgttgatcaatggtggacattggggttctttccactttgtggctattatgagtagtgctactatgaatatttgtgtacgtgcttttgtgtggacatgtttttgtttctcttgggtagatatctaagagtggaattcctgagtcatgtggtaactccatgtttaacctgatgaactagagggagaaggttggtaccttgccacgttagaatgacacaaatctctcccaggtggtgagtatagctcccaagtggtgtagctcctgtcctggctaagattcagccattttttttttcttgaataaatactcctcagattcttgtaagcctttggttattttgcagagttctgaggagggtgattttgacagttttgttcgagctgctttaacagaagagcggctttttgggataaatttctcatcctattgcttatttttaaaattactttctttgcttttaagctttaatagtgttacttgaactttgcttctaacagatgcatcatatttcagagataaactcattaaatcacatcatattccccaaaactttgacagaaagttacctaagtcaggataccttggtgactggactttcccctgagattgttttccttcattgcacagtaagttcatattctactgctctccctctctttcttaaatttttctatacttttttgtgtcctctttattgagatacagtatgcattcattcacattctctaatttaagagtgcagtttaatgagctttgaaaaaatgtgtagtcatgtaagcacgattatgatacaaaacaatttcatccttaaaaacagcttccctctatctttttacagtcagtccattcctttacaccccagcccttggaaatcagtgctctgctttctaacactgtggttaagtccctttctagaatttcatataaatggaatcatggagtacctatcatttgggtctggcctccttctcagtacaataccttcaagattcatccgtgttgttgcatgcttatcagtagttcaattctttgttattattatgtagaatttcgttatatggacataactcagcgtgttgatccattcaacagttgatggacatttgggttgtttcctgttcttagctaatttgaataaagctatgaacactcatgcataggcaattctgtgaaaatttttattcttttagcaaaatatttagtagaattactggtcatatgataagtttatgtttaacgttattagaaactggcagattgtgacaaatgatgagtatctttttgtgtatttatttgccacctgtaacttcactgacaaaaggatcacccagctccttgaccagtttattattggacattgccttcctattattgaattgtaagatctctaaatatatactgtcaaataaatgtttttcagatagcttattccaatatgtggcttgctgtcatttctttaacaatcttaatagtgccttttgaagagccgagtcttttaattttcaccaagtctaatttatcaacttttttcttttgtgattttgactgtcatactctatttaagaaagttttgtctcagccaaggtcattaagctttattttgtttgtttctagaaattttgtagttttaatttgcacatttagctctgtaatacagttcatgttaaattttgtagatggtataaagtaaagatcaaggatcatttctgctggtatgtggatgtccagtttgttcatgttatgttgaaatggtgattgtctccatggagttgcttttacttgcacttttattgaaaatgaatttgctactgatggatgggtctgtttctggactctattctgttccattgatctatttgactacctttgcaacattattacagtcttgattactgtaacttttaaaaagacttaaaatcaggtcgtttaagtcttcagattttcttcctctttaaaattgttttggctattctagattacttatgtttcaatataaattttagaataagtttgacgatttctgcagaaaatccacttagaatattaagattgcattaactctatacatcaattttgggagaattggcatgttagtaacattaagtgtatttgcgtgtagatctctttatttaggtattttaaatttttaccaatatcacatattttttaaagtttatcactgagattatatttttaagattattcaaaatgtgttatgaatttttaacttactatttccaattgttagtatacagaaatattatttatttttgtaaattgactttttatcctacaaatttgctgaactgttttattgattttgtagtttttccatacatttcttaggattttctacatagctgttcattttatctgcaaatcaagccagttttacttactaatttctgatttttactgcttttatttccttttcctaccttgttacactggctaggactgccagtaaaatgatgactagaagtgtgagagattaaatctctgcctgggttctagatctaaggggaaaagtgttcagtattcatccattcagtatgttacttgtcagtttctcatagatatcatttggcagatatcttttggcaggttatgagagttcctgggttatggaaaatgccataaatttcctcttagcacttccttgcatgcgttctatgaattttgacgtgtgattatttagtgtttgttcatttcacactcacatttttacacagataagtattgagctaaaggtcccataggactgtgctgcaggtctctagagctcaggtcttctgtgaagcacctcctctccaacaccctgctccataacgtctagctttaccgaactcctggaactctgggctttgtgtcctcagttcattaggccaccaggtcttatctcaatctcctttcttaggctgtggtctggaagctttctctaggcagtgagctggggccctcgtaagctcaaatgtttgtttcctgtctattacagatgactctcttgtactgcctgttgtccaaagtctaaaacacatcattcgtgtatttttcctatgttcttattgtagaaaggagagtaaatctagtccctgttattcctttatgctgagaaacagaaatctgtaggtttactatcacactgatcttgtgtctctgatttcatgaaggaagcgtgcatgagagaaactcccagaggcagatgtgctctaggaggagtgaaggacagaaatggcaagccctaggtagcgcatgaggctgggaccaccattctggggttgatgtttctccatcacacattaggttgacctggggagtgtctaggaaaacactgatgctgttttgcctcacaaacactaagtcaaaatcccaggcaccagtgttctgtgaaagctatgcttgggaaactgacgtgaacctatttgtgtgaagcatggggctagctcctctaagctgattctgacctgtcttatgtgaggtcactgagctggctctgagatgcctaccaatattgaagtatttacagactgaagcaatttaggcagcatgctctagtacttccagtatcttcagacaagctgcaattcttctaaggagctgaggggcaggagggtttgatctcacttggtagtacagtggcagttgggaagtgcccgtggacatgtgctatgttcagaattgtcagaattgtggacagtcactccaggcactaatactgggaactgccaatcaaggcacatggtagcaacttagtaaattgcaactttttttttttttggaatgaatttgatcaggtaatttgttatctctgagcctcagtattgtattagtattgccatgtgtaaaatagtctacttctgttatcttccaggattttgtgaaactcacataaaatagaccacgtgaagacatttaggaatttatttaaaaagagggaggactataaatctacttagtatgttttatgtcttaataatttaatttagtctaaaagtgggttagatgtaacggtgcctttagaaattaggtcttgtgtaaataggcattgttttggtttgaattagttcatagaggaaagtaggtttactttaataaataattgaaaacatattaatacaagtcgcaaaaattttttagtgaaaagtgtggaaagaaaaaaaaactacaataaaacggatatggttttctgctttctcgttgttggtattttatttaagcattcattctttatataaggctcactctccttggcttttcttcctctctgaaataaacagacattagtcacatgcagaattaaacgctgctgcagaattttgtggtgtggcatgagacactcagagctgatggaagtctagaaaggttaagccgttgtccgacctgaatcaagcaattcttttcaaacattcagtaaaatgcggccaagtaggcataatctaaaatggactatgtggaggtcccgtgggcaagattggggaggaattcctgggcagtcttcatccattttctttttcctattatggtaagctaactcacagcttaagtcaatccatgaatccatctctagtcctgggtcaagcaacaggggtgggagtctggtggggaatccggcacttagagtaacgtgttcaccatcgctcgtgtgtgtgtgtgtgtgtgtgtgtgtgtgtgtgtgtgtgtgtgtctaatggtaggatgtttcagtctcttctcgtattgctccagagagagcgctgtggtctcacaagtcttctgaggattcttcctggtggttcagaacagagtgtggactacagaaactttaatgtataatgtgttcaggaaagagtacctgtaatattttgcactgttcatttttagtatagaagctgcaactcttgtcttaatctacatctggttttagaaggcaggagttcttagggaaaggctggtgtagcttcattttggcaattttaaaagttttacccgatgaacccttagccatccttgttagtcctgcagacaaccgtgaacataccacagacaaggtgctcagaagggggacttacctatgcaggtccaatcatctgcaaaggatcgggcacattggagcctgaccgtcttaaaaaagcctttctttatgagaatccgtgggctttttctgtccaaggcaaagcacaaagcacttgttgggcctatttaaggcactgcaggatggcatccttgatggggtgtttcaggtaagccacttgcaccttttgtagtaactttcttatagacagtgggctcattcagtgtgtggcagatgcccggcaagcatgcttcatcttgctctgcagtggcaactctctcgtttcccatgtggaattgtgaccatggagcttcgtattttcagagatttagttcctaatgaataaagtattttaaatgtacttatttatttgtgaccccaaaaaagaagggtttgggttagatgatctctttcagctttcagagcctgcagtccctttcctgattccgaatcataaatgtatgggaatgtgtcaatgtgcaagagaaagaggggaacagaaaaagtcaaatacaaacacaagagtattccagttaacttaagcgagaaaatcttccacaattcctctttcttttggattctctcctgttgtctccaaggctcactgactccaacacagggccctgagggtcggttgcaaagtgcttgaacattctgtcctttgtttcacatctagtctcatttcagggtccgtttgttgacacttgaagtcaagcgctgtgtcatcagagagactctggtgcaaggcagtcagctgtttactttgctgcacaatctctgtgcccagttcagccagagagagcagccctgcatgcagcaaaccagaaccaagcctgcagcaggactcaactaagttgtcactctggagtgtttttctggctggaaatgaagctaatccttcctaatgcgctggcttcttcgaccatgtccaagcgagggctcacatttggctaaggcttcgaatcctgtttcagggaatccaattcaattaattcaatgttcctctttacttagcaaatactaaatacctactacgtaccagccagagcagtaggcactggagtacccatgagacgtaaatctaggtacatagtgggaatcttaaatttgctaggactggggaattcgggtgtatagccaaacaaagaaaatgtagtggaagaaatatcaaatgcaaaaaaagcaagaattcttagtttaaaaaaaaaaaattatttcacttatgaaaggagtcttctgtgaaaccacccctaggtgtaagccctggggatagatcgttagaaacaggaccccccacccacccccacagagtacctgggaacttaagcctacaaagattttctagactctctattagagaaattttaccaaaacagttatgtttcaggaaagtggggatcattttacccagtggccttgcaagtttcacagcaagtctccttgttatgggtctacagggaattaaggcaacttgaactaagagagaaaactatggtatattttctaaaaaaaaaaaagaaaatactgcaatgagagttctattttttttttttacttggtagagtaagtcatacctaaaatttccctgtaagaccttggtcaaaataagaatgttattactttggcttaatatcaaaatggtaaaacatgaactggaagtcaagataatagttttctttacatcttaattgcaaatccttcaagaaaaaaggaaaatatgacaaaagcaatatagcatagacattgaatagagactttgaagtcaaaaagcttgaaatcaaataatggctctagccgtcactcaatgtgaggtcggaggcaacttatgaaacctctcttagcctcagtctttccatgtgtaggatggggatgataatatctatttcacatggttattattacaattaaatgagtggctaattgaaaagctctttaacaagtgcctggcatgtagaaaatgctcagtaaatttcatttactatcattcttgttgctactgttactgttattattacctgcagtgtgtgaggtcttaggctgtgcttggacttggacatgaactgggaagggtgaaggggagggtgaactgcaaacctgagtaagggtgaaggagagggtgtactgcaaacctgtaataaaagaagtctgtattgaaagaaaaagaagccaggatccccagagatacaggggagagtgtagaatgtgagggaaccagcaaacccagtgttctctagtcttaaacactgaaacgtctgagacagctttatacatctccttgggcgcatttctctaacagacaacagtgtggaaatctgatccagctaacaacagaaacacgaagaaccaactgcataccactccatcaagagccaaccctggtttaaagtaaagcttcctgtggtgtttcagtcttattatccctccagggatccagaagtcatcatgaagatatttcgctaaaactgcactcgtacgtttaaacactgataatggaaaaatgtattttgccaaaaacagtaagaactgcaacttctattgaaacatactgagaaatagtgttatagtgaaagtcaaagatctgatgttgaatcaggttgggagggcaagaaatgattttcatgaagaaggaagaaaatgaatattttcaaaagctcacctgcctggaagtcacaatgaagcattaaggaacatctgacataaaaggagggagtgtaattcatcaagaggatgcccatggggacttgattgctggactttatttctaagtcaggggaggcatgatcctaagcattctgaagagatggaagggacatcggggctgccactgggcccctccctcacacctcatgctccaccaggagagctcagccttgccacgcggctctgtggcctgggacctcagggtcggggtgagccgtggtcctgctcaggggatagcaccctctgctctgctgtgcacggtagccccacttttcattctgcacacttcttctaagctgcaggagctcctggctctttttcatgtcaccaaagagccttaaatacagaaatcttcatgttttctttcttttttttctctttaggagtctctagactcctcttggcccaaaggttaacatggtaggtggcatttgcattaagtaggtaccaataggggtgtgtgtgtgtgtgtgtgtgtgttgacctttgctttgatcagcttttattacaaaatttgaccatgactacgtttgtgtgcaagagatgccgctggaagtatagtcccaggctgggaagctgctacctagcagcaaagttacactagggaagaggaggtgcacagctgtggctgacagcagcggcctttgccacaatcagtactgggcttcagtggtctttctccctctattatatcacatttattataacagctttatgtgcatgtgtctctaggtcaccagctccttatgagaagtacccgagctgtttatctttctttctccaggccccagcctcattctttctttttgtcctgattttactttttttattatactttaagttctgggatacatgttgcagaatgtgcagtttgttatgtaggtatacatgtgccatggtggtttgcttcacccatcaacccgtcatctacattaggtatttctcctaatgctatccctccccttgtcccccacccccgacagaccccagtgtgtgatgttcccctcactgtgcccatttgttctcattgttcaactcccacctatgagtgagaacacatggtgtttggttttctgttcctgtttgtttgctgagaatgatggtttccagcttcatccatgtccctgaaaaggacacgaactcattctttttatggctgcatagtattccatggtgtatatgtgccacattttctttatccagtctgtcattgatgggcatttgggttggttccaagtctttgctattgtgaatagtgccacaataaatatacgtgtgcatgtgtctttataatggaatgatttataatcctttgggtatatacccagtaatgggattgctgggtcaagtgatatttctagttctagatccttaaggaaccaccacactgtcttccacaatggttgaactaatttatactcccaccaacagtgtaaaagcgttcttatttccccacatcctctccagcatctgttgtttcctgactttttaatgatcgccattttaactggtgtgagatggtatctcattgtggttttgatttgtatttctctaatgaccagtgatggtgagatttttttcatatgtttgttggctgcataaatgtcttcgtttgaaaagtgtctgttcatatcctttgcccactttttgatggggttgtttttttcttgtaaatttgtttaggttccttgtagattctggatattagccctttgtcagatggatagattgcaaaaattttctccctgttcactctgatggtagttgttttttgttttgctttgttttgtttttgctgtgcagaagctctttaattagatcccatttgtcaattttggcttttgttgcaattgcttttggcgttttagtcaggaagactttgcccatgactatgtcatgaatggtattgcctaggttttcttctagggtttttatggttttaggtcttacatttaaatctttatcttaagttaatttttgtataaagtgtaaggaaaacgtccagtttcagttttctgcatatggctagacagttttcccaacaccatttattaaataggtaatcgtttccccattgcttgtttttgttaggtttgtcaaagatcagatggttgtagttgtgcagtgttacttctgaggcctctgttctgcttcattggttgatatatctgttttggtaacagtaccgtgctgttttggttactgtagccttatagtttgaagtcaggtaccatgatgcctccagctttattctttttgcttaggattgtcttggctatatgggctcttttttcggttccatatgaaatttaaagtagttttttctaattctgtgaagaaagtcagtggtagcttgatggggatggcattgaatctataaattactttgggcagtatggccattttcacaatattgattcttcttatccatgactatggaatgtttttccatttgtttgtgtcctctcttatttccttgagaagtggtttgtagttctccttgaagaggtccttcacaccccttgtcagttggattcctaggtattttattctctttgaagcaattgtgaatgggagttcactcatgatttggctctctgtttgtctattattggtgtataggaatgcttgtgcatttttgcacattgatttttgtatcctgagactttgctgaagttgcttatcagcttaaggagtttttgggctgaggcaatgggattttctaaatatacagtcatgtcatctgcaaacagataatttgacttcctctcttcctaattgaatatgctttatttctttctcttgcctgattgccctggcaagaactcccaatactatgttgaataggagtggtgagagagggcatccttgtcttgtgccagttttcaaagggaatgtttccagcttttgcccattcagtgtgatattggctgtgggtttgtcataaatagctcttattattttgagatacgtcccatcaatacctagtttattgagtgtttttagcatgagggggtgttgaattttatcaaaggccttttctgcatctattgagataatcatgtggtttttgtcactgattctgtttatgtgatgtattatgtttattgatttgcatgtgttgaaccacccttacatcccagagttgaagccgagttgatcatggtggataagctttttgatctgctgctgtattcagtttgccagtattttattgaggatttttgcatcaatgttcatcagggatattggcctgaaattttcttttttagttgtgtctctgctaggttttggtatcaggatgatgctggcctcaaaaatgagttagggaggattccctctttttctattgtttggaatagttttagaaggaatggtaccagctcctctttgtacctctggtagaatttggctgtgaatccgtctggtcctgggcttttttttggttggtaggctattaattactgtatcaatttccgaacttgttattagtctattcagggatttgacttcttcgtggtttagtcttgggagggtgtatgtgtccaggaatttatccatttcttccagattttctagtttatttgcatagaggtgtttataatattctctgatggtagtgtgtattttgtgtgggatcagtgttgatatcccctttatcattttctattgtgtctatttgattcttttttcttttcttctttattagtctggttagtggtctatctattttgttaatcttttaaaaaaaaccagctcctggattcattgatttttgaagggttttttgtgtgtctatctccttcagttctgctctgatcttaattatttactgtcttctgctagcttttgaatgtatttgctcttgcttttctagttcttttgattgtgaagttagggtgtcaaccttagacctttcttgctttctcatgtgggtgtttagtgccataaatgtccgtctaaatactgctttagctttgtcccagggattctggtacattgtgcctttgttctcattggtttcaaagaacttacttatttctgccttaatttcattatttacccagtagtcattcaggagcaggttgttcagtttccatgtagttgtgcagttttgagtgagtgtcttaatcctgagttctaatttgattgtgccgtggtctgagagactgttcgctttaatttccgttcttttgcatttgctgaggagcgttttactccaattatgtggtcaattttagaataagtgctatgtagtgctgagaagaatgtatattctgttgatttggggtggagagttctgtagatgcctattaagtccacttggtccagagctgagttcaagtcctgaatatccttgttaattttatgtctccttcatctgtctaatattgacagtgagatgttgaagtatcccactattattgtgtgggagtctaagtctctttgtagttctctaagaacttgctttatgaatctgggtgctcctgtattgggtgcatacatatttaggatagttagctcttcttgttgcattgatccctttaccattatgtaatgcccttccttgtcttttttgacttttattggtttaaagtctgttttatcagagactactgcaagccctgctttttttactttctatttacttggttaattttcctccatccctttattttaagcctatgtgtgtctctgcatgtgaagtgggtctcctgaatacagcataccagtgggtcttgactctttatccaatttgccagtttgtatcttttaattggggcatttagtgcatttacatttaaggttaatactgttatgtgtgaatttgatcctgttgttatgatggtagctggttactttgctcattagttgatgcagtttcttcatagtgtcgatggtctttacattttggtatgtttttgcagtggctgttactagttttccctttccatatttagtgcttccttgaggagctcttttagggaaggcctggtggtgacaaaatctctcagcatttgcttgtctgtaaaggattttatttctcctttgcttacaaagcttagtttggcaggatatgaaattctgggttgaatttttttttttttaagaatgttgactattggcccccactctcttctggcttgtagggtttctgcagagagatccgctgttagtctgatgggctttcctttgtaggtaacctgacctttctctctggctgcccttaacattttttccttcatttcaaccttggtgaatctgacgattatgtatcttggggttgcccttcttgaggagtatctttgtggtgttctctgtatttcctgaatttgaatgttggcctgccttgctaggttggggaagttcttctggataatatcctgaagtgtgttttccaacttggttccattcttcctgtcactttcaggtacaccaatcaaacgtatgtttggtctttccacatagtcccatatttcttggaggttttgttcgtttcttttcattcttttttctctaatcttgtcttcattctttatttcattaagttgatcttcaatctctgataccccttcttctgcttgattgcttcagctattgatacttgtatatgcttcacaaagttcttgtgctgtgtttttcagctccatcaggtcatttatgttcttctctaaactggttattctagttagcagttcctataactttttatcaaagttcttagcttccttgcattgggttagaacatgctcctttagctcagaggattttgttattatccaccttctgaagcctactgtcaatttgtcaaactcattctccatccagttttgttcccttgctggtgaggagttgtgatcctttggaggagaagaggaattccggtttttggaattttcagccttttcgcgctggtttttcctcctcttcatggatttctctacctttggtatttgatgttggtgaccttcagttggggtttttgcgttgtcgtcctttttgtttatgtcgatgctattcctttctgtttgttagtttttcttctaacagtcagtcacctcttctgcaggtctgctggagtttgctggaggtccactccagaccctgtttgcctgggtatcaccagtgaaggctgcagaacagcaaagattgctgcctgcttcttcttctggaagcttggtcccagaggggcacccaccagatgccagtcagagctctcctgtatgaggtgtctatcgacctctgctgggaggtgtctccccgtcaggaggtacgggggtgagggacccacttgatgaggcagtctgtcccttagcagagcttgagcgctgtgctgggagatccactgctgtcttcagagccagcaggcaggaacgtttaattctgctgaagctgcgcccacagccgccccttcccaaaggtgctgtgtctcagggagatgggagttttatctatatgcccctgactggggctgctgcctttctttcagagatgccctgcccagagagaaggaatctagagaggcagtctggctgcagtggcttggccgtgctgccatgggctccgcccagtctgagcttccctgtggctttgtttacactgtgaggggaaaaccacgtactcaagcctcagtaatggcgatcacccctcccctgaccaagcttgagcatcccaggtcaacttcagacggctgtgctggcagccagaactttaagccagtagatcttagcttattgggctccatggagatgggctccgctgagcaagaccacttggctccctggcctcagcctcctttccaggtgagtgaacagttctgtctcactggtgttccaggaagcactggggtatgataaaaaactcctccagctagcttggtgtctgcccaaatggccacccagttttgtgcttgaaagccagggacctggtgatataggcacccaagggaatctcctggtctgtgggttgtgaagaccgtgggaaaagcctagtattgggctggatagcattgtccctcacggcacagtccctcatggcttcccttggccaggggagggagttccgtgaccccttgtgcttcctgagtgaggtgatgccccaccctgcttctgctcaccctccatgggctgcacccactgtctaaccagtcccagtgagacggactgtgtacctcagttggaaatgcagaaatcacccaccttctgcattggtctcgctgggagctgcagatcggagctgttcctatttggccattttggccaggaatcctccttacagatgctgtttattctaacaaccattctgtccataacacacacacacacacacacacacacacacacacacacacacacacacacgtgtcacaagtgaaattttgggcaagtcattagatgtctttgaatatcactcacacagcaaatttgtgggtatcccaggattagaaacaatttatctcaattgttaggtcagagctatttctccttatgtctgtgatttctatctaatgtgtatattaatataagaatttcagaaattatgcagtaatttaaaagttcaagaaacctttattgcaaacacctccttctgcatttcacaggagggcctaaagaaaaactttttcatagaaacatgtacacaagacaatattaccagaaatcaacccccaaaatgaaggcatcagggggcacgaagaagagacttaacaaactttttttcttcccttgcaaattctggtatcctaagaagcagtctgaatgatttgtgcatgaaactgccttggagcaggtgcaacttcagggggaattctcttatttttattgcataaaaaatgaatcctatggaaatacagactcctgttctgctgagttttgcattcgcatagctgaattaggagagggagatccagacagtacagtgtactgataccatttgaaatatccccacttgttcttcatgaattcccccatgaggttgtcatcatttaattcaatttaatctttaaaattcaaactcttttgaaactttttatatgtggagtgctctgatctcatttttggcttctatgacacttttcccttaaaagcaaagctgtgatctgtggcgaggaagtttgagtggtgcatcttccagtctcatctctgccatttgttccagtgtctaggaggaaagaatctttgcactatgcatattcagtgcactagggataaagtggccaatgtgtcttcattccccaagctagaatggtccttcatttatcggccagcctttgctgaacacacaggtcctgccattcactgtacaagggaaagatagagattaagatccaggcaggtccctgctcgcagtgctgactgagtactgtacctatttgcccatgtgatgtgtctttctattttccaatgagagtggaggtccatgttttaagactactttgcctcccattgactgaggattgggattagatctttgattgggctagagggagaggtgagacactttgaaggggtacagaaataatctgtggagggagaggaatcaagagggactggacaaagttgtgtctttatcttctggtccccagattcaccactcccctaagagcaacagcactagctcacagctttagcatgacatcctctgtagctttactcacagtgggaccagttctgtcacagtaggaagaaattctgtcaaggactaatgtcattgctccccgggtggcccaaggcatccccagctgatcatgtgaccagccagcctcccattcttccaggtcagagagaaatgatctacttttttatcttggtgtggtggatgggactaaggaaagaaagagttggggtttgtcatattatttctttactttgtactcagtagattatattgacaggcattgagtaaatccagtggaaacatgaactctccatactgtagtagacattgaataatttgagcagaataacagagagaaaaggaaaatgactaaataacattttaggaaataagctacatttcctagacgtgggatttggcaatttgggatggatggagaaatgaactttgtgtatctctctgaaacaggtgaaattgacattctggaacaaaaatctaactatgaaaaagaaaactctttatttcaaatctatacttgggcaacagtttggggccaggaggaataaaagaccttaacaggtcctctgtagccctctctgacttctaggcgtctgagtaatcacagacacccacacattgttttaaaaccctccagagagagaaagggagaaaaaatgtctttgataagatcaggtgcgttcagggtcgtatggctgtagacagaaaaatgtttttgtttccactggttacacattctgatgtccgacctacatcccttctgatgaaattcaaaccaaacccttttctttcccagtccccattggaaacagaaaatagatatgcatttttcacactttaaagaactcatcatgtaaaaaaattgctttttaacacatttcatgccatcatgtcttccttggaaattttcagtgcctttttttctatttgtctaagtagagaagctatctttctattttttttatggcttcttctgaactcctaccgagacctgttcatctcacatcttcaggccccaaattggatacacaatttttaattaagatgtgatccagcgaagtatttgcttagatcttacagatctggaaaaaaatgcccttaagaaaagactaggcaaatagaaataatataatctccttgcctcagtccaaacttgaaggactcattagaggatgcatgcaagtagggaccagaggaccatgaaaatcctgctgggattgagcgtgatttctgctgagatcactgagatgccacaacattgaatgctgaaagttttagcaggaatcgttggtgaacttttcctttggaattccgcaagtgcttcttgttacaggcatagacaaatgtatactaaaaattacatgtataatttaaatttcagcaagaaatactgttgacttcttatgaggaaaaccaggcaagtgatttgtaaactcttgaagcaagaaatgttgatgtcttctccatctctttatcctgtagagcacgttgcactgagatggccccagaagtagatactgagaaagttctagttgaatcatttaatttgaatgaagctgtgagataaaaggaaaaaaaagaggctacttataaaataaatttatagtatggtcacattatccagagtaaggttagttcggtttggtttgaattgtttcatttttagccaggcacagactgctcagaaagtaagcatttaaaaatttgtcgagatgttatttattatttggtaaaagttgcaatgcaccaagatgtaagattttacacccctgagttttatggcatcacccttgctaatttattcatgattaaaccaaagaactctcaatgaggagaagtagattgcaatataaattggtgtcattgtttgtaaatgtgctccactaagcatatatactgctccactaagacagcttctagtaccatgcctggggcttcaatgcaatttgcttacgttgaatcactggctcccagactccccttgtgaactgaacaggcttagaaaatcattctaaagaatgcatggtttgtgtagttgtagaacgaaacttctcttggaagcttattccccctcaccagggaaggagttagtgggagattctcaatctggtctgcagatgagtgccttctaggtaattcacacatataatttacagaagtgggaagaaatgaattcaaaccatttttttttttccctcagaaaactaaatgtcaatctcattccatttccgttggacggggaaattgacgtaggagcagcgtgaggtagagtggcatgctgaccataactagggtcagtcaccatcggaggacccagcagagagctgtggggtgctgcagctggggaggactttctccatctgtttccccttggtaccattgatttgttgtctgatttaaatatagagttcagtatgcaggtgtgtaagtgcagcataaataaaatggcatcctccttcacagccaaggggccttcgtctgggaaactgatataatttatgagagcgaggcagcagcataaatacgtggggtgctttgtcaccggccagtatggaattggtcagcttggaggaggggaaacagagtcagggggaagacagcatgccaggaggagctaaattggggcaccaggacctgaaccctggaagccagtccctaaacaaccagagctgctcagcaactgctctctaattaccctttgtccctggagaattccagaggggatgggattgcctcagtgaacttaatcttagatgggtggctgtcctccttctttttttcccttgacggaggagggagggagggcgtcgagggtgatgcatcaaactgagggtgacaagaagctggcgccttttgctccacttcccagccaggagggctgacagtgctggagtggaccagtccgcggagctccgggggtctgaatgctccaggggtgtgtggatggcaatggccaggatggccctcctggttgcgacccatcagaaagtggataccactgtcctctggtttgcctgctgtgctggtaaggtgtggtgacgtgtgtgtgcctgtgtgtgtgcaaagggcaaagagatggacagtgttaccattattcatttggaattagaattgtggaggcttgcacatttgtttgtcttccaagttctggcctcacccacccttttttgagggagagaggggccaggaaggaggccgttcccagccccatgagtcaaggagggcatcgggggatgctcccactgaggaagctcagagcggggcccggagaaaggggtgctccaagcggtgcttcctggtcgatggcacgtcggggtgggcaggctggagttgaagagcttctcagcgtggataggaaatcatggaaatgaggaatgatctagcctccagcagtgagtcggaggaataaatgaatcccggaaatgcagtttctgtgaactccagattgctatggagattgcattgctttcccaagacttaaaaaacgaagagtcagcgaaagctgggagagcggtgatgtatggaagtcaggcgggccagcgcgccgggagtggtgggaagggggcttcgcaggtcattacacggggatttctccgcgcagaaaaagggattagcgttttcacctggtggggatttcatgagcttttccctggcctgctcttcccctgccctttcccagagagcccagcttcagggacagcgcccgcgaggtgctgctggggtggcggggcttgtgggcggaggagggcggctctctggtgtgcagcaccgggtgtgagtgtgggtgagcgtgtgcgggagagggtgtgagtgtgagtgggtgggtgggtgtgaaaatgggagaaagtgtgagcgtgtcacagtgtgtgtcactgagtgggcgagtgagaaagtgggtgaatgtgtgcgtgactgtgcaagtgtgtgagtgtggggagtaagatttgtgtgagtgtgagtgtgcaagtgtgtgagtgtgggggagtgagtatggggaggagtgagagttgtgtgattgtgtgtacacacacgtgtgcacacagggcgggccgcgcttggcatttgaggaggggctcggaggtcctcctgggctggccgctgtcctgggagcagggcaccagggcaccctgcgagttttcaccttgccaaggtatgccagaagccggactccagcttccttgccaacgtgtgcgggaagcaggaccccagctgcggtccagggaggaaaaggggggtgctcacagctggggcgagtccctggagcccacaggcagtgacttgccccagaatgagcttgagagagtctggggatggagaacactggggatgcttggtgtggtgcagaggtaggaggatgtggatgcctgtgaggtactggtgcgaggtttgccacgtgttatccctgcatgagagagcgtggaccactgttttaggccaggatagggacagcatgtccaattacacagggctctgcccacctgcaagatgcaaggaggccctgtctccaatgtcccctgacctgacagtcctgccacctgccagcctcgcagtggccagccccgcccccagcaagccccacccctaagagccacacccccaacagctcacccccctgccagccttgccctcagtcctgccccctgccggccttgcctctgccagccagagccagtcccccagcaagccccgccccctgctggctctggcccttctaagccccaccctcaggcagtcccgccccctgccagccccaccactgatcatccccgccctcagacagttttgccccttgccagctggaggtgggcctcctccagccagagtgaatctcttagtaagccccaccctcttccagccccaccctcaggcagccccacctgcttccagccttgctgaacagtcccgcccctgccacccacatgggttcctgggtcttgcccctgactaccagggtgaccccaatgcctccgagacatccttctgccctagaacagccaggagagcagagagaacaatttaaatgctcagaaagacaactctttcttactgtttttgctttgcccagggaattgcaatcagtttcaatacacagttaataaaatgagaggcattcagcgtggatgtgggtgtcaagggagagggctcaggcttgcttttgccttttagtaccagttcctattgtttggaaaacacgaggtggcttccgagaacaggtcttggccctcgcctgccctggagccccctgtccaagggccgccgtgcctcacaggcaggtgcattgctcttgttttaatggtggccttcatggcagtgggacccctccctccatgactgtccccaggtattgcctatggtgttatagtgtgggggcctcagggaagggtaggtgacctgtccacatttaacataattgtaaagctcattgaagaaaagaggacgaaggagtgacgtccaagtttattgagctttaggaagagaacggccagatttcgttttgagattttctcttatttgctggaagtctgttcaaatcatatgtctcttctgggttattaaacggtcaaggttgtttctggatccccacaaaaatgtgaggatacaaagtccccttgggatgtgcagtggtacccatagtcctcgtggttagaggataaaggggtccctagaatgatggagtaataagggcaaggtgtttggaagcaaatgccgagaagaaatgctcccttatgccgtaaaggccaggagactgtggtcgtcaggctgagtggatggatgggaaaggaggaagtaaagagcacacaccggcttttggaagcagatagctcatagcatttgaagagggcattgccatgactctggcctgcctctctcattggggaatcaaatattaaaaaaaaaatacttatatatcttttagagtgatcttctttggtaatttttagtatataaaaaagaaaaatagggaagaaaccttcaagtttctacttacatttcctgaattaaatagtttacatccatagaagaaaataaatattcatgcaaagctatacaaattcctttgtaggtttttagtaactattctaacagaaatgtatttgtagctaaaaaatgaagtgttaagcatgttttaaaaacggagcattgattttctacagcagggatatttagagtcttctttcccctggttacactcatgtgcatttgcttaaatccagtggcctctggctgcacctgcctttgcatcatgactttgtccaatcctgcatgtgttaatttagggcccaagggaccagtctggagcacgcagccatcctgagtaattcacagtccattagacagcggtctgtggggtatgtgctgagtccacacactgatgttccaggaggttcttgcaacttccccaccttgcagctgcctctccagcaccttactctcagtccttccccacaactactctccatctttaacttattacactccctgtcttagtccctttgtgttgctataataaaatacctgagtctggataatttataaagcacagaaatttgttttctctcagtcctggggtctggaaagtctgaggtcgaagtgctggcatctggcaagggccatcttgctgtgtcctccatggcagaaggtggaagagaacgaaccttctcctgcaaccccatttttttaatacattaaatgcatttataagggtggagcctcatgatttgaacacctcccaaaaggccccaccccccaaacactgttgcattggggattaagtttccagcacataaattttggggggcacattcagaccatagtacctcccaaatctataaggccacctctactttgctctcagctctatctgttcatttgcaattgtcttttaaaccccacttaaatgtcctatcacattttatcaacaataacttacttcactgggcttccttacacacactagttcctattcctgacttctgatttttattaatatccctgttcttctagttatccatctttgacacttataatatctctttcatttactacatatagtaaagtgaccacattttgacaattctttctccagtgtaagtgtggtgtcctataactaatgcccttttcttcctatagccatcacttgcatcctccatgattggaacagtcccctggtgtgccccacacctgctgttctcctctccagcatctaatccgtcctacccactgccatcagatcactatggagagcccaggcctaatcatgtcaattccaggctatcagatgttcattgtcagtttaatcacagaattggctgaagtcctttatgctctaattattccatcatcctcaccctcttctcctacatgcaattgacactatgactaaatggggtacttgctcttcctccaaaaaagctctaaacgtttttgtttccttgcttctgtaaggcagttcctcaccctataaggggcccattctgtccctgaaattctcatccctcatatttatctcttgaaatactgtccattatttaaaatacaggtcccataccttctttttcacaagattttccaattttcttaacttgaagtcatagctctctccccctacctcctccttccccggtatacttggtaattctatattcacattattcacacacatgcatccaaacatttttcttatccttctactaaatatgaaatatcataagtagaagccactcctgcttcacggcagcagtctcctacataaccacagagtttagacttcactaaaatgtaagctttgtttttgtcaaggttgtatctgaatcagtgtctatatcagggcctgtaacctagcaggggtttcaagagtgctgatgcaatgaacagatgaatgaactcttgtgaagcaatagatctagcacccagattgatcccgtcttcttacaaacacatctttaggctgtccccctgtgtcttcttcaaagttgacactgatattcgtttaaattttatttcacctgaataaaaaaatatagtgtgagaatgatctgctgagagcccagctctccttaaaaaactctgcctcaaagatactttaaattatattcttgatgaaatttgtattcttcgtgatgtatcaacctcggcagcaaatgacaacaaaccacagctggttactgtttgaacccaaggttgtaaaccaaagagtgtgtgtgcatttctccccaccctaccccatacaacctacttcatcctcatgcatgtgtagataacaggtcaaccaaggctagaaatcataatgggtgtgagttctggttccagagttatatcacctcaatgatcttattcatttcattcctctacccttgcttgagtaaagctaatcattttctcatcttccccagatctctttggggttctaaaccaagctgaaaagtagaccacagttaatacgccctctttcccagccacccagtacatctcctgtctttagccagggaagcacctgtatgccccaattctggccaatcttggctaaggtgccaactctaacgattctagaagctgttggttaagtgtgttgcctgatcagggatacttccttacaatgagggagttatgaagaagctattggatcaataagctaatattatagaattacactatccagtactagatctggaagcaaccttataggtacatattctaactccttttataagtgaattaagtgacctctctggttgagtgatataagatctagtccaggctgtgccactaactcccaattcatgtgtatttcaccataccatctgcctttcctctagagtctccaaagaacaaagctacaatgagggaataaaaaagtagaattcacaatgttaagaaggcagttctctcaaaccataccacgtaacagcaactcctctgcctagccatggtgccaaccccatcaattttcaataaaacttcacctgtaatattcaaggagtagtggagtacgtgataatgcactagatttaaagttacccaagggctaatttttaaaaaatcatttttcatatccaatattaaattggttgttagttcttttctatatgtctgtgataacctttgtgccctggttagcagggtctagaaagagccatccatctcaacaacagtggatttagacttgcaggaaacatacagcttgagtgatttggctgtatctttaatgattcctgaacatctgccagaaagaagttgctcatttcaagtaagtcagtgatttaaacttatttttctgttttgtttctttctattaaaagtttctcctaaaattttaatttcatgagaaattctgattagttgggaagtaattttttttagttataatacaagtcaaaattaatattgacttaaggtataaattaagtttactcttgtagtgcctatgaaagactaaaattatgctgttcataaaatgtccctacagataagtttcacttaactggttttagaagatgcttttgggcctttttatttgccctaagcagacatttggactcccttaggtgaaatatgctccagcattagactgctttatttactttgagtttgtcttctcaatatgtgatttttagaaacttcaaaagtacaatgtcttttacatttataagtaaataattgagggaccagcctgcctggagcaaaggaatcagaaaacaagaaatctcagaatgactggtgacatggagtctgtgcttcactgcagttgctagaagtaaaccacagattgagctctgagcttcctaatagccatggcaaggagggaaagccattgaggtgctattcacagtagccactgataaaaacaaagcagccattcactagccatttcctgctagtgaaacataaggacagtttatcccatgagttcttttaagaaggaatgaagggctgggcgcggtggcttatgcctgtaatcccagcactttgggaggccgaggcgggtggatcacaaggtcaggaggtcgagaccatcctggctaacacggtgaaaccccgtctctactaaaaatacaaaaaattagccaggggtggtggcggatgcctgtagtctcagctacttggagagaggctgaggcaggagaatggcgtgaacccaggaggcagagcttgcagtaagcggagatagcaccactgcagtatggcccaggtgaaagagtgagactccgtctcaaaaaaaaaaaaaaaaaaaagaatgaagaaggcagatgcaatgtgacagagatttactagatgatgtgctcgataacacccttcaactagaaaaaaaaattagcttctcttagaatgtgctatcggcatatattggcatacagtaattaagtgtaattgagaaaaggtaattctgagagggaataaaagcaccagatgggagatacggcattcactcttacctaagtcctacctaccttcaagacctggatgaaacatcacttcctccaaggagtcgttgacagacttaggccacagtgatcattgctgcttccaaacatctatggcatttgttgaccaagctatttatgttatactataaggaagcgttgacaaaaacgtggcagttttggtatctgggcaacattccgcaggggctaggattgtgtcatttattgtagtaaatccaatgtctcattcatttcctgtcacccagtaggccctcaggtttgttgccatggatgagttaacagatggcactgactcttggtggcactggagactgcagccatcagatgatgtttcaagagacactccactgtgatgacacatcctgaagacagggaaactaatgtcctttgagaagtacaaatgtctatttttatttcacgtagtattggcttgaaaagatacaaattcacttaggatgaaataaaagtgttctgtatttgaactttatttcaaattattatttcttggaggtttttattaggcaaccagttcctcctgtcttagaaagatgtagggacggagaagttctaaaaattctgggcctatccttcaaggttcaatctcatagtttcttcctcaggaaaacctcctctggccatcctagcagatagacatggcacttccatgtctgtccaattcccccaaaacatgacctaaggctcatctggaataagcaatcttcttctgtgtaaatattttataactatagcctattataaactatttgtttagaaaaaagactggaaaagtacacaccagaatgtagggtgtgtattttcccttcaaactcatttacctttgcagccctcttgaataatgtccttccaagccttttgaataacttttatgttgttgaatatttaaatcgtctccaatagtggtaatttttacagtctacaaacaacaaaaggtaattcaatgtcaagaacaattaataagatagatattcagagtggttgatatggtgagatgaggtttggtttccaaaaaatggttgttctaaaaggaaaccaatcatgtctatgtatgttatatgaatgttgagctctgtttggagttacccccatcatgaaggtgccctcaaccatagcagtgtcactaaaataaatgacaaggcaattttttggaaggtaatattgtctctgaattaaaaaaatggaaaatctttatgcctctctctctctctctctctccatccaatgacactaatgactacttcaggatgtctgaatattgtacttgcttatatatgttcactgcaaccaccatggcaatgaaacatgacaggtcctatagtggaaatcatggcgtggtcctccaaggttaaattggagggaaaccccaccatgaaatgcagtggctagatgctagatcttcactccactccccactcaccagcactgcttctggctttgggattgagcttccttctgggtgaagctcagaagagctcaaacttttctgagccaaggtcaagctgggaaccttgttacgctattttatttttaaatattcacttcccattatgtctgagtcttcagccacatcttgtttatctggtgaacgagtaaataacacacagtttctatgtcagtttcattcatcccatgttttattgagcacctgctgtaagccaggcattcacctggtgatcacttaaggcccatctccttgcttccagcttgcttccctataatagaggatttttttattctctttgagtatgagtgcacagcacacacacacacacacacacacctgttttgtattcaaactgagaatgctcatttatacacagctctcctcttaagcacacaaaaattaaggcatccaacaatcagataaggcaaatgcatttatcaagcatccagcgacaaaaagctcctagacgtctactacatgcagcactgctgttcgggtgctggggttatagcaggctacaagggaggcaggtctgcgttcatgccacctacattttaataagaggagaaaagaatagagaagcactgggcagctgctgaggagtgctaaggagaaaaatcaagggaggaacaaagagtgatgaggagtgttgatttcagaagtgagatcatggaaggtcgccctgttgaagggacatgtgaaagagaacctgaagaaaggtccagcaccatcaggatgtctccacgaaggtgacagtgtcttgtctaggtctgccttgccaccgagtcaccgactgtgagaattggaaggaatatcagcatccttcatttaacagttaggaaaataagaccaaaaagaggttacagtccaagttcagcttcacaaagacgtatctctagatagaagggaaaaaaaggagagcaagaaaatgttaaaagttgactatgcttagaaactgccaaaaatatttaacaaaatgtgccagaactagctgaaaaataagttcctgaatattcaatcaaatattctatatttaatttcatggtataagaatgcagtaatcgaataaatccttgctcttctcagcaaccacttacattgttttataaagttgatccacatcctatctttaggttgtagaaaaggatgctgggggagctgtcatcccagacccttaaatgtagttaatcccctggtaccaagcaaagctcagaatcttcaggacatctgcctctactaccttatgctagaccttagtatctagggagaatgacagcaacatcgtggtcatggttctgaggaaagcagtggaatgcacatcagaggaaaccaactaaacactcacctgtaatgagatgggaagtgattacactatttttcttcatggtatttatagttttaaggaacagctccctgtaagtgacatctacccactgccctttatcctcctattaaagcttttgtaacagatggtgtttatagaattggctactctgactgttagcactgtgaagacatgagtctatgaagaatgtaccccaattttcattacaccccagactaaagtgctaagtagtgatcttttgaatgaatggaatcccattgatagagagtcaattatgcctttgcattaacacacatcatcttttgttcattaactcagaaactagagtgagctggcagcctgagagccaaagagcttctgtgagactctcaagtgacttaacgtggctggccgatgactgattccttccaggtgaagcgctaagccccatcatgcccctgttcagctatggcagggttccaagtgggcagcccagctctcctctgggaggagcattgggcaccacttgagttgagtttgtccaggacctgagctgtattgttctgtgatgtgggacaatcttctcgagcagtatcaatgcttctgagtcacaagggtcaaaagagagttatttccctggggctacaactttctgagtttgcacaacttccagatgcagaattaatttcctgaggtcatctgcagcatggtgcagataggtcacttaccctgcaagcagtatggaaacctgatatctagaattgttgactattctgtgaaacttgtttctcatatcttatttcttcataatatcttgccccatcacatcttcaaggctttgtttgaccttatgggcactgagtaactttttccttttctgaatgcatttggcgtttactgttgaaatctatggcttctttagtgagtacttgccgagtgctcactgtgttcctttgaatggaggtagagtcctatgaaggataagtccttaaggcaggggctatttttatagtttagtatctatctttaacttcagtttggctggagaactaagatacattaaaagaaacttggcagtggggggtggctcacgcctataatcccagcattttgggagaccaaggcaagtggatcgcctgagctcaagagtttgagactagcctgggcaacatggtgagatgctgtctctattaaaaatataaaaattagctgggcatggtggtatgtgcctgttgtcccagctaatttggagggtgaggtggtaggattgcttgagcccggggagggggaggttacagtgagccaagatcgcaccactgcactccagcctgggtgacaaagtgagacccccatctcaaagaaagaaagaaagaaagaaaaaaaaaactcaagctcctcaaaggtggaaaatttatatataagatagctggaaaaataagactaagtaaatttgctttgtaatgtttacaataccgtatgtgtttagtgtctggatgaagaatgaataggttccgggcatgataatattttctttgagcacaaatatgttttatgattgtcagaaccagtgtggaaaattactaaagaaactaaatattcttttgcaaatgcacagtattttgacattttcatttcaaatcaagatgctggaataaggattcccccaaaacctgtaaaactcagcgcagatcccagcaatagatggggttgtgtgtccttgctagctcattgcggattgggggccagctgcactgaggatggccttagctccctgtctgctgagagcaggatgaaatcaatgactgactgatgtctcctaagtgcctgatatatggttgctgatgcagagaggttctggtgacagcccacactgagggatgcttatggagggcccaagtaggcgagagaatgcaccctgcgtatgtatgtggaagccaaggatccagctggcaagttggcaccagccaggctgagtacagaggttccagtctctacatcagaagagccgagtttcctgacctagagaagttattttggctttcaagttttcatctttaataagaagggtttggaataaaagaaggaatactgacaatagctgacgtttcctggatacttatgggtgccagctgctcttcttcgcgtattcatctgtgcaatccaaacagcactctatggctagaggccactgcgacctctcttttctaggcataaacctgagtccctggcccagggtcacagctggcaggctgggcactgacggactccaggctttaagtcacattgctacactgtactcagggtatctgccgcccgggcccagacccagagatccaccctaagggcgaggataaggagacagaggacaggcagatgacaaggtgggggcagttctcatgaagggtttccttcttggacactgatttcttcccaggatgcctgaggatgctgaccagctccttccatccctgtcctcctcacctctttccacatcccctgcagatcagcccagcagtgaggcacagcctagggtcggatgtcccatagatcatcatggaagctcagaagcaatccgttcttcattttagaggctcctctccgtcaagattctggaaacacaggagaacactgtgacctttctcagaggatgttttcctaacatgcctgggaggaagacttgaatggtggtgtgaaaatgtcttttcatgccctaatcaatagcccatcaattatgtatgtacttatgtatgtaaaccctgttaccatcctgtggagaggataggacttggtgatgtccaactattgagctctttcttcaaagtcttaaaggaagttcagtacataaaaccatggcagcgggttggctctggcagagtggagtcagtcagacatctggagcgctgtcctcactctgcctccccaccctcgggcatgcttgttggaactgacagctccactgctggcagtttataaatctttccagtgttttcattgagggttgtcaaaatgttaaggcatattaggccatcatggagcaaggtaacctccaaggcctttacctcttctaaataatgctttattctcttttcttctggtcatgaagatacagttggaaattcctacagattggctttgcttgaaaggctattgtagaccattaatgggcgaaatccctgtatttgaaattgtaagatgcaatgagggaaggcaatccacgtgatttccttgtgttcccctagtggagtgaaaacagatactgacgattgtttcctcattcctggtggcatcttgagatggtttggtaacatccaagctgtgcagatgttaccacggagcatggaggcttttctgaactcctacaggtttcattgtctgtgccactttttggtacttaccatttacgtatttgaactgtgtattgtttcacaggtgtgtgttttccaagttgccactctaccaaccctttttgtatattcctgagttcaaaaagcactttaaggaaacaaactgacaaaaacatgcagtttaagaggaggaaacaggaagatggctcacatgtagcttgagtgaacaatcacatttagcacagtgcaggctttcagtcttttcatgtcatgcgtatttttgtatcctacggacaatgagccttgactgcttttttaggcctcttaccagcttcctcctctgaagtgtagtaagtagcttcctatataatataatttgtagatgactaaaagcaaggcctgatcccacatatctcttttatagacctgctacattgccagaaaggtcttcattgctcaaccttacacccctcaaggataaaagctttctcaaccacaagaattcctgcagaatttggctatgtctcattcattattgtacggggtcagtcgctggcccaatatctaggctatagtaggtatctctaaactattgggaaacctgtagtcatttggtggcttatttttcagtgagtgcagataggagatggaatatgggtggatctagatggatagagttggatcacaaagtgaaaaccatcacttggtgggaccatgttggggaggatcctgaggatgctgaggtcagtccatgacgtctgtgacaggcacatgagggaggggccatgtcatatgtgtctcaatttgccatctctgcttagagcctgagtgactgcttgagaaggtaggcccaagcccagaggacagagcatatgagggtggatttgactgagagagttggtaacacactttctaagtgagaaatacggatgacaggaacaccctgcctctgcccgtggcccagctctgcttgagtctgtcactgtctcctttcctggaaatgtcagtgtcgcttccctcatgcgttttggagccttgagttcaggctaaaacagggccttttgaggggaggagaaaaaaggaaagagggcaaaaggatgaagtgtgatttcttaaacaggtttttaagaaaggagaaaagggccttgcttaattttgagacttccaaaaggttaggctacatgtaaagggaaaggtgaggttgatgctggttttacaagaactgctttgctcagttctacttggttcttatcaacgtcggtgacccgcagaactccttacgaagcagtctagtggctacaggatagcatccaaagtgactgcttagagtttatgaatcttcactaatgtgtgtgtcccagataacaggatggaaggaaaaaaaatgaaacctgtgtagacactgagtatgttagtttggaacagtgaggaaagctttaagagagaaatcagtattatatcagtttagccaggctcacaatcaatagtcatttgataaaagctgagcgtgtgtgacactctcctaacacagagtcctgtgattctttggggatgtctttgctggtgtatcagatagctattgctatgcaagcaccccaagacttagtgggcttaagacagcatcatgttatgaaaatcatgcattttcatctttaataagaagggtttggaataaaagaaggaatactgactattccttctgaatattggatgatctggggtgtgcctcactgtgtgtcagctcactggcttgcttgcttctgcctgggaagtggccttgccaggggcatcttttctgagcagggctgctccatgcatctctccttctctgcctcctgggactgggaggcatggtccttgcatggccatgacaagcgcatgcaagctctcctgagacttaagctcagaacaggccctggaacttccccctcatttctgtggctccaaggaagccccatggccaaagaatggggaaataggctctatcccttttgcagaagtaactgcaatgtacacagactgtaagtaaagggaaccatgaagaattgaggccgttagtgcaattaacatgcttagattactcttaagctcttattgttgctattagtgatctctctggaccctggaaatgtccagcaaggctttaggatggtagctgtagtagaagcatgagtggatagtcatgacctgcttttatcctcactgtcaatgtttttctttccatacattgttgaggttaagtttgctgaatggtaaagaagtataatttttgaaattgttttctgtcgtcagttagtaaatcaatcaacatttactgcacagctactggaggagcagcacctgctacttcctgggttcatggagccataggggtgaggagggtgacatttactgagtaatcacttcgtgtcaggaactgtgccaagaacctcgtaaactccagattaattgagatagacattttggtggggagatatctatgcattgttttattgttagatcaggcataatatatccaaagtgtaaagtctttggaaactctcgatgaaggaaagggattcagtttccaaggtgtgggctagaatgcagaaaataaaaatgtgtaagtgaaggttttctgtggctttggtaatggctgtgtttttgatatatagtaaacaatgataaatcgttgttcttttaactctgaattttttttaaaagaatgtcactgtgcacggtttgaagctgcaaagattgccttcgagagggaggagtcatttctccacgtccctataacattatgtggaatgttgtctgtcagctttggactgtagtttatatgtcagtgactgtagtttatatggagtattttgtttaacttttcatttgttcccaatgttacaattttgctttctcatagatatgcatatggaaccaatgcactaataaggttcatttctcctaatatatgctgtctgtacatttgtcgcctataatagttgttaatggttttaaagagggtcatgatagtccgttatgtcaaaagatgccattgccttctgtctttttctgtgcattcctggttttgaaaatgagggtacaatcagacctgaaaaaaaaaagcatatgactttgtttcatgacctacaaaaagtaatggtaagcaagatgcaaattcttattctccaagggtatatacactgtcaaacaattgaaagaagccaagactatctgaaaaggcctatttttcagatttcatcttggagacctttcatcatagttcctaccccaagaaaataactaatttgctctagccttatggaatagcctggaatggctgcctgggccatctgagaagttggctggtcctatccagggcttccccagttggcctggctttgctcaggggccgggggctgaactttagcaggttccactagtgctgttgggagctccacagagaaaggtcgaacgcttggtggtttgtccttgtggtcagaccccgggatttgacttttaagaatactctgaaaatgaaaatggatttcctgggaaggaagtatgtgaagtcattaacattaattaatagcttatcgaaaaattaggctttcaggctggaagaaagtaggcaggcctgaagaagggagctcaggaaggagagctggagggaccacagcagggagctggcccagaggcaggtgacgtcgcccaggaggctggacctcggggattgtggttctgtcaagaaaggatggttgctggtgggggctggggggctgtgggggctgggggtgctggagcagggaggtgtgacccaccccagggaataggaggagagaagtgggtagggttttcttggactctcacttcaccttccggttggacgagctgcaagcatgagcttctaagctttgcatcccagagtgttggcggctatggagatcctgcgggcctcactgccgccattccccatggccactcagccagcactacctaggcactgagctccgtgagggacttttttcctgctcaccttatctcaatggggtcaggcgggctgaagcttctggagtcttggtgaggctgttgctggattgaatatgagcagctgcagggctggaggaacccaaatctcagtggagcctgttcattgaagaccttactgataggttagtgccaaggggtgctgacaggtacagttatggggaactggcacatacgaggtagcagcatctgccctgaccttggccctataatcatccgtggcattgttgagaacagataaacagtaaccaacagtgggctcacatcacagatgttttcccttggtgcttggtgggccccaagatgttggggttcaaggtttttattatgtctagggagggccagaatcagtcctatctgctcgcattgagatggcctttgttcaagcaagaggtgaaattaagtgtccagaggcagaaatagatttcactctgggttctgttatccatggttctttgtagattctttctgaatgtccacaggtgtgctcaactgctaaattcagctgcctttgaaatcacaaaaagggctcaacaagtggaggtctcttccaccagcaaagcaaaggattgtgtaattcgatcactagggtaggctctgaggctgcgtggcccgagttgaaagctgagctctgcacggacagctggtgggtctctgcctaagttattttacctatctgtgctctgcttcctctcctcaccagaaaaccgaggctatggttgtatttgcatcataaggttaccaagaaaatgcaataagctaatgtacagggagcacttaaaagactatctgcacgcaggaagccctcgataactaattgtttgctgtaattattaatggtcaccccacatataggtgaggaaatcttgaattgccctggttggtgctgctgggtatttggctcaggtaagagtggtatagcagcttggctttttttagatgagaagctacctccccctgaaagggggctgagtttttgtctcctacagctgctcccctgagaagatattcagctcttcccaaactactggttgtttagaaggtggctgtgtacagagcctggtcatgctatgggtcacagagacacagggccactgcctgcacccacctggacagcacccttctgtgtgacttccatggggaggactgtgagtggtgccccagtgttgggatagggaccagatgactgcagaggaaacaccattaacatttgtctattcagcaaacactttactctcacatgaatgtcgatgtatctttgggcttcttataaaagaatcccacattcactcaacgtctgtgagtatagacattgttatttgttcctttcactttttaaagtgaattaatttgtacaatagtggttttcaaagtttgttgttcttgaaaaatcaccgatcaagcattaaaaatgcacacactggggtctcacccctgagaagctgctctgcttggtcattcaggaaaactcaggtacctacattttaaaaaaaattctcagatgagctgccaggcaaaatcacctctaattgcttctcttgttttagttctcccaacaacctgtaagagaaaattggacagatattcctgtccccattttagatgaggccgcaagtacttagagtgaaaatttgtttgaggtcacataattagttaacatattattccagataatcacagatttcttttttagacaacgctccctacatctcaatagcttaaccaaagaatgtgtcagagggccatctttttgcatctctgggttctgcagggcctgctgcaggaattggtgtccacagggggttctggagccaattctccacagatagtgaggtagttctcctgtggtcacacacctcgggatccttcacagccaggtgtgtgggcagacgagagagtgtggtcatgctacagatagcctggcattgacgttcatcactttagcccgtattccgttggcctgaactgaggcataccatgccgtgaggctcagcgagatgcaacggagtgtgggcagtgtcctcccggatgttcagaagaaaaggaccctgctgaacacatgcagtagtttccaccactattaatgaccgtaaggcaatgaatctaaatagtgaaaatctttgcatgaaacctatgcttttactgacattgtattgttgcaacaatccagggatgtagttatgtatctccctattgtttaaggatgataaaacagattcagagaatttaagtgacttgcaaaagtccacacccctgagaaacaagagagccagagaacccgtgggcagctctcagctctggcgccagggctgtgtggttgggacatacccattgaccttggaggcagaacaaagctggtatcaaaactcagatttcttgactgccatttcagtgtactttttccactacaagatatttcttactgttttgagcatgctgtattaccacagggactagcgacataggtttaagcaagtcttcagtgactgaaggagaaaaacatgtagtaaatattgcttaaatcttttctcattaccacatagaaacacatttctatgtagaagtagaagacatttctacttacctatcctgagaaccttctctctgaaaagctcacagcagagtccatctctcccgcttggcagctgcaataagtacagtaattaggaatattatttcttttctttttttttttttttttttttgagacggagtctcgctctgtcgcccaggctggagtgcagtggcgcgatctcggctcactgcaagctccgcctcccaggttcacgccattctcctgcctcagcctcccgagtagctgggactacaggcgcccgccactacgcccggctaattttttttttgtatttttagtagagacggggtttcaccgtgttagccaggatggtctcgatctcctgacctcgtgatccgcccgcctcggcctcccaaagtgctgggattacaggcgtgagccaccgcgcccggccaggaatattatttctaactcacaagagttcttctgcatgttagccaccccccagagaaaatagtctccattgttgttctctcttcagcatatcccaggtatgtttccaagcaagttttgctccactataagttgatgaggacctttttttttggaagctgatggcctggcaagagttagtcttaataggttgtgtttcttctcactttagctggctctccctaatgataatgtctgttcaagttgagcccagtttcagccagtttctctgggagtcaaaagcctgtagcacacccagagagccaccacctgtccacagcatatggtctgaaggcatctctgctgctctagcctgaccagccagcccaggatttccaactgtgagctcaccctccttgtaaggcaaacagggtttagccagcgctcaccttgacctggtgacctttgaagattgaggttgcaggagaatgcaattgagaatgcagcgggtttccagaccccatgtgagccatccctgatgcttcaccctggctccatgggaaggaacccagagccctgcctggctggtctcctgctaatgagatggaaagcaggggtcctggccacaccatgaaactcatgatgttctccactcttgtgtccctgccatggctcacattcagtaattagataccagctcattaattcctgctattctttcagaagggaaaggatggtgccctttgttctgctctgctgggccctgagccctcacagcatgaagtagctagattctgcctcactccagaggcggctgccactttctcaccccacagtcagcccctcaaccatgaaaagatgtaaggatgtagctaaattacataacccaagcatgaaagcacctgacgtgtatgaaaccatgttctcagacacttgtaggcagtgacaactttataattaggcatttcatccaacttatgtatcttacatagggaaattgacatcttagcaaaatttatttgcctaaagtcgcataggtaattaaaagtagatacagctgagactagttgctataatgcccagctaggagggagtcggtggaagaggtgtcatctattttcctttgaaggtttgtaagtatttgacttttcctgccctgagactgacttgcctctgaggaggcccatccgacttagcttgaacaacccggattcttgtctttagtcaaaagcctctaaataaagaatacaaatcagcttaacttctccaaggtctggcaaagctttatacacctttcagaaacagaacacagcaaatctgcctcagcaaacatgtgcatacgactttcatctgagctatcaggaaggcatcttatagacacatacaacggaagcccagagggctctggcatgttgcaaaatcaaacagtccagaaaactttccaccccagaccactattcagttgtcatctgaaataatggaagtcagagtcaaactcatcaattaaacgagaattatttatttatcataatctctactgcctgctgcttcaaatgctttctcatgaattaatgagctcatctacgtgcatgtcaatattttgttttaaactacaaaataaaacacaggattaggttttgttctcagtgtctacctttctgtggcattgatgcagatagcaactaaggattaaatcacagaatggttccctttttaatttatttatagaaatgggcttttgcttttattagtgatgaatgaagagagcttgacttggggaaatttagactgagattattgaagtggcctagagtttggaaatttttataaaacccaactgtgcaagtggattgaaattgtgcttaagaacaggctttcatgccagacttgtgccgaattccatttggttcctggcagaaaacccttgaagaatggtatttggttttgtttatttggcatttcaaatactggttcatctggcccccatcctgatcaaaaatagtcagaagtagaaatgggtacttgagtggcagcagagtggattcatctgggcatggcagcacctagcgtaggtctccaatatgccattgagaatgttgttgagtgcaggataacctttaacataatacccctatccctctcctgtttccttgctggttgatcatctgccctgggccacaaatagctctccctctccactctcccaaggaagaaagtcctgacaaattactcccttaacccagctctgttcctgaaggcttgcatattccatcacagaacttcctcttgggatggagagtaatgttgggacagatgactgtcctactttctagcaatgaaaaatgattgcatgaagcctcacattcctgatgctaatgagaatctgtcctttcagctggcgtttgcatcaggagatgccactgcttgatttgtaatgttttgcactaacactctgagtgaaccctgtctttgggccgttccattgcacaataggcagttgaaatctatgcttttctcaatagggagtacaaaaaattcatcattttaaagtgggctgtcagatctaagaaataaatctcagttcataaacttgaaaaactcagaagtgttaaaaattttattcactaagaacataacatccaagacgagagatcaattttgcatattattatttctacctgaagtattccatctcacttaaaagaaatatttgtttggaagcattggttggtgctggtagccaaggctgtccaacaaaaaaagcgagtttttaaagaaaatgttattccctaagggtgaatcttaaaaaattgccaaatgtattcttgagatgaataacaggaagcttagttctagaaagggcctgagtgattatcgaatccattcttcatttcacagacgagaaaatgagtttcagagatgcaaacattcctactatcacagaactagtaagctggagaacagacattaagacctgtaatagtgattcccgtgtgaatgtttttatgatgaaactgtacaaaatgatagaacaataacaatgtcaaaacacctatcactaagcactttcatatgtaatatctttttttaattataacaaaatggcaaagtaggtgttatctccatttcacaaatggtacaactgaggctcagaaacattaagcaactgtcctggggtcacaaagaagacactattagagccaggtttagtccacatattcaatttctttgtttatttccttcactttgcatgagaattcctttttgctgtctttcatttttaagcagaaacctttctttaaagacactaatgatcaaagatctaaattaaaaactaaaactattaaatttctagaggaaatcatagccctacatctaatatataatagaaccagatggaaattctagaaaattctgaaaagtacaatatctgaaaaggaagacaatacttagcttggattaggcaatttgtttcttagatgtgacaccaaatgcacaaagaacaaagggaaaacaagataaattgggcatttttgaaattaaaaacttttgtgcatcaaacaccattaaggaaatgaaaagacaattcatagaatgggagaacacttttgcaaattgaatatctgacaagagacttgtatctggaatctattaagaatgctatataattcaataacaaactgacaagtaaccctattgaaaatgggagtaccaagtataccttttcatttaaatcattgaacagttcacaatggctgttgtaaagtttttgccttgttactgaaaccatcatctcttggtctatttctatggagttattttttcctagttattggcagtttgcttatcttttatgtgtctaataacttttaattgaatgtagaacattatggatcttatatttttgagaatctgaatgtttaaaattcctttgaagagtttgtgttttcttctggaggcagtttacttactggctgtgagctcagtcctgttgaggctgtttcacgacaggctgtggctttgtcagggtgggtgtggatcagacatctggtcatcaaccctgcatattccagcctctttcacaggctcactcgctgatttctgtttctcccacattaaggccactgctctctgatagtctctgcctctcccaggctggaaaacagccttaagcagagagcccttgcaagtgaggagccccctcatgcttcccccttcacctccagggtcatagtcctgtagcgtatgtaatccccttcctaaaaacacttgctttatatatttccctagttgtgtaattgtttatagtgagagaggaagcctggttactcatgactctattatgagaagaaccacaaatctctcctacttcattttaatcattcgatgttagatgtatttaaccactttgttgccatgtttaaatttttatggggagaagcccaaggtaaataataaaattaacaaaacttttagtccagtgtgtattcctcagagaaacctcaggtttcttttcttttttttttttttttaacaaattcaggtctttgttctagaagttaaaaaaaaacaacatacaaccaaatatagttaaaacaggaaaatctatttgtgtttacttcatatctttctgttgggtcagatgataatgtttagaaaaatactgtaacattcttactttatgtggacaaacctttagaggctggcctctctgtagaaggattgcacagggaaataattttgagcctactttcttgtctttatcttctatgttctcttctcagcttcctgtcttgattggcatggaacttgctctgctcctcatgtttctatttgtttaggaaattcactaggagtgtacaagggacagattgtcagctgtcatccaagtccctttcaaataaccccactatcctttgccttaggaagtctgagcctccatcagatcccggtcacattgtgagggaggagtgaccagccaccgagggccacctcctgctcttctttcctctctcccctttgcccttgaggtgccctcaactcccaggctctctaatcatgctcttcccagcccaggattgccctggccagtgcagctcttccttaggttctagaaccactacctaatacctaattccaatagggtccttttgactgaagctgacttaatgtgtttgagaaagcagggctaaaataaaaagaccctaatgtagcagaggccttgataaattctaccgaagtgatgagaactgtgggaatttctgactgagcccaaaagttattagaggcaagaatacttctctctccagtaaatgcctccccacctccacccccatttatagaaactttcaaatttatactagcataaggccaaccttatctgtgaccatgaataagctatttcactacctcgttgttctggtcaaaataatgcatggggctgggctcatgcctgtaatcccagcactttgggaggctgaggcaggtggatcacttgaggtcaggagttcgagaccaacctgcccaacatggtgaaaccccagctctactaaaaatacaaaaattaaccatgtgtggtggcacacgcgtgtagtcccagctacttgggaggctgaggcacgagaatcgcttattgcttgaacctgggagacggaggttgtagtgagccgagattttgccactgcactcgagcctgggtgacagagtgagactctgtgtcaaaaaaaaagaagaaagaaaaaagaaaaaaaaatcatgggctagctactctgcttgtattttttgtttctgtccatcctcttacttgatacccctccacgttctaaaaacaaagcctcccttcacattttgagtgtgtctgctatggataatgaggcagcaatcctggttctaaagaattgtgataaagcagtcactaaggatcccattaaaggtcaaaccatctaattcttaatctcacggcacctgcttgataatgatggatacttattaaactcattccttctgggtctcagaataccctttagaatgatccaatttttcattcaggcacttgaagttcattaaatgaatgctggagaaactgttttctcattgacgtacttgctttaatgaaatgagaaagtaagaagtgcctgaatattggtggtggttctcaaacccaaggaaatctaggggtttgtggagatccagaatctcctctctcctcaccacttttatggcctttatctaattttacttttcagccacgtttgatgtagctgacttccatctcgaaacactctcttctgattttccctttgattgcactatccactcctttttccatgtcctcgaccggttctgtcttcccgcgtgacctctcagcattgaagtcttatctgcctgccctcttctggatgcattgtattcctggatgagcttctcaatgccctagtctcatatactggccatatgatgaggattcctggttttacatgtcaagccttgtctccgtaagtgaactgcaaactcagttttcaaagtgcccatctgaccactccactctgatgtctaacatgtgctcgcttacatgtggccagaagagagctcctcatccccatggccatcgctcctccaccagtgttccatctcagtaaatggcaccaccaccaacccaggtgctcaagccacaagccctggagttgtcgttcgttcactttccatttcacctcatctaaccattcagcaagcctcatcgatcccatctccaaaatatacccctaatccatgcagtacacccacctccccactggggctgcaccagtccagccccagccactgttgtctctcactggaatctctgaagtcactcccaagaggtccctgcttccactccccctcccacacccattctccctaagacagccacagggatcctgttgaaacaagtcagatccatcaccccctggagtacctggcctcctttgcacatctcagaccgaagctccttactgacctctaatggtgtgcacgccctgttcctcggcccttataagaccccttttccctgcacactccatgctctggccatatcggcccacgttctattcctcgaatatatcacattccttctgcatcagtgcctttgctcctctgccccgaaggctctctcatagatcttcccgccattcaagtcagccccatgatacctccgcagtgacgcattccttgaccactctacctaaaatctctctccccccgccacacaatctctttgtcttgttttatcttcttctcaacacgtatcactatcaagacattgaacaaggaaatactgacggattttcatttcagtttcccccttagagaaggacattgtctattgttttttgctatatctgcaatgtgcttggtagttaggaagcattatataacaattttaaaaatggaaacattcagtttttaaagtaggtttattttttttttttttcagagaagccaagtaactggtatgcgtagtaataaaacatctcaataaagaattacaagacttgaggatctgggcatggtggctcacacatgtaatcccagcactttgtgaggctgaggtgggaggattgcttgagcccaggaattcgagaccagcttgggaaacatagcaagaccccaagtctacaaaggtttttggaaaaaaattagctgggtgtgcagatatatcttcaacatactgatttgctctattttggatatatacccagctgagagattgatcatttggtagttttagattttgggggaactttcatactgttttccacactggctgtactaatttaattcccaccaacagtgcacaagtgtttccctttctacacatcctctccaataaaagccacttcattttgagccattagtgaactgagagaaaacagcactatggagggagaaagtggattgtttccaagaagtaggtgggcaaggagcaatgaaggaaagataataccaaggcaaatacctggaggatgttaagccaagagcatcagaggagaaaaggaatcatcaagaggttggttagtgggtacaaacgtgcagttagaaggaataagtaatagtgttccacagcacagtagggtgactatagttaacaatatatgttttttttgagacagggtctcactctgtcacctaggtgggagtgaagtggtgcaatcatgtctcactgcagcctcaacctcctaaacacaagtgttcctcttgcctcagcctcccgagtaactgggaccacagcatgtgcccaccaagcccagctaattttttgagtttttgtagagatggggtttcactgtgttgccctggctgagcttgaactcctgggttctaagtgattgtccctcctcgacctcccaaagtgctgggattacagatgggattacagactgagccaccgtgcccagtcaacaataatttattgtatatttcaaaatatctagaggaggctgggcatggtggctcacacttataatcccagcactttgggaggctgaggattgtttgaggtcaggagtttgagaccagcctggacaacatagtacgggcctgtctctacaaaaaaagaaaattcaaaaacttagttgggcatggtggtatgtgcctgtagtcccagctactcaggaggctgaggcatgaagattgcttgagcccggaattttaaggttgcagtgagctatgatggcaccactgcactccagcctgggtgacagagtgagcccttgtcctaaaaaaaataaaaaaaaaataaaaaaataaaaaaaaaaaaaagaaaaatataaagaaagaattagaatacttgaaacctagccaaaaccttatccttacttagggtgatcctgtgcttccatttgctaatccatagatactcctaatatcttccttctcttcttcataagtgaggagataagatgaaataaggaattcgtaaatacaaagagagtcataaagcatcacataaatgttatgtttattttatattgaaatgtccacctgaaaaactttctctggcagagtgcagggccagatgaaattcacatgaaggaggaacacctgatctgtatggccctgtcattattatgcatacccatggaaccagctgggcactcagggttatatgtggtagccacagcagggtgatttgcaacccccactcctatatccatcaagacaaggccaccacgaggccccctatcctgctgtagatgacctgaaatacgctgtccccttagaggttgctttctttggaattgatcatgaacatctgtttggtttattgcagaacccacagaggccaacacagtgcctggcacattctaattgctcaatgatcttgagatcaataagggggtgaaaaatggctgctggtgtaaaaagcaggagaaaggcactgaaaggggatgagagtggacaccggagaccattttttgcccatttgttagtatttcatccactctgcaactagtctcccagtcattcctttatttttcccctgtatgagttgaagacgactctttgtggagtctaggaacaggcaagtgtccctatatatggaaaggaaggaacagttcacaagctttctaagctcacaacccagcttgtctgggcttttcaatagagtggttgccatgacattacataggagagcctttcaggcagttcccattgctaagggcaaagggtgactgtgatattaaaagaagcatttgttgctctttatactcagaggaaatcaaggtgaacttgaactcattaaaagcaaggctgagcacatttgcatgagcagaatgtaaatacaggaggcttcttgcagatgagcttctctcttgcagaagaagagacccagggcctcctgagcctgtttgttcttaattaagagagatccttttgggatgagagtgagtttgtaatggcatttctaccacaatgtacaacttctcaaatatctccttcccccatatcttcaaagttttaagtacagcccttagtgcaagtttgtaggggaaatatggaaaaatgcaaaacaaatacaataaacagagaaaacaatttaaaatgattctacacacaaatgaataatttaaacctccatcatgtttgctatctgtgatgcatctatttaatattaataacttgtgaagaaaaatgactgtcaccatttttaacaagcctagtctattctggctacaaaccttagatgactgactattcctaacagggccctgcttattaagagtctgttatcttctttaaatttaatttcatgaataatgaaatgtttataagaggaaaacaaatatcctgtctaaagccagcctctccttactcccttccacctctgtcaaatatttatctgcctctaccttcttcctttttcttttcttttctcttttctctcttctctttctatttcttctttctttctcccttccttcccttttttctttatctatctatttcttcctctctctcttccttccctccttccctcccttcctccctccctatctctctatccctctccctttctttcttttcttagttttcaacaccaggctccatatttaatgcacacagtgtaactagcttcaatagctgatcattctttctccagagatgtcttattacgaagcaaggagcacatacaaagcagttgtattgcttttcaaattccctcttcagtgaacatagtcattaaagaattgtatcaagaagaaacacttttataatgtggctgtccccaaattctaaagatggtgttattattgatttagtaatagcttacaaatcatgacccaaaattagttcttctgcacttatgccccaacctttgtaaaatctttattgaacaaccatggccagtaaccataacagataatgttctattaagtgcagtttttccatgggtcatataaagtctttttcttggagctcatataagagtccatggaaccttcattcactttggtgtctgcagggaactcttttcctgtggagtctgagtgatcacgtggaatctcaccccatgctgcccacagaactgtccatctaggtgtctcttgctgaccagactctgggtgtacagcagagctgacagcccaggtttcaaataaaactttccagaatttcacacacacacaaacacacacacacacacactcatacagcagctctgctgtctaagatgtcaagatgtcgttttgggttttatttgtttacattctgaattctgtgtccatgtgttttaaattttcctctagataaaagcgtgatagagcatctctgtggggaattgctgtgaagaagtcccactgtgggatgtggtgcagggtgaagatgcagatgagagaaggaaggagaaagctcagggagagggaagtagaaagaaggggaagaataaacggttggagaagctgcctgatgactttgagcttttgtagatcagcggatccaaacctcttgttgtgcaggaagtgttagagaacattaaaagattagcctagagtctcaggtagttcaagagtcagagttgggaccaggtcttctggttctgatccagagctttttctcctacttagctgtcattcccatgccattcatgtcatgttttaagcagttcagcaagcattcttgccgtgctgacttgtctctagcatgatgttcaagctctgaaaattgcaagtgaatttaaatagcctctgacctcagtgagctcaaattctcactgtggagatgacctccagccccaaaacagatcagagacctgctatgtaacacatggggcaagtgcaagagtgaaaggaggaggatttggggatctagaaaggtctggggcaaagcggcaagagaaacatgaggcatttaggggtgaacttggtggaagggggaaggcagagctgggaaaagggcaagactccttggtgaccaaatgggtagacatgtgacaaatcactgcccccattgtggaggatacaatgtggaaagagctgtgagcctctccccaggaagctgtggtccacatggatgatgatggggagatgtgggaaacgccaggcagagaggaagagagctgccggggaatagcatcattccaccaacggaggaccacagggcttggtgtaacacccacatgcagagggtaagacgaggacccatcccatcatcagcggtgccaacgcttacattgcagcaccttaccactcagagtgaggcttcagcactctgcgaacgtttgctgctgttattcattgatcacccatgcacctcacaacagccgtgcgagactgattgggctgtcaccactttctccatttagtggacgaggacaggaagtcacaaaatgggcctgagatcttagagtttgccaagtcctgcagccatatgtaagtttccctgatgccggtactcaggggtgctgtgctacttcagtgtctgctcctcccagagtgctgtagcccaggagaagaggcctttgtgccatgctttttacagcagcacctccagaagtcacgtaagagacctggcacttccagaatcctttccagcctacaaccattttcacataaaaatgggaaaaatggaggcagaggaaaccatatatcccaaacgagggccagttatcccctgtgtatgtggggctgaaggctcatgatgcagtgaaggaccaccatttccctccttccagtgtattaagaagacatctgggtgttccagttccatcagctcactcatccttcagtagagacaagtgagcttggcacgtggatatgtgaagtgctgtgtgcattcagcctcagtctcctatggtgtcccagctcctggactctaagcctccctgtttcatttatcaaagagattggatgacacccacctatgttggtgagaatggatcttcttcatctacccattcaaatgctcatcttttctagaaacaccctcatggacacaatccagaaataatgtcctaccagctatctgggcatcccattggccggtcaagttgatatccagaattcgctatctcagctgttaaggccaactcagatctaaggggaggagaattcaactccccctctcaatgggaggaatcctagaactgctagagtttcctgccaaccaacattcttaccaagtaaaataaaacaagaataaactttacattcggctacagaaggtgatggaagaggtagagcaagaggatctacaaagatgctaatttcatttataattattttgtgatggaaaaagtaataaattattatgagttgtcaccagactctttcttaaccagagaattctctttctttggaaaaatattttgaaaagctgcttgaccatggcaagtgagacattgaggacccaagcaacagatagatggtttatggcatgctgagtggagagtaggggacacttgcatttgcctttgggagggaaggagagaggaagaaatagaaaaaaaaggggaagaaactggagaatgtgaaagatgtgaagcatcatgggaaagtagaggccgggaaaaacatcctagtgataaaggtagaagaaaagagttttaggcaatgcctaatatgtgattgaaagatgcatgtcccccttcctgccatggatgctcccccctgaaattttaaggcaaattttatagactaacggttgccctgtgcaagtgttgtcttgtgtgtatgtgtggagtgtgaagttggggttgcagctgaattgcacctccagttcatcatgacttcgtatctcattgcatagtctggaaaaaggacaggcatagacaaaggaactcaccagcagaggtggccagaagaagaaatctttcctggcaattgaaagaaatcttagtgcagattgtggtcttgcactaggatgagacagaggttggagcttgtcttcctcagacatcaaagagcggggagaacccaactgccaactggtttgcatgtggcttgtggtttgacagctgactctttcttaacttctaatccaagggtcagtacaaagccaattccccttctcctccaggaggaagaaccttctacagcctgaggtacccagtacttgtcctgagtgtaagctaggatgacctctggatccatcatgctatatttagtctctgtttcacctaacactcaggattccatgaatgtacctttagtgagtccaggacaccttgtgaagattgcacgaaccctgcctgggaagtgacaaaggtgcagacttacccttggcatcttttgtacctttaaccacagagttcacatggagttgtgaccccagctcatgtaacctaatgcaaggtgaataatacctcctacagcaggctctggaaatgtttcttgtctgcacacacacacacacacacacacacacacacacacacacacacttcttaagtctgcattccccaaataataataaggggcatgttgctctataacaatcagcatcacgaaagcctacaggactttgccattcggtttaatggaattggtatatttgaaatactgcctttggaatttttttttgacagagtttcactcttgttgcccaggctggagtccaatggtacgatctcagctcattgcaacctccgcctcctgggttcaagtgattctcctgcctcagcctcccaagtagctggaattacaggtgcctaccaccatgctcggctaattttttgtattttaatacagacagggtttcaccatgttggccaggctggtctcgaactcctgatctcaggtgattcgctcgccttggcctcccaaagtgctgggattacaggtgtgaaccactgcctctggtctgcctttagatattttacataacagattgtattacaaagacctacacgcctccaaaaatactttggaatgttttaattatgcaaaaattgagaaaatagttaggaaagatgcatctgtctctgttaagaataaattcaattattagaatttaggggtgcccaacagcttacctgcagcaagattaggttgagttctactaccttcaaatgcttacctatgacctttgaagttctgattattctgggagcttctggtgctacatccactcaatctgccaggagaggaatttatcctacaggctgcataatttccttctcagctgtaaaatatctctttataagaggtgtgggcgagaaggaattatgggagcaaatacagtatttatcacttgaattaaacgactaaacctggcaaatagttcagctatcgatccacaaatagtatcaatccacaaattagcagcctgattcagataatctgatcagtagatatagttatatgtgagcatcataagcatcaaagccacttttatgtgtattatttttcttgtcacccacaaatcatgttgcaaagattgatagtaattgaataaattgccatgtgtacttaaagactgggcttgttggagacacaacacatttattagatgatcagttttttttttcctgttatgtcaatgctcactggaacacttcttttcaaatgtaggaaaaccaagctaactagatctagaaaaacaagcagaggtttcaagggatgcctttgaaaggtggtgtggtatcagggagcacgttgaattggaagtcagatgtccatgtgtggattcctttcatggcactccctgattgagacaatctgtaaaatccctttaacgtgcgtatgttatgattgcataatgtaattcttgtttagggtttattgtgtgactctttgctaagtaactgtactgtcataaatggagtccgagcagcggggcttgtctccccgtgagtgtgagatctgcatgctgccacctttctcctcctacttttctcgccaggtaccacagtctgtgtaagatgcaccaggctgatattttgtaaaatcaaggtcttcaccttccatttatgtggcacgagctggaatttgccagggtcaaatagtcaaccaggagttctttatggattcagccacatgggagaacttgagggaccttgcatgtcttatattctccaaaactccatccccacaggcttgccagtgtccaaaaggcctgatttttgggggaggaggcagctctaaaatagtgtcaattctagaactccttttttaaatgtcccaggaggagtaactattggcatcatcagtatttaaaactttgggctaattacatcacctgattatttccctcctttgtgctttctagagggatataaaccaatgagagtcttgagaggtggagtcagttcagctcagaagacactatcttgagggaaaaggccatgatgagtgggtttgtatgttgaattggaaagaggagaagggagatgaagagaaatagggtagggggagtactgagaggaaggatctgaagggtgatagagagaatgctgcctttggttaaaatttcaccagtgtagactgtgtttatgtagcttagtcagaatctcccttcatcctgtagtgctatgtttttgtttatttatgcaatactcttcctgtcaactatcacaattaagaatccctagtgtagcacagttatgaatgtggctgacctttcttaaaataatgtcctcgagctctgtagcactttaaacatttcaactcttttgcatatttggtttttcataatgtaggttgtaacacgatagaaggttagggaattaattgagtgggccatgatcagcttaagaaaataaaatgcaatagaaatatacctagtgcataataactagtagaatgaactaatatgaaactttgtccattatctatgtatgtagtatgtgtttactgtattgctatataaaatatatttctcatagtagattgcagtcacaaaagtttgaaagcctttgaaccccctttgaccatggaaaggaagagggattctgtacaggaaatggttaactcagcaggcctgggttgctcaaaccgtgcacattctcagaaagacctgctttgggactggcccttggatggtcctgggaaattagccaccaacctttggaatagtgtgcccaataagaatttttttggatgccttaggcttcagcccacatgaaaccagtttgatgactttatcctaacaatgtaatttatgtatggtgaatgcctgcttttgctttggggtggtgtgaggatctgaggtcaggtacgcaggtgccacatgcctgcatgactaacccccagtaagaaccctggacgccaagccatgggtgagcgtccgtggttggtaacatggtttctgggaaaattaatagagcccgtgagactccactagcaaagaacacctggaagctttcacctggtttctcctggactctgccccatgtaccttttattttattctgatttgaactcatatccttttgctgtaatatatcagaacagtacatctaattcagaaaagtaagcttttctgagtcctgtgaatcctagtgaatcatcaagctttagagtagtctcagggaacctggcgcagatgcagagattagacttgagacctagagaagttaagggctttctagaacatgtagctcaagcctgggcctggagtgtgatgaggtcatggacattaagctggaatgaaggtctgtaccaactcagtccttttctggtgaggcagcatggaaagacattggccttttctccatctgtgatgacagtgatccctggacgtgacttcttcaagtgtccttagtgagtttaactgggtaagagcaaaagaaatgaaatattttattcctttctcagtcccccatcaaggacatcaatagcataaaactgctataaaataacaaagcttattataaactttgcctccaaaagtggttctagcctttctgtaatctttcatatgagcttgttgttctgttgatcaatgaattcggtaatattctatttttaaaattattttaattatgatataaacaaatgagatacctcttcagagtccacatgaatggaaatgaatataaaatcagaatccaacacataaaaagaaagttcagcaaatgcaggactccagtctccactgcttcacagtagggtttgtccttgtgttttcttgttttgtttgggaaaataatgcaaaagagatttgttgtaaaagctttgaaatttaattatgatcagggagttctaaaggaaattaaacatagcatgagtacttttaaaaaatatgaatttaatatagcatcttatcaaataattcatcccacacggctagctcacttcccaccaggaaatagaaaagaatttttgaggactcttaactaataataatttctgaatttctctgacaccttcactgtttctaaacattttttttggtcatgttaacttacttgattcttcagagtttgcttattatagccatcactttctaatagtacatagtttgaaaagcacttggccgtcttctgcattctgggaacatgtggcttcctgacccacagaggatggcttctcgctgtgtcctcatgtggtggaaggggtgaggggtctctctgaagtgtctctgctaagggcgctagtcccattcttgtgggctttattctcaccacctaatcactcccaaagtccacctcctaacaccatcgcttcaggggaaaaatttcaaagtatgaatttggggagggggcggcattaaatagtcgatgccactccccatgctttcttttcctctgttgtggttttcagatgaacagagacttctggagttgatttgctgtcttatttgttctccctgcttgttctcgctcatctgggcaggtggtttgtcccttcttccccttatccaaatgataaattcctctccctcctctcctttcctcttccagtatcttccttcagctcctcctcttaggagctcaggaaatctgtctgcacctatcatactgacagcatgagcccaaatgtttttccgtagttcatcctggatcccggaaacatgggtggctgcctgcctgccagcctcagtttatttcccagccttactggtttgtaagctttaattttagaaaagaggacagagccatgcagtccacagaccactgcatggtgcttcgtcaccaccggccggtgctcccatgggctgcccaggtgcccaggcgtcctgggtccccaccctcgcatggctgtggagccgggacagctatgacatttgtgtggggttcttaaaaatgtgagaagctcctaatatgttgttgttaaactcatcctctctgatagaatttaattttaaacacaattcccccgaatacaccctaatgtgcttgtttcatttctggagactgtatgcatcactttccttgtctggccaaggccacaacagcgtttgcgttagccactgtgtccctgagtagatggggccctgtttactcttggcctgctccgtgggatcccagcccggccctactggacctcccagctcttttacaagtaacgccttctttcccaggtagccccattttctcctccttcatgacacgcctgtgggtccctgctttcctgggactgtcatcgatgtgcacgctggtgcctatgcacatgctccccctgcatcctcctcggtggggctgacacgcagggacttgcccacatcttctcatcttgatagaaaggatccctgtggcaagccctcttcctttcttcacaaagctgcgttcctcctttcccctctcctttggatatctgccctgaagaagctgatagaagcagatactgcttctggtaggccccgctctgcctgctccgatctttcacttctgcccactccatgctatggccttctctgtctcttcccttgttaactccctcgtctgcatccaattcctgatgcctctgacccctgacactgtgtgctgcccgcagccagaggaaaccacgttctggagtttggcagacctgaaatgcccacaactctggccttacttatgggaggcccttttcttcctcttccaagctctgagcagctccgaccacaccatcctcacactgccacctcccctctgtcctcgaggcccacagtcctgcaggtgcctctgagagtccggcacggtggggagtccacagggctactgtcacacccatactaacctagggagcctgtctctgaaacactgccacatacttgttttctcccatgttccatgtttccgatttaaatgagagacatgaccatttctatctggctctatgtccatgtcttccttgagacagtgcagtggtggattagaaattgtcttatgtcagctgggcacagtggctcacacctgtaatcccagcactttgggaggctgaggcgggtggatcacgaggtcaggagatcgagaccatcctggctaacatggtgaaaccccgtctctactaaaaatacaaaaaaaatagctgggcgcggtggcgggcgcctgtagtcccagctacttgggaggctgaagcaggagcatggcgtgaacctgggaggcagagcttgcagtgagctgagatcgcaccactgtactccagcctgggtgactgagcgagactccatctcaaacaaaaaaagaaagaaattgccttatgtcaaaaattagcaattttatgctgggcatggtggctcacgcctgtaatcccagcactttgggaggctgaggtaggtggatcatgaggtcaggagatcgagaccatcctggctaacatggtgaaaccctgtctttactaaaaatgcaaaaaattagttgggcatggtggcgggcgcctgtagtcccagctactcgggaggctgaggcaggagaatggcgtgaacccgggaggcagagcttgcagtgagctgagatcacgccactacactccaacctgggtgacagagcgaaactccatctcaaaaaaaaaaagtaaagaaaaaagaaaaaaagaaaaaaattgccttatgtcaaaaattagcaattttaggccaggcacggtggctcacgcctgtaatcccagcactttgggaagctgaggggggcagatcacttgaggccaggtgtttgaaaccagcctgggcaacatggcaaaaccccatctctactaaaaatacaagaattagccaggcgtggcggcgcacacctgtagttccaagtactcaggagattgcagtgggaggatcactccagctcaagaggttaaggctgaagtgagccatgttagcaccaccgcattccagcctgagtgacagagcaagaccctgtctaaaagaaattaaataagtagcaattttggcccctggctatttctctgcccctgacctatgtttttctgaaatgttatagacatcttccaaactgatttcacctaaatatcagaaatcgctcatcatggttcctttgtccagtgctgtggaaggccccagaggaggcttctgtggggtggtgagggcaccaggtgtgagttgggacctgagacctggtccttgttcttacagccgtgatgctgatgattaggaggccctcccagagcctccagacaggcttacaccatctggagcatgggcctgggtgaggcctcgtgagctcctgcatcataacggtgcttcctgctgctccaaagctgtggaatgtgtggtctgggaacagccctggctgaggtgagcgcatctttgcttgccttccacgtgacagacctggacctcagttcttgggaaggcgtccacgttcctttcccagcttccccattggatctgacgctctcctcttgtgatacctttacctgaattgctgggagattcagcgtctggacttccccactcccagccataggaaaaccttccccccagaagtccctggtgaccactcacacagcctgatctgctgccaacatctaccccttctggaagcagctgtcactgtttccagcgtgccagcctgacatatttcagagtgtctgcatgtctctgagctattaatacacaaaataacgtaagccccctcttctggactccccagtgtgtctgagaatgcctagtaagcatccatctggttacttttagctctaaacgttggttactagctcagcccaccaagagctcacatgcccaagctctccctggttgtcttatcctccctggctattacctctccctggctattatctcttactgaccattatcccccagggcgaatacaatcccttcttcttcacactgaaagccaccactaacacaatgatgatgtgtgtttaatgagtttcacccgctgaagttttagataaactatttttttaattctaatcttgcaaacaaggcttctgtgttcctctggtttctgggtcttcctcatgccaagaggccctccctaacaccttagccccagacctcttctgtcatctcagactctaaagcaaggtttcttaacgtggggtcccaggggcctgtgaacttaaagaaacaaaaaggtcataattatttttattaaagtctcactaaaaaactgctgcccttcagcatgtctgtaggcaaaatacacagtagttttggcattacctgtgactaaaaaaaatcacagatattcccatatcacagtggcaattgcagatatcttgaaatacaacatactctcaccattatttcaaagtcatagtaggttttaggcatacccctatttgataagctttgagactctaggcagacactcaagcaacagagctggtcagtctctggagattcccttctcaagagtcattcaggggcacgacctaaaggaacgagctttagagtgcagtttaactcaacagcctttggagaatctagcatttctggagtccaggctgtcttttccttacaaagtaaattatcaaatttgcattgtttatcattgggtatccttgctaaacaggagtctcattcttttttccttttttttgttttttttttttttttgggggacggggtctcgctctgtcacccaggctggagcgcagtggcacaatctcggctcactgcaagctctgcctcctggcttcatgccattctcctgcctcagcctcccgagtagctgggactacaggtgcccgccatcacacccgcctattttttttttttttttgtatttttagtagagacggggtttcaccgtgttagccaggatggatggtctcgatctcctgaccttgtgatcctcccgcctcagcctcccaaagtgctgggattacaggcatgagcaggagtcccattcttataagcatcagaattaaaaactcaaaattggatatctgatttgacaggcaagtcaagggagtgagctaggcagataactgggacaaggacgttgcaggtggaggtcagctggcataaacaacctgaagcaccgagtgttgctgagaaagagcaaggaagcctgtgtggctggggcctgaatgaaggaatgggaaggaaattagcttagagaggtagcaaagcgtatttatccttgtataccgttgggagcactgattttattttatttaaagcatgccttcttgtccaagacaattccccagtaaaatgttactagtttatctaagcccagacagccatttccctgatgtatctttaaaaataaaaaatctaactcctgtgttttaaatacattgtgaatcattaataaagcaatataaatacattttatttttgtatatttataactatgtttcaaaataatgcattttctttgcaatctgacatattttatcttatatatttaaacagaagattctgacaaatgaaatgctggcatcaccagattgttctaggagttcattttttttctgtctcatttttgtctaaagagacaaaaaagatctagaaccttttctaaattttagggcctgaatcccctctctctttaaaatgtgtccgcaccccccaccgaccccatcccccatccccccctacccccttgttgtgtggggcaattcagccttttcaggtggctttatatacctgtgactgcctttaaaggtggctttatatacctgtggctgcctttgaaggtggctttatatacctgtggctgcctttgaaggtggctttatacacctgtagctctggggccttccaagctaagcaacagtactgctaaacagttaagtctacatagttcctgggtggtaagtgatttccctgtattatttcacaaaatcataaaagcatttatttgcccagtaccccacaagtgatagaatctgagtccagaggttcggccaccagggctccagggcctgaggttttactgtgttgtgtgctgtggatgggttactatatcctttgacataaatatatacatacttggcttatgtctgctttgtccccagaatgcacacatatctgtggttaagacagtgttccttctttctttctctctcttttcctttctttgcccctctgcactggcattgaactctggggagaagacacttgcgttctgaggctgtttctctgtctctaaatgaagacagtcaaactgaatcgtttccaagtccccgtccagcatttaaattcagtgtaagaaggaactcctggctacgctgccttcctaacctggtcaaggaatgttcattctttgtattgactgcagtgtcattgaatttgctgcaaggctttacatcctcctcatgaagaggtgaccttgtatctagagtcccttcgtctctgtctttgatgcagtgatatttctcattgtgagtgattccataagctagaccagcagttgcccatattccatggttgattagttttctagaaaagaagaggacccttcacaatcacagttcttgtttggaaacccaacaggaccttaacatgtattcaaagtgctgataccaaatgcctcttcttacttggtgcccactcctctgcacacaagaacaagtgtttttttcttacaaataaccacttttcagttcattctagtatcacatggtttctagacttctttgcaatttgagtggaactaaactacagttcattgacaggcatcacacagcacgtgtttatagagattaacagaatatctctgccctggtgacattggtagaaggctcattgagatgattttactgtgaacgacgtgaatgccactattctagtaatagtgttcacagctgtatcaatttatggcttattaagtgtagggccaactaaataacacatatttttctacacaactgttgtcaagctgaatttgttccttctaggaaatagtacaacctaatttttcatctaaagatagaggtatacctggtcaaatccttcatagcaagaaagatactactgctagtatgaatcttgacttagaagatgaaagaagctcaaatgttcagttgttccaatcctttgaatttatagctgagggaatggaagtccatcaggagggcatgaagcctgttcaagttcacacagaggatgtggagcctctgatgctcatcgctgtggatccttcccatgcctttatcccccctctgcacacctcacatagtgtcatgagttcctgttctagagctgtggtcccctgaagcaaatctacgggtctcccttctcctgtcttttccttcctttgtgtgtgtgtatgtgcgtgtatgtttgagatcaatgatttctcttttgcctacttttgacttaagataacatttgttttggagctcgacaagcatgactcagcagtgtaacactctttttaattttaattattattattttatggttattcttttgtgattatcaagttgttcttgatgatatctgggcactgtgcaagacttccttcactgcatgggagtatgtgaggttcatttcaattgcacttgtgtttccatcttcttcccttctatcactgactcactcaaagcttgcttttgtttcataaaggatcaaccaacagaaaattgagaaagtcagtccattaatttgtttggccagttttagtcattggttggattcaaaataccccatctattcaacccagatggaaagaactgaccttttctgaagctaaaacatatgcaaaatggacaaagcccatggcttgacctgacctattcctaggtcatggtatcctgatagagcattctccccatccgaccctgaggcacctgaacccagcaacctctttatgcactcacattttcagccttaagggtcttccctaagctccgctttctgagggtaaagcctttaactttcctttgtggacaaattgctcactagctcatcattggggttcagtggacaaggtatccttacatgccatctcttcatgagggcgtgaaggctccgttcgtaaagaactatgatgtggtcatgtaatgggttcactttaagacttgaaaataagtaaagcgaataagttacactataattcatcatctttcatatatagcagtaatgcaataatacaataattactttggtttttgttggtaaattatataaatcattctattcattagagataatgaaaaagtaacacaaacatgatgtgatgtctcccttatgctactgatttactttatttcagtcccgcctcacttcagaatgcaattttttccttgcaggaattacttgtaatggcagtggtagaaccaggggatcaagatatccagcttctgatgcaggaaatccatctctctttattgatagcccagcatcatgcttttatctagagaggcatttatccatctaaacacccctagaaaagctatgtggaaaatgtaaaagcatcaggaagctcaaagttacagccaaggcacagactgaatgctttaaaatcttgtctcatccacagaaatccacaaagattatttccatagatcaaggacatagtaatgctgtttgccctttttacatagtagtaccgtatatttattagctctattgatgaaaataggagagcaactctccttgatattagagaccttggcaaacgtaaagtacttaaaaaatgaatagactgccttccgaatgtgaactcactgactaagcccagtgaaaggagagtatggcatgaaatcagagaatgatgaatggccaggattacgcgcgcgcgcttgtgtgtgtgtgtgtgtgtgtgtgtgtatgtgaaaataaacaatatgattagtgtttattctttttaacaatccacaaattgcctgcttttctctacttttttttttgagatcaagcctcactctgttacccaggctggagtacagtgggtgtgatctcagtgtactgcaacctccgcctcacaggttcaaatgattctcctgcctcagccttgccagtagctgggattacaggtgcccaccaccacgcctggctaatatttatatttttagcggggggttgggggcggggggattcaccatgttggccaggctggtctcgaactcctgacttcaggtgatccgcccacctcagcctcccaaagtgctgggattacaggcatgagccaccttgtctggcctctactttctccagttagaaagtggaagaaactgagcttcaaatgtcttgcttacagctattttggggctctgagttgagatttttgttgtaccatttgtgaagccatccaggtgctgggtctaatcattcctgggcaactgagatacagaaggagccccagctcagatggtgcacgggcacatcataccctgggcattatttttgccctttttctggaagtacgattggaaatgggcagcagatggaccacttcgcattttacccgttcaagcaaggggtatttttcttctaggaagtgggatttccaagcaaaactgccgctttggtagtcacttgccatacttcagtgtccatggaaaaacaactgcgtataggaagagggaagggggacatagcgtgccaactctaactctgatgtctgcaccactcatccataatccatgtcccagtggggaaggtgatattccctggcatctacagacccagcaggcacacggtgggtgagtgggcctggtcacctgcaaccgcagtagaaactctatcccaaggcaaaaggaaattaagaaatccatttgtgaataatattcacaactacaatactgttttgttggatctttcttagtttcttcagttcaaggttgatttgtggcccatgagtctctgatccagacatttgaaaatctctagactcagtgaaagtcatgttaattataaaatcagtaagtacactatacaagagcagctttgagcttggtaggaagacggccttcccaggaaccagagaggagagagccagctttgaccctgcgaggcacatgggagaaaagagttcagttggtttatattctatgaatttactttccccattggtattccgaagtgttcactgaaacacagctgctcctggcactctaatagacatttcccaggacctcatggcagccttatccacagtctccagcctgcagtcacatgtatttttcaggggttcactgttagccctttgagcaaatatttatagagttgtttttaaaaaattactgatgctgtaattaaaaagaacacttaatccaaattacttaatagacgaataaatgagtgaataatcaaaacatttaataccactggtatatataagaaatgaattaatttcaaagtgtggaaaaattatgtgggcttcttatcagtggtattaatctatttttgatacataaaccaccctaagaggttttcctatctatcccaagtgtcattttgcagtattagtttctctaggatgtgttttcattagcctcttagatataaatggctataccactaaaatgtaggaaaaatcccaaatgaaagccctttccctattcaccctgttaagcttcctcttgatggaagctctcttcacccttgaaagctgctaggaggtaatggagggcactgtggccacccagccctggtgcactgagtacctttccttaataaatcaccgttggagtcctatggcaacaacctaacttgataacacatatatctagatgtcttgcttcattgatatgacagtgatttctcttttcatactcaccttgggaatctaagatgttagaagctaataaatcccccacacataaaacatataatgatacattcagagaaagattctctaaactgatttcagcagttcttacatataatagaaacacagacttgcctaccatgattttgttacttttgttgtcatagcctcattcattagtttgacaaatacttgttgcccatctcgagtgttccaggcaccgtgacaaacactggttatgaacagcaaaggagatggaagtagtccctcctctcaaggagtctgtcctctactggggagatacagggaggtatccagcagtacagcctgtctgtctggaaggagcccaccccacatgcagttgaaaaacacagcatggcagatttttcaattttaaaaaaaaatcacgtgctgattttataacagattttaaatatgacctaccagtagattatagttcatcatttttgaaaggcactgttgttaacgatgtagcaccttcccgtcactggtatctcagtagccaccagtcagagcagctcctagcagactccagaatcatgttaatatcttccatccgatcacctctctgaagactgtttgtagataagtgtgtcttaagtgaactttattcgaatgaactcctaccctgtagatgacagtttttgcatgaaccgtaatcagacatagatcttcttagggaacatataatggggaaaataggacttggccagtcatggcagatgttcattgatgtgtgtcatatgaatagatggatgaatagcacaaggtaaagagtggtgtgttttataaggcaggcacatgcagatgttatgaggacttggcaaggctagtagtaactccttaaagaatcatggaagacctcaaaagccaggaggtggtgtgtgagctgggctttaaagtaagcctatggttgtgccatctggaaatttaatttcacaacatcctggaatgtgtttccagtgaatgagtcaatgaaatgacagaagtcagtggacaaagattactgggaattttcctgcaagatgcagcactcagacctgggtttgaacccaaactctctcctacttttaccccaggacttttcccttataagacaatgcatgtgaaacgtatggttataaagctaccccaaagtagaatcttttattattcttcagtaaaacccttcatgggatgagagtttacgaataaattcagagttcatctggaggtgcccggtggatctcttgatgtcctagcttcccaggtacattgccagtttacaggaaaatatgcctttttgaaactgattgaaaacaaattagctgggttttcttggacgatgaatctgtagtttttcaaagatcagaaaattcctgttctccaagaagacaggtgcagaagtgatcatctgaggctgctctccaaggtcctcagtgtatttgcaatttcctcagagtctgtcagccatcacagcatagcctctttcttttttctggatttcttttttattccatgataggtggaataaggcaatctgggcccagtaatgcttgttttttaactcagtgtcatcactatctctcagccagtgttgtgtcccacccaccaatggcccagtgaaaagtgatccagaatcccttctgaatcactgaattatttgcacacaaactcatctatctgatctgtccatcctccatgataaacggaaattagtttcattttctgccctccccttcctcctggaatatctgactcttcaataaatgagaagacagagttatggttcatttactgacttgattttaatatttcggagagcatttaaaacatttatagcgcagcagtcttccttttcataggaaacaaaagtcttctaaaaggcagtctcatttcccgtgtggttagttgaatacagaaaccgtgtagtcagaaggaaggggctgccctgagtcagcccgggctcccggggctggacggagcttgcatttctgagctcccagggcgcccccaagtggcgatgtcaagctccaagttgttctcagtgtgctcaacagcagcgcttttataaggttctttttgttttgttttgctttggctttgctgttgtttgttcggctgcttttatttttgcagttggctgaattcatccgagggttatacaaatcaaaaactgtaagtggagaggatctaccagttgttttgcaaagatagaggtgctatcacggaggatgctgttggtgtggcataggtgggaaagagaagcagtaagaagaaaggagaataaaagagaaatccatgaagctgtaagaagtgtttttttgtcactttttaatgctgatttattcacctggatcaaaataaggaaaaacacacgaggtctaaatcatcaaaataagttgcaagataaggcagcacgcttcatgaggctgtttctcttgctttctgttctcaacaccagttctgtgtaagatgacctgcaacatagactctgcatgtagaatctgttagtggctgacccctgccttatataaacaaggctggtaaatatggagcgaggctcacattcaaacaacaattctatgggctggattaagactcaaagtccctaaacactcatcaaatcatgttgcctctcccatatgcaattccagaaggataatttattttgttaactaataaaagcaatatcatgtgtgctgaaagtattttttcccacatattctgtgtacagaattctatatatgttcctaggggctggaacatttttcctttaactgtgattcttattctgattactagtgttctgaatgcacacttagcctgcgtgctacatggcctgtgcagctctttcctcctgccccgggaagaggatttcaagcctgtcatcttcaactcatagcagccttggtggagtgggttccaaactggctcttatgatgccagctcaaagtcagcctcttgggagtctctttagggcaacagggttttgcctttcaacacaacttaagtataaagtgcagataaacataagagtgttattttaaaataaatttgctaaagcattatttctcttttcccctctccctcctcctctgtccttcctctaccctcctctttcagactcatactcctcctctgtggctttacaaatcctggatagaaaacatctcacaaaacatgttctcttctcttcacatatttaagaggccttcgagcattgacacacatttgcctccagattttctagttgaagaaatgtgcaaaaatcaataaaaagcccaaatacagtggtatttttccccagagttatggacaataacaaataatcaggtgggaaggcttgatgattttctttttagattgtgagctacaggcggccatatgtgttttaaaggttaggtacataaaagaagttttgaggtttcccctctgtaacaactgattggccctctcgggaactctgtgcttaaataaagctgataggattggcctctcttagcatgcttatgccatagatgagcgtctgatgcttagcgacctatcctggtgcaagagccaggcagtggaagaaccaggtgtgcagtgtgtccaacaggaatgcttttggctgtgaaacaattcctggctgaaagggcctaagcccgggggattttatctgggtgggaagaggattctggttttagttcagtacctgcatgctatcagggctcaaggtgtgcatccttgcaaacactggccccttcttctcatgtttgttttttttgttgtttgtttgtttgagacagagtctgtctctgtggccaggctggagtgcagtgagtggtgaaatcctggctcactgcaacctctgactccctggttcaagtgattctcctgcctcagcctcgcgagtagctaggattacagtcatacgccaccaggtccagctaatttttgtatttttagtagagccggggtttcaccatgttggccaggatggtctcgatttcccgacctcgtgatccgcccacctcggcctcccaaagtgctgagattacaggcgtgagccacggcgcctggcctcttctcatggtttcaaaaaggctacagcagctttgagcatcaaatcctcacacaactatgttcaaagacagaaaacaggaggaagtgatgttggcaggccaggggaggggtccctcctctgaccactctctcttaccagagagaaaaataatctttgccacagcctcccagaaaactttttatttctgcttcatcaagcggacacccttaacttgtggatattctatattggcaggtaaataagtgagaagggatatgggtgcagcacgggggcaaccaatgaaaggttggccatacaagcaggtgttccaataagacagaagaatacatgaaccatgctcacaggaaaatttatatagtttcctcttggaaaacaacaacaaaaaccttctggtcttatccaaagcattaattggatgaaaaatgtcaagcttttctcagtgttcggtgcagtacaaacgtaggattatttctaagtggaggagcaatagaagatagcactgtagaactcttccgtcatgccaagagaagttagatatgaccaatacgatgaagggaaatgataaggtgacattatccctgagctaaaagtcaccgaatctgtgacaaggtatgggctagtcaacttgtggagctctccagcccccttctcaatgaagattttaaggcaaactagaattgcattacatttagtgattatttttcctcaaagaccaacgacttcaatgggagatagaagagtctgtggatcacttgcttttattctcttcctatagctgtgaaaattgattcaagaaattgccaacattccactttaatcagggtagaaaccaagagttgggtgtagtttatccattgagatgctctatgcattggcaatgccatcatttaaaaacatcatggagactgtttttagtcatatggacaaatccaagcaggctgccttcccaggaaatcaggagcaacctatgaagttctaggcttgaagttttttgattggtggacttaataaaatgtagatataatcagtagattaaaagtgagtactggctgggcacggtggctcacgtctgtaatcccagcactttgggaggccaaggtgggcgaatcatctgaggtcaggggtttgagaccaacctgaccaacatcgtgaaaccccgtctctaccccagctaaaaatacaaaattagccagctctggtggcgcatgcctgtaattctagctacttgggagtctgaggcaggagaatcacttgaaccgggcaggtggagtttgcagtgagctgagatcatgccattgcactccagcctgggtaaaaagaatgaaactccatctcaaaaaaaaaaaaaaaaaaaaaaaaaaaaaaaaaaaaaaaaaaaaggacctattccaagattttcattaaatgctcagataagtataccacccgaggatcagtattataaccaggtatcttattggaagtcttgtgttttatcttggaatactcatgagttcggtattccatctcctggtatatttggattggataattttatgttatttgataaaattgcctactcaaggaagatagttatcctagggatttgaatatctcaattgggaaactcagcattcattgagaccacaatcaaccatttacatctcattttgagttggacttgaagttgtggatgatatcagagccctgagagagagaaatttaaaaaggaatcctgaaaggcagatgtaaatatcgccttacactgcttcttcttttaccccaagatggctaagaaagccttcaaagtcctttgaaagcattaatttatccaacttttcccacaaagactgaaatgggtctgcatcaatgatgtaatttgggtattgctgggttatacaggagcacaatggtgatgattatgggtgcgctgcagaggactgagttaatggaatcccatcagggactcagagcacaaattcggggcacaaacaggacccacctcatcccgctgcagctgagagtcactgttgttgctgctgtgagtgagggaaaaggctgatcaaattgcaggctcatgtgactggtggatttatttagccaatgggcaatttcggtgtacctctcaagcaaaatataagtaattgttgagagaattacttttttgattaccaaattactatgatttgaaatgcaattagtagtatagacaaacctatttttcccctttatgagaaggaaattgttcggaaatgggtatagtggtgctgataaagttacagtccacagtgaattaaattacccacaagaagcagatacatggtttcatttcagttttattgctcctaatgcaatttgttttcattaatgagaacccacatgtatgcatgaatcagggttttgcactgatacctcctgtgtggggtatttctttttccaggttaggtttcattctccatatttaagatctattgtgtgtatattgatatttgcctataaatattaaagatgcacctgtggttcagagaatatgttaaaattcaagaaaagctaccgatctacctaaagtagcatcaactcgttttttaaatttgtagatatttccatttgtacatggaaatttagagggaatcttaagtgacggtgaaaaataaaatggattttataatgaaccctttaacatgcttgaaaggagtggattcaggagaattaagttcatgaaagtcaggtttgaactttaaatgtttattaactttattgatttttaattaaggacaggatttttttattgcattgaaaaagcaatgagtccaaactagaggcacggaagattttttttatgaaatcagtgtttgaaagtaaggcttttttttctttgcagttctgcagagttcttctgccaaattgcatatgttctggcaagatgggaaaaggctctctgctaaggtacaaaatcagagtatctcagataagccacaacagttgtggtatgatagtttgaccatatctttgcctttgctttgacaattcccttttgatttctaccttcttcctgacatgaaacttaaacatcagttcaagggcgaaacagcatctgaaaatgtcctgcaaagactaaatggactgcattcttttttgattctgaataaagtcttagaaaagataaaaaaaaaaaaaacactccctccctcatttaaatggtttcttttttttattcttgaaaaatccttacccttaggagaatccttgtccaatcctttaaatgtataagctgttatctgagacctgagcaaacatttgagaaatcttccaggtcaccttggtgccgtgaagaaaattgctctagtacattgctctagtgcagtggttctcagacttgtgcatgcatcagaatcatctggagagcttgttaaatgcagcttgcccggccccagccctgagtttcagctggtctgagacagggcccacgaatctgcatttccaacaagtccctgaatgatgctttcgctgttggtccagaaacaactctttgaaagccactgtatgagtagattaaaaatgctacttggtgctgctataataaataaatcacagctttattgtgaacacatttgcaagctagtggtttctaacagtccttttgtagtaagactagcagtgctccaaatgtaccaaaaggagcaagaaattgagaaaacggcatctattcacaaaagtaaagcattatcagtcggataatttgtagtatcagtcttgcttcactttgaggagtactgatgatcatctgcatgaaagcaagttcactgtagttcatgatttcatccttagaacgtagcgcaatgaatggcacatagtcagtgctcaggtgttaactgaataagtgaaatgcctacaagaagcatggacttgaccatgccattttttcatgcattgatttggctttaatgacacaagcatgctgtttaaccaattatcctcagtgacttacccaacaagtatttatttcaagacccacatttctgctggttaactgtgattcagctggtctacactgggctcggctaagagactctgctttgtgctccccaattatctggcttagccccaggctgtgggttgtattgaggtcttctccaagtgtgtttgttctggggccaggctaaagcatcggctgttaatagggacatgtttttgtatggtggatcatcagagtgcagaagccagctagggtatgcaagcagctgcaaggcctctgcctgcatcatgtccacgcacatcccattagtccaagtaagtcacatgaccagtctcaaagtcagggtggcagtaggtgtcaggggacaggttaagatgcttccctgcagggggcatggggtggagagtagtatttgctgaacaacattccagtctgttacagtttacaatatggcaataatggcttattccatttagaactcaaagatgagtgttcaggagctggatatttataggttggaaatgcaatcacatgctccgctatattatgctcttgaaagaagatgctgctactcagactgtcccactgaacatctgaaaagggggtttgtcacgtaaaggaagactctttcctcttccctccttatgtttcacagtcattgtgttgttggaagaagagatggaaagatacactggaatctgcagtacttggacctgggggccaacttgctgggcttttcttattttgttatttctggccgacaagccttctctttcgggggtgaattaagttgtgctcacactcaaccctccctaaatcttagtccagatgcacattttagaaatacactatacccccttcctttatttgtaactgcagtaatttttagtgaagtcaagttttccactctctgtaactgtttctattagcctgcaggagagtaccaatttacgtggcaggatttattgagttgacactggctctgtttgttttgctgtcaggaaaagacgttgcatttgactgaccctatctttatccattttggttttgctgttgctttgaagtcaaagcctgagaatgcctctgggctgatgccaatgtccccagaagacagtgtaagcccttgttccctgtggctcacagtcagttctaaggctgaccataccgcaagcaggacttggtccttcacaaggcatgccagtggtcagcagagagaacagacacaagctttctcttctttctgaatgcaaccatcacctctcctggttacaaaattaaagcactgaagtgcagagactcattcctatcactttaacattgaagggaatcatatttaacttaattcacctgaccctaagaagtgtgtggtttgaaaagggcaaggcgctctaggggcactttggagcagaagtcatatctcgtttaatctaatacagtttgatctatgaactaagacgttttggagaacaacatggttatggtcaaatgatcaccagggacaaacagaaagagaagagagtcttctataccccatgctccaaaaacctaagagccttgggaagcactgtggaaacgatcattgtgtcaccagaaaataggaaatgacaggagttcgtgcctcctccagggtgagaggtgattatttggataatttctgaggcaatgttggtagcacaaggcaagatttgataaatattcagagggcagcaaggaagttttagagaaaataatatatattctacgtatagcctacagatattgatccagagaagggacatgcatgaaggcaagacaacagaagtgaagaaaggtagttagaaagtgggaggagaagagtcgattatggttcaatgtagaaaggcaagatgaagaactaggggagaatcctagaggaaggtggtaaggttgtgagcagccctccgaggggccacagagaaaacatgggatgaggttggcaccagccatttgcgtaggatcaaaagcttgtgcagctcacctggcgataaaccttaacactcgtgttaatcaaccactgtgtttgtgtacatgacactagtgtagttagttgtacgtatgttttgaactgtgtaagatccaagcagtgacacaatggtagggctaaaatgcagagacatgtgctattgggagattgaagcttaactttactgatgttagagaaaggctatttattgggttacaacaaatgattttacataaaacataatttttaagtattaagttgaaaagcccaaattgacccaattcatactttaactctgtttttcaaaagcctgaaatagcaattattgtgtgtgtgtgtatgtgtgtgtgtcctggatatttcctgtttgaaggtgtgtaaaaggtcttactacccagcccctagtggagagttctcttgcaaaaaacaaaaacggaaacaagaaaccaaacatgctttgagagatagagagtgagaaacagattttcagagtggagaatatgccttctatttatgcatttagcattgtgttttctcaagctacccagattttttaaaatttctccccgtttatgagttcaagctgataatatgtaaaagacagtgatgcccactgttttagggaagaccttccttcagagtatgctaacttagccatttcatttcttcaaatattagtatttggaaaagaaaaaacagtcttaaatatggttctgtcctccctcagcacccagagaaaagggaagtcaactacaggatataattctctcagaaataagaaaacctcttagctaataaaaatcatgcttaggctgctaaactcaatggatgtacttttgttattcctacaatgcttagcttgcaggtagaccaaaaatttgccttcattgtcattttaaaaatgactatccaacatattttgcagcatctgcctaatcccaatgacttatatttgttttgtaaatttgttctagggaaaataaacacacacccacacctttgtaataaatagggaagcactaatcatatgaaactagatagaaaaatgggttgggggcatttggtttggagcagcatggaagaattaaactcgacattaaataatttgcaaaatattttcaaaaatattttctcacacttacccaataagtaggaataaaaatctgcttcatcgccacagtgtacttcaggcgttcaaggagaaattgagtagagggaaatattgacatgtttccttccgaaccactacacctattttgaaatgcccattgggtacttttgctcctcttcggggtatctttttccttgtttgtgtgtgtgtgtgtgtgtgtgtggataaggggaggtgaaaggtgattagagacaagaattgaattaattatacatcataaacataacatgccatagcttgccagtctttaaaattgtatcacttcacttattctaacatactaaccactttatttttttatatgtgggaccacagtgtcctcacaccctcgactgcaatgtgtgtatccgtgcttaacacaaatttggatgtgtgggtgcataaacgtgcatgcacatacacacgaggtatagaacatttatttatttatttatttatttagagatggagtcgtgctctgtcgccaggctagaatgcagtggcgcgatctcggctcattgcaacctccgcctcccgggttcaagcaattctcctgtctcagcctcctgagtagctgggactacaggcgccaccatcacacctggctaatttttgtatttttagtggagatggggtttcaccatgttggccaggatggtctcaatctcctcacctcgtgatccacccgcttctgcctcccaaagtgctgggattacaggcgtgagccaccgcgcccggccagaacattctttaaaatgtccctagaagcaccgcgttcagtgtgcaaggtgcaagagtatagccaagcgcttttcaatttgggtaaagggcgctccatctggatcatccttgaggaacatcctcgtgttcatccatgctgtttccagtcctccccagcattccggctcctttcacacctgcatctttcagacgctcgctctttcctgccctccgtttcttctgcttaattgtgagatttgcttcccagcacaaatttttacttcaactctttcccctgttgcttatgagttttatggtgatttcattttataattttaagcagaaatcgcttatcatattttcttagataatttaattgagattttaaactttagttagattacagttacctacaatgccttgagaatatagtttttaaaagtggcacatatgctttatcccaatagtattctatctatgattaatatgcacacatctatcattgtattttgtataaactatattagtatgacatttagtttgtgtaaaaatatgcatgcatatttcatagatagcgtatgtatattacataagtgggaccctaactgcatctatatttagtgaaatgtcaggatcgcgatgctgcggtgaatagcatgagctttctttcatgtccatgttaggagaggcagcttcctcccatcaaaagcacagctggggcagaggagggggttgagagcaaggttttctatctatctaattgtggtgacttttaaagtttagttttatggctctgttgcctctgtcttcaaagtcaaatggagcagctgaagctctccccaccccagacccacctgcctggcctctcccatgcagcaagtttcgcttagctgttgcaatcctggttttacttggttttgtatttgctattttttaaagtgtttttaaactcatgtttcttcatagtaaagggtaactactgtggagtaaacagaagatgagcgtggtacaaattttggttaaaccaaaaactacacactggattgaaagcttggggaagggaggcaggtggaagggactgaaggaggtctcttcccaggagacttgttcaccggcatccagtattctcccccgcagttagggaaacagagggagcatgcagtttcaggcccaggcaggcctctctctgggcttggggcaatgccagggctgggggcgagcctgcagtcagccttgtgagtggcagccgaggctgttattttgaaaccctaagtggaaacaggcatggaaacccggaaggagcagggagccttaggcagtcctgggagatgaagccaacgccctacctccatgtggaaggaggcggcggaatgggcagggtcgggtctcacaggttcccccctctggagttggggtttcccggcccacgttcactctctggatgtgataggtccttcccggccgggaagggctggaaggggcgcgcaaggaggacgtggggacgagacgagagagacgcgtgcccagcaactccagaaggacggagaggagtgcagaagggagccggggaggacgcgggagggccgggaggggaagagaagccaggccgggcctggagcggaggagcggagcccgctggtgcgggtgtccacacaggggcgctggagcgcgccttcctgcggctgggcaggaggcaagcccgagagcgcgcggcgagtggagccatgtcgccctccctcgctctcggcgggcacagtgaggcgcaggctttggaaaagttgcgggcagccggagagccgagcctccgcctgcgttcatgataatgagaatggagtcgcggtcacagccgggctctctgcggggcgcatcgcccgcgaggggcgcctgggcctctgggcgtcctctgccgccccgcgacctttcctgccctcctccggagagaggcgaagggaaggggcggtttcggagggagctgggctgtggagggagggcggcctcttcaccagcgtcgtccgaccaccccgcgccctcctggtggctctcccacgccccattcgcaccccaggtcctcggggtgtctctggtgttgcttcaagttaggcaagaggagctgggggcgcggggagcccggcgccgcagcgcgtgcgtggctggggcgccccggggccggctgcaccttcagtcgccccctggccggcctgcctgcctcgacctccgcatccccttgcaccgtccgctcgcgtgctgcggggcactcgcagcactaccttcggtggggccgcagcaccctgagctcccgggactcccccaccgcccccgcacccacgacccgcgtggtcccagcccctccaccctcttcacgcaccctcgcacccttttgtgcgaccccgtgccctctccgggctgccaacccctgccacccaggtgccagtcccgggcgcggggaggaggccggtggggaagggggcggaggggccggggtggaggaggagctgcgcgaggggcctgggggcggggagcgaggagagcgctcggaatgtgtgccggtctctaggtggtgccaaattctggggcctaggcatttccctcgctttatgtttttggttttttttcttccttcaatctctttgattaggccgtacgtggctgtggcaaggagttggggaaaaaaattataaaaacaggaaagagagaaagcacagccagagccccggcttcgcgagccgccggggagggggcggaggaggctgagccaggcagagtcgccagcggagactcgcgagtggcgcgcgggaggagcggccgccggcgctgggcttgccttgctgctgctgctgctgctgcctccccaccgcctttttttttttttaatctggagcggggtggggagtgggaaccggagagaaagcaaaatattaaaaagccccaaagacagccagcaggagcgcggtgcccgatggcttcgctgtaccagaggttcactggcaagatcaacacctcgaggtccttccccgcgcccccggaggcgagtcacctcctgggcggccaggggcccgaggaggacggcggcgcaggagccaagcccctcggcccgcgggcgcaggcggcggcgccccgggagcgcggcggcggcggcggcggcgcgggtggccggccccggttccagtaccaggcgcggagcgatggtgacgaggaggacgtaagagcttctcgggggcggggggcggcggcgggttctccgggctgagcgcgcagcgagacgcgtcggcaggggaaattttttttggggggggaatcaggcgccctccccccgcccacgactctccgggcgcccccagacaggctccgtggcgccagatcgcggtcaccgcgtcccggagggagcgggtctgtgtctgcagccgcggcggccgggagttggtggctggagagagcggggtttgggtactgcgcctgctgggatctggaattcgccttacgttccctgggtgcgcggatgtctgtttttaacagcatgctgctatggttcctaaggagagaattcgatcggcctgtgcttacgagttggtttattttttatttatttcgtgctccgggaacacagcctcaggcaccttctctccctcccacctgtgtctggaatctctccatcgtgcccctcctctcctactcactctgtcccttgactcaaatgcctctccttcgttcctcttcttacttctcctagacactttttccccccagcggtggtgatggtgattatcctttccggaaaaaaaaaataccaaaatactggcatctgagccccaaccctctgtcccagggcccagctcttttgctgagagccctcaggccgtgtctgtctcccctcccagccctggactagcacctctgccttagaccgtgttcagtgaaaacttctccgagagcacatttcctactcttcatgggggctggaagcctgggtttcaaaggttggatttgcacatcgccctagtaaccaatgactcatgcaggacaggagccggaccttagatggatgcgtttaaccacctcctgtggatccctttcaaggatgcagagggctgctaggacttagaagggaggaaactgtgctttttctttgaggccttcttttcccagggaaaagagaaaaatccccgacaggctctcagagaaacaggtctggcttggctggtacagctcttataacagctaggctgtgttggtttgtagaaattactatgtatgcctttgaggagtttcacaactgctcaacctgggaaccgcaggggtcccaccggcctctcacttagtctaccctgacatacccagggcagtacattgccgggcactgagtaggtggttttggtcattacctctctgcagcctccagccacgctggttccctgtttcgtatttctttagtgcaagagttgtgtttgggtcgagggaggggtgagacattgagtgatttcccagggacaattcctaattgccagatactatgaaatcagtgaggttttgctgttgttattggtagtttttgttttatgaatgaaggatgtggaaactttaatggagatcacaaaactttgtgggagatgtggtttgcacacacacaggtacacaccccctacagccctgcgtcagattttgcatgaggttttgtgattttctcctgcatcgtttccagactcccctggttaaatagtcattcaaaggcatgtccctcactttggtgggccaagccctgagggaaatagacagatccttcagtcatctggttcaagtctttggcaaatggtttaattgggggagggtgaagagttctggaggattaaactaccgagaatcttggggaagacagttaagctgcaatgcaaacaggaaaaatgtactttttaccttaaatctgacttaaaattgttgaattgtggatgtttggaatgagaacaatgtgcagtttttttctcaacaggctctaggtgtcgctaggagaaaggaaaggcaagagctctgaattttatttcagatgatctccatctttttttaaaaaaatcttaacttggagtatacatgtccttctttttattgtgacatgtgtctagaaatgattctcagataaacacaggtgtcctgagaaacaaatcagggatataacatgtacatttgttaatggggttctaaacagcatctctaacttagatgtaagtcctgacatgctttttttttttttttctggaaaatacacaatgtgtgtgggtgggcgtgtattgtgtgtttatatagtgtactcccgatatatatatgcacacatatatacttgcccattatctgcacatatatatctggcacacatctgcaaaatgcattgcacatatgtcctttaaattgtataattaaactcatgacacaggctgaatgttgcatcctttaaaaacaacaacaaacttttatgcactcttcttagaaaagttcctcagaataggaaaagttatgcccccaaatttactaaaagatagatgaacatatcaaaccacttttcctccaggaacaaaagcttcaatttgcttaaagtgtattgaaaaacaaaaacaaaaaaagagattaggtagaaaaactgctttttaggtacagatacttgccaaggcaaggctgaagaatctagagtaatcattttgctacccaaatttaaagctgaggatatgcaatgaattaggaacacattgcattttattacgtgtcttgcaactgctgacaacctcaagacaaaccgaggctttccttttccacatctgcaagcagctgggagcgccgctacttcggtgggagctgtctgaggtgctgaaaccttctcttggcttagcgcaggagaaatctccatcactcttgccttttcagtcctgatcccaaggctggtggctttatcgctgttctctggcttgtcagggaagactgttccaaggtacagaaacagcttcgctgccttggtcactaagatgatggcaagcagcatacctttataatccttaggactttgtacctgttgtccttctgtctggaaattgagaaatatagttcttggcttctgtgcatgtgtgtacacctacatgcctgagcatgactgagaatgggcaattacccagccacaacccaaataaaatttatggtagtctaacaaggctaacacagagaaataaaatgcggagatagaatggctagaattaataatgcatggtctaaatgcacaaactacacaggcaacaaagggacttcccaactgtgtggctccacaggaaagcctgttttgggtgggtcagtactaacatgcaaagtctgacttcaaaatagaaataaaaccagagggtcttctctatccacttccttgtaaatcttagatttatttaaatataaagtcaattacttgggcaactcctctgaggaatcaatagcccttctgatttaaaattcattgtgtaggtttaaaaataagttgactcttaaaggaattgttgctggaagtgacttttagtggaatgtattaactttcatttggattaactgtggctaattttaaaatactgaactttgtcatccgcctgcttgaacatttctttttagttttttaaagggctttggaggccttctgtaccattagagcagtagtttttttaaggttatacagtgtgttcctgtatccttcattttcagtgacacgtggcttcttagcaatacaaatgtgatgacaacaggattttaaagcagcaaattggttaaaactgggatagatgggcaaatcaccacccatgatgtccaccagccttggaagggccaatttcatcatccgctatgtcttcggcaaccaacccatttttttcctccaccttggtttttcattggtataatgtcaacattctgttaatgtgtccttgggatctatcaactttacgatttcttaactagcttccctctacaaatatgtttttatactctattacttttcttctgtttcaactgtaatttaaaattttttaagtttcacatgattttcctgataaatgagaaaaagtctaaatctttcaactgtctatttgatcccattactctcatcaccaataggaccagtgcttggtgtactcacctacagaatagctatggatattgcaggagcatggagagttgcaatgttgccctctcttgatcccagtggcccctacaaagtgggagccatgaggccaggtactgagaagtgcccagtgaatacatgctgctgctgttactaataatattactgtttctaaaggatggccaccctgtttgagggccttggcagcaactgcccagctagtacaagaagcaaaaaagctgactcttgggcaaaacctgaacataaaggcctcccatttcgtggtggttgagagccagcccctcttccccctctggctcttgtgacccccatcacagggtggggagacaccccccgcgaggcggggactgagagccagcccctcttcccccactggcttaggacgcccatcggggatcctaagatccttaggacccacctggaggactgtgggtatgaggtgttcaagaagaaagctcaaatcttccgacggcaggtaccttgcgtgggatttacaatacgacaggggtccgaacgcagctcaggaacagaaagaaagcaggttatttgcaatctaccggagcttaagggcagaaggcaggtgagagaattcttaggagctgtggggttttgtaggctgtggatcccaaacgttgcagtattagccaagcctttgtatgaggtcacaaagggggcggggacccggaacctttgaaatggggatcccgacaacagcaagtctttcattagttataagaaaatcttctggcagccccagccctggggctacccgatctgacaaagccttttccattgtatgcgtcagagagagaaaagatggcagctggacttttaacccaaactgtggggccctggctgaggccggtagcctacgtctctaaacaactagacagggttgctaaagaatggcccccctatttgagggccttggcagcaactgccctgctagtacaagaagcaaataagctgattcttgggcaaaacctgaacataaaggccccccattttgtgatggctgagatccatcccctcttcccccctgactcttgggactcccattgcgggtggagggaggcatcccccatgaggcggggactcagagccaacccctcttcccccccctggctcttgggaccaccatcgcagggggggaggcaatccccgcgaggcggggactgcgaacctccccctttcctcccctggctctttgcacccccatcgcagggggggaggcacccctcgtgatgcggggactgagagcgagcccctcttcccccctttgctcttaggatccccatcgctgggggcggaggcaccccccgcgaggcagggactgagagccagtccctcttccccccctggctctgaggacccccatcgcaggagggggaggcaaccccgcgagggtggggactgagagctatcctctcttccgcacctggctgttggtacccccatcgtagggggggggaggcaccctccgcgaggcagggactgagagccaacccctggttcccccactggctcttaggacccccatcgcagaggggggacgcaccccccgcgaggcggggactgagagccagaccctcttccccccccagcttaggacccacatcgttgatcctaagatccttaggacccacctggaggactgcgggtggtaggtgtccaagtagaaagttcaaatcttccgacggcaggtaccttacgtgggattactgagagccagtccctcttcccccccggctctgaggaaccccatcacaggagggggaggcaccccccacgacagtggggactgagagctatcccctcttccgcccctggctgttagtacccccatcgcaggtggggaggcaccccctacgagagtggggactgagagctatcccctcttccgcccctggctgttagtacccccatcgcagggtgggggaggcacccccccgcgaggcagggactgagagccagcctctgttcccccactggctcttaggacccccatcgcagaggggggagggaccccccacgaggcggggactgagagccagtccctcttccccctctggctcttaggaaccccatcgcaggagggtgtggcaccccccacgagggtggggactgagagctatcccctcttccgcccctggctgttaatacccccatcgcagggtgggggaggcaccccccgcgaggtagggactgagagcctgcccctgttcccccactggctcttaggacacccatcgcagaggggggaggcaccccccttgaggcggggactgagagccagaccctcttccccccctggcttagggcccccatcgttgatcctaagatccttaggacccacctggaggactgtgggtattaggtgtccaagtagaaagatcaaatcttccgacggcaggtaccttacatgggatttacgatccgacgggtccgaacgcagctcgggaacagaaagaaagcaggttatttgcaatctaccggagcttaagggcagaaggcaggtgagagaattcttaggagctgtggggttttgtagactgtggatcccaaactgcagtatgagcaaagcctttgtatgaggtcacaaagggggcggggacccggaacttttgaaatggggatcccaacaacagcaagtttttcatgagttacaagaaaatcttctgacagccccagccctggggctacccgatctgacaaagccttttccattgtatgcgtcagagagagaaaagatggcagctggacttttaacccaaactgtggggccctggctgaggcccgtagcctacgtctctaaacaactagacagggttgctaaaggatggcccccctatttgacggccttggcagcaactgccctgctagtacaagaagcaaataagctcattcttgggcaaaacctgaacataaagggcccccattttgtgatggctgagatccatcccctcttcccccctggctgttgggacccgcatcgcgggaggggaggcaccccccgcgaggcggggactcagagccaacccctcttccccccctggctcttgggaccaccatcgcagggggggaggcaatcctcccgaggcgggactgcaaacctccacctttcctcccctggctctttgcacccccatcgcagggggggaggcacccctcacgacacggggactgagagcgagcccctcttcccccctttgctcttaggatccccatcgctgggggcggaggcaccccccgcgaggcagggactgagaggcaatccctcttccccccctggctcttaggacccccatcgcaggagggggaggcaccccccgcgaggcagggactgagagccagcccctggttcccccactggctcttaggacccccatcgcagaggggggaggcaccccccgcgaggcggggactgcgagccagaccctcttccccctctggcttaggacctccatcgttgatcctaagatccttaggacccacctggaggactgcgggtgttaggtgtccaagtagaaagttcaaatcttccgacggcaggtaccttacgtgggattactgagagccagtccctcttcccccccctggctctgaggacccccatcgcaggagggggaggcaccccccacgagagtggcgactgagagctatcccctcttccgcccctggctgttagtacccccatcgcagggggggaggcaccccccgcgaggcagggactgagagccagtccctcttccccccctggctcttaggacgcccatcacaggagggggacgcaccccccatgaggcagggactgagagccagcccctgttcccccactggctcttaggacccacatcacagagtggggaggcaccccccacgaggcggggactgagagccagaccctcttcccccactggcataggacccccatcgttgatgttaagatccttaggacccacctggaggactgtgggtattaggtgtccaagtagagagttcaaatcttctgacggcaggtaccttatgtgggatttacgatccgacgggtccgaacgcagctcgggaacagaaagaaagcaggttatttgcaatctaccggaaattaagggcagaaggcaggtgagagaattcttaggagctgtggggttttgtagactgtggatcccaaactgcagtattagccaagcctttgtatgaggtcacaaagggggcggggacccggaacttttgaaatggggatcccaacaacagcaagtttttcatgagttacaagaaaatcttctggcagccccagccctggggctacccgatctgacaaagccttttccattgtatgcgtcagagagagaaaagatggcagctggacttttaacccaaactgtggggccctggctgaggccggtagcctacatctctaaacaactagacagggttgctaaaggatggcccccctattagagggccttggcagcaactgccctgctagtacaagaagcaaataagctgattcttgggcaaaacctgaacataaaggccccccattttgtgatggctgagatccatcccctcttcccccctggctcttgggactcccatcacaggggggggaggcacccgctgcgaggcggggactcagagccaacccctcttccccccctggctcttgggaccaccatcgcagggggggaggcaatccccgcgaggcggggactgcgaacctccccctttcctcccctggctctttgcacccccatcgcagggagggaggcacccctcgcgacgcggggactgagagcgagcccctcttcccccctttgctcttaggatccccatcgctgggggcggaggcaccccccgcgaggcagggactgagaggcaatccctcttccccccctggctctgaggacccccatcgcaggagggggaggcaaccctgcgagggtggggactgagagctatcccctcttccgcccctggctgttggtacccccatcgcagggggggggaggcaccccccgcgaggcagggactgacagccagcccctggttcccccactggctcttaggacccccatcgcagaggggggacgcaccccccgcgaggcggggactgagagccagaccctcatcccccaccggcttaggacccacatcgttgatcctaagatccttaggacccacctggaggactgcgggtgttaggtgtccaagtagaaagttcaaatcttctgacggcaggtaccttacgtgggattactgagagccagtccctcttcccccccggctctgaggacccccatcgcaggagggggaggcaccccccgcgagggtggggactgagagctatcccctcttccgcccctggcttttggtacccccatcgcaggggggggaggcaccctccgctaggcagggactgagagccaacccctggttcccccactggctcttaggacccccatcgcaggagggggaggcaccccccgcgagggtggggactgagagctatcccctcttccgcccctggcttttggtacccccatcgcaggggggggaggcaccctccgctaggcagggactgagagccaacccctggttcccccactggctcttaggacccccatcgcaggagggggaggcaccccccgcgagggtggggactgagagctatcctctcttccgcacctggctgttggtacccccatcgtagggggggggaggcaccctccgcgaggcagggactgagagccaacccctggttcccccactggctcttaggacccccatcgcagaggggggaggcaccccccgcgaggcggggactgcgagccagaccctcttcctcccccagcttaggacccccatcgttgatcctaagatccttaggacccacctggaggactgtgggtgttagttgtccaggtagaaatttcaaatcttccgacggcaggtaccttacgtggaattactgagagccagtccctcttccccccctggctctgaggaaccccatcacaggagggggaggcaccccccacgagagtggggactgagagctatcccctcttccgcccctggctgttagtacccccatcgcagggggggaggcaccccccacgagagtggggactgagagctatccccttttccgcccctggctgttagtacccccatcgcagggttggggaggcacccccccgcgaggcagggactgagagccagcccctattcccccactggctcttaggacccccatcgcagaggggggagggaccccccatgaggcggggactgagagccagtccctcttctccctctggctcttaggaaccccattgcaggagggtgtggcaccccccacgagggtggggactgagagctatcccctcttccgcccctggctgttggtacccccatcgcaagggggggaggcacctcccgcgaggcagggactgagagccattccctcttccccccctggctcttaagacccccatcgcaggagggggaggcaccccccgcgagggtggggactgagagctatcccctcttccgcctctggctgatagtacccccatcgcagtgagggaggcaccccccacgaggcagggactgagagccactccctcttccccctctggcgcttaggacccccatcccagcggggggaggcacctcccgtgaggtggggactgagagccagcccctcttcccccccggcttaggacccccgtcgtggatcctcagatccttaggacccacctggaggactgtggatattaggtgtcctagaagaaagttcaaatcttccgacggcaagtgcatgatagtctgcatgaaaccctaataaaaaagacagtgaaggagaatcatgtcaggagctgatactcctgagtctcgggaagcctccagggacagagcacagctagagcatccaagaatgagaagagccctagagcaaacgcaaagcccaggaagagataattggtttgagaagaaaagggtccaggagttattgcaacccagctagcaagcagagtcctgggctgatcagagtggggaaaagccactgagttgttcaatggtaggacaaacagagccctgctgcagggaggggacactcatctaccctgtacccccatacacctctgtcccgctccccgttcaggctgacaatgtgctcaccacacagcagcacctcctggtcttgattgttggggccctcgcaatcattgcactggcccgtcctgccatctgaccagagctcttccctgctacactcttctgtgagtctccagcaggaccttttgcacatcagcaagctgggcagcgtcaagtgcctggaatccaccccatgccttcccacctctggacatttgctcatggttcaattcatggccattgaacttgtcttggtcagttttctttcagctctcagtgatagacacattccacaatgacctacagagaaaaaaaaggctcaaattgtatagcaaaccactacctctactaaagtaacctattgttctttagaactgaagaccagaggctgtgggacttcagtcttatctgggatgtggtgctgacatgatgttcccaaaactctttctatctgtgtccctaactctcagatttacttttctctgtgggtgttaatctcaagcagatagcaaaggtagtttctgctctaagctcatgaagttttacagttcctaacgagagaggaagacagaggcatgctctctcccagggtctacatgtgaaatctcattcagggtttctggttgatccagcactggtcacatggcccagccacttggagtcagttgtgttgtcagagcctgcaccgcaagcgcgttgcacagacaggaacaggactggccagggagggaatctccattaggacaaagtggttctgcagaccttgcagcgtctcctcctcaaatgccttttccttacaagagcttcctctcaaaatgcacccctcctttcaggtcccattctaatgctgtcacctccaaagcagcaacctcatctacctgtctcaactccctaaatgggtgactgttcctgcatctgaatttccatagcattatcatgacacaccatcctcaccattgtcactatcttacctgtaatcatagctgcttgtgatgagcagcagctggaaggacagacatcactgccacttaaaccagctccaacaaggcagagatgaaatagaccggaagaaggggcaaggctgtgagggccctgggagcaagcagggacacctcccatcactctttgagggccctgggagcaagcagggacacctcccatcactctttgagggccctgggagcaagcagggacacctcccatcactggctgccatacagggtgaaaacaatacagcctgagtgcccacattccattccagcattccccccagtaagaacaaaacaggaagggcccaaggaaaacacaaccagcagtgaagtggagctctgtcctctttgctgtcctcactggccgggtgcacaggccaggccctactgaatactactacctaagcagttacaccatggccttagtacccccgcccccgagagcagaaattgtaagcaaattgtccatcaaggtataatggcaaaaggcacaaattaggaccaggccaatggtataaatacacctgcctgtcacccagcccctagagctccttggagaagcctgagtcctgtgttccacggacatcagtggcatagaggccctgagttggactcaggttttcctcagggactgggttttcctcagggaatggggcaagttcctgggggccaaggatgtcttctgactggcctgcatgagggcttcaggaggtgagttgttttatcctcctaagaagccgccttggtatcccactggccttaagcagtcccagaatacccataatttttcctgttggagaccctcacattcttctaagcctcaccttcatacttctgtgactactgaaatatcagccacggctaggttcagatttgtttttttttttttttacttttttttttttaatttgggacagagtctctctctgttacccaggctggagtgcagtgatacaaactcagctcactgtaacctctgcctctcaggttcaagtgattctcctgcctcagcctcctgagtagctgggattacaggcacacaccagcatgcctggctaatttttgtattcttagtagagatggggtttcactatgttggccaggctggtgttgaactcctggcctcaggtgatctgcctgccttggcctcccaaagtgttgggattataggtgtgagtcactgtgcccagcctcagatttttttacaatgatgccacattgcaattaaatggacttgtccctactgaacagagccctctgctgttgtgccctggagccaggttaacacgcatgtgctctatgccacgaagaacacccaccaagctgaggggccctgcaggcattcacatgggaaactgccattgcgaatggagtgagtgaggcagcttaagtggtgggaggggtgcatgggaaggggctcctgagcaggaccttcaagggtgctagagtttggcagagacaagagtaggagcgaagaaagtgagagtctcatgtaaaagggcaaggtcaccttcctgaacagggaagataaatcatagtggatattgtacaataaagattttattcattcatctatgacaaacttttactcgataccaaccatggcctgatgcaaggctgacaccatgggatacagaaatgcttttgagtgtcagtctggggagagacaggcatgtgagcaaataaatgagctgggtctgtcccatgaagagtctagaatagtgcagttggttagcactctctggtgacagaaaggctgtctatctataccatccaatccaatagccacttgccccatatggctgttgagtgcttggaatgaggcctgtgagattgaggaactcaattttaaattttatttaaccttcatctattttaaatttaaatagccagccacatggggctagtggctaccatattgggcagcacagggctggaggcacatggtaagaaatttatatccaataactaataggaagacacattgattagtttttttaaacctatatattaatcgtttcacaagtactagggcttcaatacatggtactgcataaataaagcagtccttgccttcaagtcaaacacatcaccttatcttattgttatctgagaaaatgcaaaggagcccatgggagcgagaggagggacacttcattcagcttcaagggtgtcagggagagttttctgggagattcgatgattaggatgattcttgaagagttaatgggagataaccttgagaaggaggagaaagctatctcaggtggaggcaacaaccccatggttatcagagaagcagcagcatcagggagaggtcagagtattcagggaggtatgtgggcctggagactcgtgcatgtggggcaaagccattcagaatgaccctcggagatgggcagggcaccatggggcttttgcatggggctcaggcctcagatgactttttttaaggtcatggggagtcatttgaaaattggaagcagacacgtgagatttctgtttttctgcttccatttcagtattttccaaaaagcagtaatgttgctggaaagaaggagagcagtgtaagagtttttgtttgttttattggttgcagtgagatctggctctgccacccaggctgcagtgtagtggtatgatcatagctcactgcaacctcgaactcctgggctcaagcgatcttcctgcctcagcctgtcaagtgcatgccaccacacccactcaaggtttttttttgttttttttttgtttgtttgtttgtttgtttttttgataaagattgagtcttcctatgttgcccagcctggtctcaaactcctgggctcaagcagtcctcccacctcggtctcccaaagtactgggattacaggcatgagtcaccgtgcctggcaagagactcgtttgaagttgaatgaaacgaacagaatttggcaatggcttagttgggaaaggagaggttagcagggaaggggcagctgcagcatgtccttaggggtgtcaacatttgtgctgaacacaggccactgtgggaggaggcatcggcttgacacagcaatcctgtggtggaggtgtttgtattttgaggttattattctattgttgattcttggagtaataagaattgagagattacccagaagcaatgggcagtgtaataagaggagagggctggagaacaagctgggtgactcccatgtttacaggcttctggcctcagggaaggcctggaaaaaaggatgggaagaagatgctgttagaatccaggagaaagctacctctaagaaagcaaaaaaggcaggctcatagcagacaagtaacctgaattgggaaagggcccagtggccccggccttggagggcagctggtgtctgcagggagggtggctttggcaggagcacaggtgtggttgaggctgaggtgaccaaagtcggattaacacgaacccgaggcacgtagcacagggggatgagtgtgggggtttcttccgggctgctgcacaggccctcctcttcccagacagcagctgctgagtgtcaggtggggggataaaggccagaagcagagatgccgctaagcccacaaacaggtgcccacgggatcagcctcggcgcccgggcgggtcttaggtctgaaggacacttggagactagatgttaactgttggaaatttagtaaactgggccaccagaggcttaattcactgctttaaagtctgatgattggaaattaacctatgagaattgtcagattacattgaggtttgatctcccgtgcacttacacaaatgcacacagacacagacacagacacaggcatgcacacacctcttttatgagacagataaaaacccagccacaaagatgtcaatgccacacatctaagagcctgtcccataagtaatgcacagggctccagcccccgtgggaggaagataattggactgtaaaatagtgaagggcacggctgggtcaagagagagtcccctaaaaccaaattccagatgatttccatattctgaatggaaagcctgcataatcattatttttaaaacatatcgacttagaaataaaatatagaagtcaaaaaatcaattaagaggactaattcaatgaagagtgttttctggtggctatttttctttttattaaagtttttaatttttttattttttgggcacctagtatatatttatggggtacataagatgttttgatacaagcatgctctagtgactacttttcaagagttaaactgtggactccagagtctgaaaataaagtataatttttgagaatgttcaaattatagttttaaaagtctttggcccattatttatattttttattcttatttggaattaagcacagtattttgttttttcaaaaatttaaacctgactgagagctaggttgtcatggaccattggttatttatcttcttttgatgatacttcatttaataacaaatcagtgttcctgtgtctgatagagttagatgaattaatcaagtcagtgtttattcctccttcaagtggcatcttcttaaaggtagctttgcaaaatgcccaattatttggacaacttaaaaaaagaactatggggccgtgcgcagtggctcacgtccctaatcccagcactttgggaggccgaggcgggcggatcacgaggttaggagatttcaggccatcttggctaacacagtgaaaccccgtctctactaaaaatgcgaaaaattagccgggtgtgatggtgggcgcctgtagtcccagctactcgggaggctgaggcaggagaatggcgtgaacccgggaggcggagtttgcagtgagccgagattgtgccactgcactccagtctgggcaatagagcgagactccgtctcaaaacaaaacacaacagtttctcatatgcaatgatccccacaccgaggtatcaggtaattgtggactgtgccgttcactgtgtactatcaggaatttaggtaaggcagcaaaagagaagaaagtttccctagagctccataccgaggtatcaggtaattgtggactgtgtcgttcactgtgtacagagattggcagggtgtgagtggcagaaagagcttcttaggcagtcagaccacctggctctgaatcctggctcggtcacaaattaattatatggaagaaaaccttaagcctcggtttgattttctcctttaaaaagtgagacaaataaatgcatttatttctcagaagatagttgtgatgcatctattattttatgacatttttgttcatttttaaaaggtcctgacaaattttaagtgttttatgtgatcagttagatgacatgctaataggcaaaaggcttgcctctaatatacatgctgtcaaattttccatcagcttctatatttgcttctctaagatttttttttcctgaatgacataattaattaatgaggtcatgcaaaattcttaaggaaaatagctaagtcagtttccttcattaaaatccactgtaaacaaagacggccctctgtttaatgcttagtttaacagaaaatttaaattagcacagataattcttcacatcatttggttaattgaaggtatgggaaactgtatttgtagtgttcactcaaaccattcccaataagtgaattacccatgggccaaactctggaaattgccagatgaactgtattatataaagatagtatggcatgaatagctgttctttcatattgcctttaatccatcctctttgaaataatagaggcctgagatacatcagtgttattgagcaggaacgcttgaatataaaaccaatcaagacaacatatagtatgaaatagtagcttatcatgtatgtgcatgcatgctattttatttgttttttgctgataaaggtggaatgatgttatgatgaatttcaccatgaaagactgaaatagagcaaacaaaacgtctcaatcagggtttgccagggttattcctaatgagttattcatactggttgtatttttttgaccattgggatttatttatctgagggctgctggaaaaaggagaaagggaagctacgtcatttgccttctgtgtgccaggcattttctctttctttatccctggaataaccttgtgtgggaggtttcattattctcattttacaaatatggaaactagcttagatgaagagagatggagtgaccctccgaaggccttgcagtcagcaagagttcgaagcggggtgagaattcacgtgtttctgatttctaaagccgtattccttccactgccctggttcacatgttagaatgtcacatctttatccttcagacatagtagctcagtctgcatcagactaagatggggaaaaacttgattcctggaaatttccaaacatacggaaaagtggagggaattaggcgataagccagttgtacccatgacccagctgtataattatcaaggcttcggcaatctcgtttcatccatttcactaccactatgatttgaaacaaatgccagatatcatttttctccgctaaaaacattttattatgttggatcctgtttgtgcccgtattttatactaagccttcacataagttatgttctaggatgtcttcaaatgagagtaaaagaggacaccgttgtcttactgctggggaaaagagagggggctttcttctttcttcaacttccctctgtgatacaagggaaaaatgcagctaaattagtctaaaatctcgatcccttgaaaacagaaaaatcaacagttttaagcaaacaaatacaatccccctagtagctaatcattttcatccacgtgcctggtacacatgctaatgttggagggaaaaaaacagggtgatgtgctttttgagtgtggacaccagagggcagagtgtactgattagagtttcctggcattgcaaaagtgcagtgcggcttggggaggaaaagcagtaggctatgaaacattattccttatgtcaatagaaggaaattattacataagggaaaactggcaagatggaagagcttatatccgcttgcagttctgttcattccccctaaactccatatattatttcaggattttcatgagaaaggctcttctttgaagaatcaattgcttatccatggtgttagtttatatgtttgtatcatgataaacatcctatccagaggtgtgaccttccagaccttgctaacagcatgctgctgctttgcaaagctgcctgcgctttgctgctcacctaaaggaggacttctcaataatagacaggatttgattcctttttgtcatgagaaagctccctgattgtgcatttgtaatgcatgaattgcacagatctccctgctgagaggcttacatcacagagttggctcactgtttccagtatcattcttccagcccaacagtaagcactggcagagagcaggtagctgcctaccctgatattacgggacgtcaataggctcttgcacgcaagtgtggtgtttttcattgcacaccaagggttattaggctgtgctgagtcagatggaaataaaaatagcctggaacctgtgcccgtttgtttgggggacttgtcccagcaccatgctaatgagcccaagggcttgggcttgatgtccctggtggttccatcagagcaacatgaaggaaagcaactgtcggaagccacaggccctcacttaatgtggtttgcagagtggtaagtgatggctcttcccacgggtatggttgtctggcacagagagagccgggggacccacacgctcacgcagttcctgccagcaactgtgagacatgacgactgtgacttagcagaatccagggttcatccaccctcctgtgagtcctcctgctccccgttttgctgccatctcgggccaatatctgcaggtgcagagaccctggagtagctgcacctcagcctcatgtcctctgtggtcccttaattgcccaaaagaaagaatttaaatgtaaagtcgctctgtgcagcgagcatgttccttcgtgccctgggcggcctctctgacagccctgactctggtctgtgacgctgggattgtggctgctttcaggcaccgtcatggccttccatggtcctctgtctgcctttgtctccttccttctgtttaggatgccctttagtgggggaactcctggtccgccttcttctctaaatctgtgctctctaccaaggattttccaagcctgcgcttcctcctgtcgtctcctttgctcctctccgtggctctggctcctgttccgcagcccctggacctatatctgtgatcacacttagtgttttatacatcagttattcacttaagtgtcggccgtgcccaccagcccagaagactcaaggacgagtacttttctatacttacctttacacaagatagggtctcagtactcatcgcgattaatacatgaatgaacttcagcaaaataattgcaatgtgtaaaggccaagatccagaataaaacctttcatttcttagctaaaaatctccccacatccattagttttacatccttggcattaaagatcctaaggagaaattggtattcctgtctggaaaaacttgctgttacttaatgtatttgaaagtaagttatttttaaataaatatgaaaccccatctctactaaaaatacaaaaaattagctgggtctagtgatgggtgcctgtaatcccagctactcgggaggctgaggcaggagaattgcttgaacctgggaggaggaggttgcagtgagctgagattgtgccactgcactccagcctgggcaacaagagtgaaactctgtctctaaaatatatatctatgtatgtatgtatgtatgtatgtatgtatgtatgtatgtaagtatctatctatatatctccatatatacatatagagagagatatatagagatctatatagagatagagagatatatatagatatctatatatatctctctatatatgtatatagatatgtagctatatatagagagaaagagacctggagaacatatatactcaacaggtgcatgtcataaccttcggggaaatagggtgggaaggatgaagatgatattttatgtgatctgtactgtgtgagttgtgagtttctgcatatattaattagtaaaataggtaggagcaaatattatgaaagcattaaaacaccaagactaaccaagacaatcatgaagaggaacatttctgtctaactagatggcaacttattataaagtcttagtaattctgatgactataccccacatggatgcagagacagaataagtaaatcagtggaccaaacagaaacaattggtcatatttacacagttcttgttaccagctgggctgttttaaacaactttccaatataaattcatttaatctttgcagctgtccatgaagtaacgtttataggtctccatttaatgctttaagaaaatagaaaaagaaaggttaaattgctgaaagagtcacataagaggaattggcataagagacacaccggctactccctgggtgtgaagctttatagccacagcagggaggggagtgtcaagaaccagggcagggaggataaagaccccgctgagagttccagctcagtttatgattggtatatgcctttcataagcaagtcactattttcttgaaaagaaatggaaatcaagagatgcatgtgttgtcaaagcgggagaaaatatttgcaaactatgtatctgacacagtactactatccagaatgtacaaggaactcaaacaaatcagcaagaaaaaaacaaataatcccatcaaaaagtgggctaaggacatgaatagaaaattttaaaaagaaggtatacaaatggccaacaaacatatgaaaaaatgctcaacctcagtaatgatcagggaaatgcaaattaaaaccacaatgcaataccaccttcctcctgcacaaatggccataattaaaaaatcaaaaaataatagatgttggcatggatatggtgaaaagggagcacttctacactgcttgtaggaatgtaaactagtataaccactatggaaaacagtgtggagattccttaaagaactaaaagtagatctaccatttgatccagccaccccactactgtgtatctatctacccagcagaagataagtcattatatgaaaaagacacttgcacgcacgcctatagcagtacaactcacaattgcaaaaatatggaaccagcctaaatgttcatcaaccaaggagtagagaaagaaaatgtggtatatatacaccatggaatactactcagccataagaaatgaatgaaataatggcattcacagcaacctggacagagttggagaccattattctaagtgaagtaactcaagaatggaaaaccaagtatcgtatgttctcgcttttaagtgggagctcagctatgagggtgcaaaggcataagaatgatataatggactttggggactcggggggaaggctgggagggggatgaaggataaaagattacacatggggtacagtgtatactgcacaggtgatgggtgaaccgacacctcagaaatcaccactaaagaacttacccatgtaaccccaaaccacctgttcctcaaaaactattgaaataaacataaaataaatttttaaaaaagagatacatgtgttgaaatagacaataactctcaactgtaccagaacctacacctccttattttggcaaattattttaatgctcctttcctaatttaaattaaattcataggtgataaaatgtatatgcatataccactttaaaagtttcaatatataggctaaataaaggaatgaacttataatccagttatctgtccttcagcgtgtcactgctcaggtcctgcttgccaggtggtctgcagctagggcactgacatctgtgatgaagtcagaagcttcttcctatgtgtaaagagtaaaactgggtttaaaatatttttttttaaaaaaaaggctgggcgcagtgcctcacacctataatcccagcgctttgggaggccaaggcaggtggatcgcctgaggtcaggagttcaagaccagcctcgccaaaacggtgaacccctgtccctactaaaaatacaaaaattagccatgcacagtggcgggtgcctgtaatcccagctactcgggaggctgaggcaggagaatctcttgaacctgggaggcggaggttgcagtgagccgagattgtggcaatgcactccagcctgggtgacgagggcaaaactccataacaaaaataaataataaatttttaaaaagcagaccagaaatagttccatataaaaaatataggaaaagggaagagcagataatacagaagaaccttagaataaagcctgagattaagtaataatagattagttttattttgaaaatgaaaagaaaatggggacacactccatttgaaatacaggatgcgtaccaaggtggatcacagattgagaggagaaaatgtgtgagattctccactgatagccaggtgtggcttcttctttttaagcatggcgtgaaacaaattatgacatggatgatgagggcatgaagtgtccctgggatcctaccacctgacaaggtgtaccctcagtctccaatgcttaataaatgccttgtaaactgtaacctctgatacttaatgaggaatacagcgctttgaaacagaaaccgaaataggtctctagagaagttgtatgataagatcctgggggcagtgtcagaaaaggaccgaaaaaccacagattcctccctccaggaaataatttcaatacttaaagtttaccatgtagatttcttgttctggtgctataattgtgaagcatataggaaacactataaaatgttttaaaacaatacttttgataaactttattaagacctctatgtttcatgtgtttgcactaaaaataatgtttgcttctaagaatgttcctatttgactaaggtgatttaaaatgcctttgcattgttgcactgtttgtgtagtgattgtaactctgtactaaagccaattaactttgtagttggatgggttataaaatactcactagacacagtactccatagacaccatattcaataatagacacaatgtgtagaatgaagaagccagcgtccacctctgcaacgagcttgtcctgaatccctggaccctttatttttcatcccataaaaactttcagtatcattatgtactgaagtactccttatttatagttctgtggatttattccaacgagtctgttgaaaactgggatgtggggcacctacacttctcaccgtgcaggatctctacccattgcagggtgtccagccccctggcctctaccccaaatgccagtgaagtctaggattcattgtgacaactgaaaaactctcctcatttcaaaaatgcttcctaggaggtagaatggccctgttgagaaccttaaatagattatagattttatttattattattattatttttttttttttgagacagagtctcactctgtcaccaggctagagtgcagtggtgtgatctgagctcactgcaacctccgcctcccgggttcaagcaattctcctgcctcagcctctcgagtagctgagactacaggcacgcatcaccatgcccagctaatttttgtatttttagtagagatggggtttcaccttgttggccaggatggtctcgatctcttgacctcatgatctgccctcctcggcctcccaaagtgtcgggattacaggcatgagctactgctcccggccaatagattatagatataatttttctgttattatttctttcacaaaaccctggctgtacaagtatcctctgtaaacttagatatttccgacagtgtgtctacttccttccttcatgatctcaactctctgtaaattacatgtgaatgcattcaggactgtattttatatatcatctctttcatgttttgatttgctttttccaagcagacattaagtgtgctgaaggtagttgtgttgtcatctgctttcattgaatccttcagaaattttagcaccacaatgagattctgaaaaaagcacagaaaaggggcttaatatagaatgtttaaagaatatttgttttctcaatttatattacgactttcaaacttcagtgcatatgtacacacacacacacacacacacacacacacacacacaccattttaaggcattgctagactcacatatatctttcaccttgaagatgaagcaagattccaaaatgtcagaaaatcttgaaagtgtcttagatacgagcaatatggggagagagccagcaactgagttattcccaagctcatttagtgacaaagttgtgggttggttaggcttgttagagctcaacaaagcacttagtgaaggaaatatgaaaattagaaaccactgtaggatataaattaagactatttggaggctagaaagatttggggattttttttgttgttgttaaaatatctagccaactcctgaaaaataatgagtggttgccatagcaactgtgttttcgcttgacacacgaaagaacatgaaaagcattggaatcaaggaaagccacctggttttagactttaattttggagaaacaaattcatccaaaatgatttataaaacaaaccctattttattttccttccaaaatgattgtagattttttaaatttttttaaattcaaaacattgagggtatctcaaaggaagtgaaaatacattcttttccaaaaaaaaaaaaaaaaaaaaaaaatacctgggccgggtgtggtggctcacgcctgtaatcctagcactttgggaggccgaggtgggtgtatcacgcggtcaggagatggagaccatcctggccaacatggtgaaaccctgtctctactaaaaatacaaaaattagccaggctttgtggtgcatgcccacagtgagctgagatcgcaccactgtactccatcctgggggacagagctagactccatctcaaaaacgaaagtgcctggtcgtctttccacacaactccgtttccactcccataaaatgctacgttagctgttttgagggtagatgcccttagactgccaactcacaaagttttattgggcacctgttacctgttcagcagagatttgtaaaaaaagacacatcaggtggcctttgcttgcaagaaatcagcctttggaacctgtggagaaaagttaagtactgcgtactgcgcaaatgaagggtgggagctattgaagggaagagactcaccccgaaaacccaagaatggtcaaacgagaggcaaggtggagcctgcagttttcactggaaggattctagagtgagtgattctggggacctagagatgggggataacgggtgaaaggaacaagcacggcccctttgaggtggaaaacagactggtgggccagggttgggagggtgtgctggggaagtgttgtgggcagaggctggaaaatgaaattgggctggggttaggagacaggtgaccgtggaagactgctctgacaatcagagtctggactttgctcctctgcaggatccctgatgcccagatggacccttcgatgttcctggcccacctgcgctacctattcttgccccgctctgctctagtatttacaactgcacgatggcacagttggtctctgggacttagaatttgtgttgcaaacacaagacctggagaatggacctggtctgtgatatagtgtgtcagtcagggacctggagaaacagaaggggatcccaaataagaagacttgaaggaagtttaagaaaggcaccaaatacaatttgaaacttgtgggctgggaagccacacgagatagcgcaggctgggggatgtgcaggagctgtcatcagaagccggaagtggaacatgttatgaaaaaggtcacttttcataacactttgcatggagaaggagtacaagggaagtcaagaggacccacagtgggaagtgggctgtgaatactctgatcctacctcatttactgccagtgcatcccttggcctaagtgaagtaggagcttgggagaagattggccgttgactctaatcctgctcccaggttcctacttaatcagcatccaagatcaaggtgtggagttgacagtgacatctcggacttcaatccaccatgttgacttctgattaaccccagtcctgggaatacctccaagaattctactttatttacttctcttatgtaagaatgtttaactcaccatggatcctgcccttagaccaaagcgaccttgatgttattgcacaaattacaggctatgacacatataccattcctgcctgtgctagaggattgcctttaattgcttgctggagcacatatgcttttccctatggtagataagccttgggtctgggagtaagagtgcagagatctacctgtcttggtgccacccaaggtcatacctccgtctgtaagttcccctttcatggaacacaaggtaaacctcacaaagtataaggcagatcttttcccatttcctgcatgtcttctcaatacctgtgattgaaacatgcagtggaaatatccatgcccgtcttgatggatgaagctaactggctggtaggtcgaagccagttcgaggaacaggctaggaggtctgcatggaacctgggattggccatcccctcatgagggctctaatgggaagatgatgccttgggtgtgcctggatgctgagaaaacatgagatgtgtattaccttctgctctctgtatgtaaaacagctgaagctaaatcccttgagatgtttctacatccatctatacctagatcttggaaattttgcaaataagcagttgtcagaattttgagctatggcttagggtattaaaaaatagaaagacaagggaagagggtgttgatggaggcttgagccacttagcatgacctagcccctgatcagctgtggttagtccaaatgagccagtatgctggggcagagagcaggatggagtagcaaaggccctgtagtgaggccctctgtgggggatgagtgtgcttggtagcagtttgaagcattgtgcctctctttcctatgcactgtgatcagtgcacaggaatgtagaaagggccaagcctttcaacaccttagactctgatgcctccagggtggattcactgtgccatggaaaaccacataacatcatcctattagcgtacttttgagagtagatgtgctattaatgatgctaaaacaacagacatacactaccagaatgctcctagcaaaatgaggacatgtagtcaccctttcctctgctccctccccaccacctgtgccattagaagctggaggagggagcggtcactgtggcatggagtaggctgggcaatgaaggcttctaggaaaggcgggccttggttcatgatccgtggtgggattcatgtgggtaggagagaaaatcaagggacgtcaagagcgtggtaatagcttgttactacctggggagaaacatatctgctagagttgccatttagagacatgtcaaaacctccagaaagtgtgtttcaatgccaagtgctaattgtaaaagggaacgtgtctttctgcagttctagtttgttatagaaagggacagctcttgacgttagcaaataaggttgtatgttatggatcctgtggcaactgagtgtatgtgacggaaaatggatgtttactttaaggtcattactgaagactttctggagccacctctttcttggggacgtctccctactgattcatattagaaatcaacttgagtgacctttctcttcaaaacatcagagactgccttggactgtgtggtctgcttggaggacttcaaccctcttagaaccttactctgcatgtgaacacagcagcacaggggcagcgggttccatcgtctacgggagatggtgctcaagggttggagccagtccccctagagagtcacatagcatttggccctcgaccatggctgaataaatgaatgaataaaccttatttaatatatactttcacctgcctgagttgtagaactctgcagaagtccttttatatctcttctacattcatcttcagagccattgtatcataggggttgttttgttattctccatacatcctaatttatagaggagaaaacgaaatccagggaaagctggaaaattgatccagggtcaaacactgaacttatggagaggatggagaggaaagcgtggcttttggagtaatactgctgagagtcaaatcccagttattgcagtgaggagtagcaagaagtcacctaatttcaacaacacaatcatttcaggaatggaaagaacacccccagttccattaaacgacatgaagtacagaaagtcctggctcacagaaggggcccactaagcattagttgccattcctttcttaggtaaccaccgcctgtggaccctcaccccttcctccactgtcagaggcagcataatggctcagtttgcatttcaaggctgatagaatcaagtttgctaatgctggtcctgctgccacctagaactcccttaatgaaagtcagcctccacaaaccttgaggagtattaaaggacagagccctgtgaaggatggtgctgtgtgtgcctatcttttctttttcttttttttttttttttttttgagatggagtctcactctgtcacccaggctggagtgcagtggtgtgatctcagctcactgcaagctctgtcttctgggttcacaccattctcctgcctcagcctcccaagtagctgggactgcaggcgcccgccaccatgcccggctaattttttgtattttttagtagagacggggtttcgctgtgttagccaggatggtctcgatctcctgacctcgtgatccgcccacctcgacctcccaaagtgctgggattacaggcgtgagccaccgtgcctggcctgtgcctatcgtttaactgactagttggattagtgaggagtcggttagttgttgtgcttctttgcagtgcactgggctgctacatggacctgattttgactacctgttctaagggatgaggaagccctccttgcagaagcccatggaagccctccttgcagaagaaatatcccagccactcaggttggcagactctgtgcagaatacccagtgtctttcctcctcttatttatctctcttcaggtaccaggaagtgaaagaggcctatatacatggaagttctgaaggagaatagcgttgccatcctccctacccacctctgagtctctggttcctggtcacccaagcctccatcatgccctcttcccttctcttccttttattttttaataccctaagccacagctcaaaatgctgagcaccacttctcttcagcatgactgaggtctaggtatagatgggtatggggacagctctagggacttagcttcagctgtttcaaataaaggaaaaagcagagaacagggatctcatgttttctcaccagccatgcatgcccaaggcatcttcctatgagagccctgaggagggaacggccaatcccaggttccatgcagtgcctccagcctgttcctgggacaggctccaatctcttggtgcagttagcttcatgcattaagacaggcatggatatttccatgttcttcctgaatcacaggtattgagaggaagtgtgggaaatgggagaacagctgccttatgaatcatgaggttcacctaaaccttgggggctagaattgagatggagcagtgttctgaggggtcccaagaagcctagtataactcataagatgcttgggagtttaaatatgcttttctgtgcagagtctaccatctaagtctctctggtttgaagttggagaaactgaatttgtcattcagctagaaaacatactggaggagagattttaactcatgcctcagaacaaagctcagggctttctgaagcaccagagggtgccaaaggagtcagagcttgggttctgcccattgagaagaatgaagagggatgctggtttcagtttagcaggaggaaaatggtaaaaataacattgaaaagaacaaatagacttacaagggttctcaagatttatctgcaagtgatattttctaaggagactgcgtgtgtcccccaaactccattttcatcatgtcacatttttctcaaaagcatttctataattctagcatgagaagggaagccttggtctaaatgttcatgagcggaaccaagccgcctttccagcctcatcctgcaagcacatactccctggctgcaggtaggtcccctggtagtgtgtagatgccagcatttctgttttaatggtacatggagagaggcgatctaacctaacaacaaattgatgatctagcttgaaaaaaataccaactgccatttctatcaccgtaatttcaaaagcagaaggacattttaacatcaaaaagtgggaaaaacattttcagaacaaatatcatggctccttaattttaaaaagatgccttgggtgcgttggctcacgcctgtaatcccagcactttgggaggccgaggcgggaggatcatgaggtcaggagatcgagaccatcctggctaacatggtgaaaccccatctctactaaaaatacaaaaaaattagccgggcatggtggtgggcgcctggagtcccagctacttgggaggctgaggcaggagaatggtgtgaacccgggaggcagagcttgcagtgagctgagatcgcaccactgcactccagcctgggcgacagagcgagactccgtctcaaaaaaaaaaaaaaaaaaaaaacaggtgcctttataaaaccttgttgtatctctttttcttttgttttaatttaccacaaattcagaagagcttcattatccctagagtaagaaagggaaagaataaagaaaaaaaaagagcttctttaaagaccagcaatccgtggacaggcatttagcagttactgacttagcctacacactgggctgatatagtttctccatctggaatgtccttttatctttcattttatccaattctcaacttcttttccatcccaaagaatatcccatcgccactctcaagcttttccggacattctgcagtaatatctacctcatctgaactgaaaactctcttgcctcttgtactcaattggcctttaccgttcactgtcttctgacatctcttaaatagtgatgagtcattaatgcatctcgccaactagacagtaagcattttatacctctttttaatgtctattattttcagaaaatatgtgatacctaataagtaagtttttaaagtttgctgaacgaacacagtaagttctttgttgtactccttgttttctggaactgtgatgttgtttatgtcgagtcccagaagttaaggcagaagggaattgagaaactgaccctgaaattatgtcataaaaaactgagagttaaaaaagaagccatggctttctattgcaactttaactttcctagtatgcttagtacttattttttatttttatttatttattttttgagatggagtctcatactgtcacccaggctggaatgcaatggcacgatcttggctcactgcaacctctgccttccaggttcaagcggttcttctgcctcagcctcccaagtagctgggataacaggcgctcaccatcatgcctggctaatttttcgtatatttagcaagacagggtttcaccatgttggccaggctcgtcttgaactcctgacctcgtgatctgcctgccttggcctcccaaagtgctgagattacaggcgtgagccaccgcacccagccagcatttatttctaagccaaatcaaaatatagacctttgatgaaggtgttaagaaaacattgcattgtcctggttatttagagatagagacataaattctctatgattatttctcccaaagatcttggaatccaatggatctgagtcaggtcaagatgaatgaatacaaatatgagaagggcatagctcatcagaaattcagagaccctgggtgagcagggttaggcaacttggagaaactttctagacacaggagccatagcactgtaactaaagaaggaggaaaacacagcatgccgagcagggtatagaggctgcaggtgtgtttttccttggctttcatgctgtgctggccctgacacaggactgactttacccataaagaaagtggcagcagcaggaagggcactgtggtgagccctggtgaatccacatggcacttggaccaacccctcagacacaacccctttctcattctgttccatctgctgccctacacgatgttccatttcagggctcgtttctgagcatggaccagttgctaggcacagttctgcagatatacagtgagcagaaacaaccacagagcttactcttttttttttttttttgagatggagtctcgctctgtcacccaggctggagtgcagtggcacaatctcggctcactgcaacctctgcctcccagattcaagcgattctcctgcctcagcctcctgagtagctggcattacaggggcccatcaccacgcccggctaatttttatatttttagtagagacagggtttcaccatgttggccaggatggtctcgaactcctgacctcatgatccacctgccttggcctcctaaagtagagcctacttgtatattgctaagggcccagtgaagaagccagggatctgttaaatatctcacccacacatataacattacacatctgaggactgttgtcaaatgaaatgatgtggttcagggagaccaatgagtgggatgtggctgctgagaatgaggtgcagggtgatgttacatatttttttcccaagaaagggatgtgtaggctgacagctaaagtgtcagtaggtgctcactagtttggaacagaagagaacattgttcatgcaaaggaacagcccgaatgaggctgtgggacaggagggagtgtcacggggctgacagaatgcccacttggctggcacacaaggaagggaaaggagtggtgtgagatgaagctgagcaggtgtcagcaccaacctcttgggactttgcagagtatggcacagattttagcttcattataagagtagcaggaaggcactgaagagtttaaattggcaagtaatgggagctgaactgtgcttttcaaagactactctgtctgctctctacagctgaagaaggactgaatatgggttggagggagagagtgagagcaagcgtagctgggagcaaacatggagtgtaagagcagaggagagaattagccgcaggccagggaccttggaaggacacttctcactaaaagccacactcagctagagagcctttttaacagtgagtgattgttcttctctggtgtttctctctgtccgtccctaatccaagccaggagagaatgaaggctcttagtttaaaaggtcctctggtcctttgctgccccgttcttgcttttctagccagacatggttctctgaggatttgttaaattttatagcccagtggtcaagtaaacatggggtggtactcaaagaaactcacaggtatttattatccaaagctactgcatttggggattattaaatacagacatatagacacatatgtatgcaaggtcattggagtgacatcccatcctgagaacaggggccaccttctacaaatgccaaaaatgcacttcgcacagtgttggaaatttcatcgggtgttcactgaatgcacagacctgctgcagagcctggttcttgtgtctcttgtcttcctgggtgtgctgggatggaggacagattcttatgtccctcattggaatctaccctctcagccagtcttgtgaccacacttttggagtgatggagtgatgggaagcccctcgtggcacagcacctgccccagcaccattggctgaaacggaaacaaccatccacttggcctagcagagtccttgactatcttttagggctttgctctgggaggggctgtgctctctgcctgcctaatatccccacttctggcccagtggggcttgggctgcagtagctgcattccattctggcccatcacgtggcaacaccaaccacgatgcctgccgttttccctgagatgttctgtgccctctcttctgagacactggtggctttctgagaactgctgtatggtgaactccatcttcaagggttattggcttccaaacaccatgacttgcgggagccccgttccctgctcatcagtgtccatgcaattcaggcaactctccccagctatgctagttacttccttcatctaaaccctgtttggaagccctgaagttcctgcctggggaagtcaagtaaaaatgggaggtatgggacttgatagcagcagatgtgcaaaggtcttacaggttacagttgagtctcagtgtgagatgggtcactgggggatgtggcccctgggcagctagtgctatggagtctgtagaatagaggcacagtgatgaccagttatctctggagcactgtgctcagttctaggagacacatttttaagagaaactcgtgctttcctgaggaggtctgggtctgtgctctctgatatacggtagcctctaaccacctgtggatatttaaattttatgtaattaaaattaatgaaaatttaaaacagttgctctggcactggccacatttcagatgaactggagccacatgtggctccggctggagtgtcaggcagcacagtggagagcatgccctgtcctctggaaggatgtggctcagagcacgtccagcccagaagtcacagagccaggacctcatggagtgagaagtagttgaaaacactaaagttgtgtaccctacaaaattgtcctcagacaattcagaatctatgtcacagaagcagaattggatttctcaagagtgactcacaacagcataacttggattaactgaagggatgtaaagagaaggttttagctcaatgcaagtccaacatttccatcagaagtgttcaaaacgtggaatgcgagtctccaggaattgtgatttttttctttcgtttaagacgttcaaatagagactgctgtccaattattgccaatgctagggagggcatttctgcctcagatggaggtagtgaggtgtcagcaaagaatgtggattttagaactaggtagatttaacccaagtcctggttctatcattttctaacttaatggctttgctcaactcaccacacccctccgttctccccagtaaagtgaggacaatactaattgtctcacaatactgtgttgggtgttaaatgagaccacaaagtaaagtatcaaaggcagtgcctgtcccagagcaggtgacttgcactaatcagaggctcaccctgccttgctgctccacacacacgactgactgacaacatccgtgacccacaacatccacagctcattcccacggcagtcctcacgcaggcaccaaaactctaccccactcatgaaatcgacgtgaaatgcaaggaaatcagaatgtggttatctgaggtatcgactttaatcttctctggtttatttttttaaataaattagttacagagcgagactttaatcattatcagtagcagatttcactagcacaattatcaagtgtcaaaaccccaaaggtgagaatcaccgttcttggagcatcctaagccctgtctacctttagaggttccaatgctggcatagggttcaagaccatatgttttattatgaggaattcaagtgagaccagactgttttgttgtaaatactataagaaagacaacatcctttcttctcctccatttctatgcctgtgaagatgtgatgagcaagccttggaagcctcagttcctcagactcttccaggcatggggccatggaacttggcaaaagcgggtgctgtgtggatctcagtctctggagccattcgttgggtcgtgagcagcaaagtagccttcatctttcccagtcttcacacttcgaggaccctcactgctggtggggagggggtttctgctctaggctgtggtaatgctatcccccgacctgcaaattcacacaatgagccaactggccacatgctccaaggagctaagatgctgttggtccacaaacaaaggttcaggttctgtgtagcttaggatccggttgctaattggcttgaaacatttaaatcctcttgcatttagttgaatatgtggatatgcctattgagaagtatgttatgaaatctagggtttgtattcccatccgtaacaggaagaataaaaccttgaaaaatgtttcattttaaatacagaccccttgtgtatcaaaaagtatatttttttgggaatacaaagccaccaccaccaccaccaccattgcccatagaggcgcctgcagaggctggacttgctgcttctggtccgttgagctgagaagcacagaggttcagtgggttgttgagggcaccagggaccccaggtggaactggtaagaaaagctgaatccaatccttggcttttactcaccttgtttaaattactgtccttaagctttttccatattagcctggagccataaatagtttgtgtggctactttcaaaattcaattctgggccgtttgcggtggctcatgcctgtaatcccagcactttgggaggccgaggcgggcggatcacaaagtcaggagatcgagaccatcctggctaacacagtgaaaccccgtctctactaaaaatacaaaaaaattagccaggcgtggtggcgggtgcctgtagtcccagctactcgggaggctgaggcaggagaatggtgtgaacccaggaggtggagcttgcagtgagccgagactgcgccactgcactccagcttgggcaacagagcaagactccttctcaaaaaaaaaaaaaaatcaattctgtgcaattcagtcgtatttattgggaagcctttaggttcccagaagaactgagccaaccttgaagggaacaggaaagaaacagagcctgtgatcagtgggcactcacagcaaataggaatcctccgcctcccctgcttagaaacctccagcaattcctcaggggtgcaggtagaatctcagtccagcagccaagggcttacgtattttgagcggtctatggctttctgttgagcagacttatagcttctcatagctgggcatatttctatttcctgggttatctgaatgcatttcttgtaaccctggcagaagaaaagtttctatcagccctccttgtaggaagaaaatgtgttccctagtttgtaggcagcagagagcctgctgtgttagttgtgtcccgtcagaagcatttgagaaagtctctcgcggtataacaatggcagttttttgcttgagggacagagagagagcagaagctggtgaatctgacaggcaagggtccctaagagaaaggataaggtccctaagaaagggccccctgccctgccttcctcacctcctcttccccccctcaccacgtggcctcaggagatagggcggtgtcactgcctctgctgaccctcccgatgtaccagatgaagagaccgggtcagtaacgcaaggagttgatgtggacatccactgcccagcattttgttcatcgtgcagctttataaactgtccaaagcaaggttcagaagaggcaggattttgcaaaactctcacatcagttccatctaggacgtgtggacatcacagtgattgggatgatgggctggctgacccttggtggttctcaacaatttccaggatgttgcatttatttatccatgacatgacatcaggggtgggagctgtgcttatgcagaaaggggttctcacagactggaccatctgcctacctgctctcccacctgtgtattgtatctgtttatttaggtggaattttaaatttagaaaacagttgcaaaaatactatgacctgtttatatcctttactcagatgaccaattgtttacattttgctccacttactttattattttctctctttctgtatttaccaataaaaagagcattttcttacagaggcacaggaccgtgaccagaatcaggacattcacagttggcacagtatcggcgtctaacctggcatcaacattccagtttcacctgctccctggcacactgtggaccactgccaccttggtctgggatccacccaggcctccagtgtgtgtagttgctctgtctccttaatttcctttcaactagaatatttcttccctctttctttgcctgttatggcctttacatttttcagaacagaacaggttttctgtacagtgcccatcactatgatttgtttgatgtttcctcataattagaattttggccagaatcctagagaagtgatgttttgtccttgccatgcatcctatcaagaggcacgtgatatcagtgtgtcctgctggcgatggtcattttgatctcttgtttaaggtggcatctgtaaggttttcccaccgtaggttgctctatttcctttgaaatgaacaagtaattgtggggcgattttttcggactatattcatatcttttgactcatcaaattttcacctcctagtttgggcatgcattgatgattcttacccgagtcaagtattattacaatggttgtcagatggcaatcttctaatttcatttctccgtctgcgcccatcagttggcattctacaaaaatatggagccgtcgtgagcttgcgtctccttgtgcaagagctgtggctatgctgagcttctccacatatttccaactttagtacatgggcaggtgaggcaagcaccactcttaccttcgaacaccacacacacacaccacacacacatatcacataatacacaccccacataccactcacacagcataacacaccacataacacacatcctacatatgacatcatacatcatacacaccacacacacaccaaatacaccacatgccacacaacttacataccacatcatacacatcatacacacgacacacagcacataacacaccacatgccatacatcctacatacatcatacacaccatacacacacatcaaataccacaccacatgccacacaacctacacaccacatcatacacagcatacacatgcatgacacatagcacataacacaccacatgccacacaacctacataccacatcctacacaccacacacaccccataacataccacatcacataccacacacaccatataccacatcatatacaccacacacaaaccacacacacaaatgcaaacaccacatacaccatacatacccacacacacaaacactgtataccatacaccacactgtacacaccacaaacacacacacaccataccccacacacacaccatacacacacacacacacacaccatacacacacacacacacacacataaaaaaaaacttctgttgaggctgtgcccccaccacttggagccactacatctccctacctcaacttctttccacttggtagtcctgtcttctgaagttagtaaatgcaggcgtgaggcagggaggcgctttggctgattggcggaaccctgggatgagccacagcatggctgtgtggcacgtgtggtgtgggtgtgggtagggggatcccgccgtgcttccttcccaccctgagtcccgtgtgtgccccttacagtgtgtttcctattaaagttcctttcatgtttgggccaagggtgtttcctttaattcctgctagcataaaagaatgaggttttctgcagcaatttctaagtctgaaaagggaggctctggggtaaaaatgttgaacaattaaaatgattagaaattatctatataaaatacaggtatacaaaatatgtatattgaatcctagctagacagacggtatccccgggagaactcctccttgaggaatgggccatttgcttcataatagatgcgagatcatcctcgggccagttagcatgcacagtttcccgggatgctttgcgatacaaattcataaacattgattgaaaggtcaggggacgttcccatcaacacgcggctctgtcggattgttcaagggaaagttagcactgttgcatgcaggcagttgagttcttagggaagagtgctggccctggtggagttttccatgtctgtgtgatttggtgtggtgtgatatagtcaatgggacttggttcggcgcagggagagctgcatgtttctgctcatgttatctggaaataaggattcgggctctgtgtgctgaattatgtttgcggcgatctcacagttgtgaagaagaggcatggctgggaggcatgttcagagctggagagggtataaaattctcatttcttaccttctctgagggaaggagtgtggagtggcagatttccagtctctgggtcttatatcagtgtcgttctctgggaccagcactgtccccatatgggtaccactgggacgtgtagttgacctctgacgtgcacggcagatgcacggacaggcagggtggtgctgggtgagcattagccgtgtgcagctggtgagcctatgccttcttgttggcaggcctcgctgctgagagtaagttggtgaggacccatgcacgtaggttctcacatgtttccaaaggtcccttcctgcctcactggtgagcctttctcccaaatgagaactcctcgctcttgcctccctttctactttctacatcttcctgggacttcctggccatctcctttctgcatgcatgctgcaggaatttccactccagggagggagctctcagtatctgcacagcccaggtgcaggacatgtgctgcccaggctgggttgctgtctgttgtttcaccctgcacagtgaagagaatggggggttaatgtgtcaggcatggcatgcgtgatttagaaccattcatgcctccaagtatttgaggcagctcctgggatccacatctgtgagcaaggaaactgaggcctggcttaaatcacacgtccaagaccagagttaggaacagggcacctgcctggacccaggttcacacctgtaagcatgtcgtgggtgtgggatatgccttagctctctgagcacgtggcagaaatttggggatctatcacccactaccgtaactgtgacaacgtctccacaggaggagcggcaaagtctaaattaaaagaacgtttcccgcagggggcgctcttttttggatctctctgcttggagatatctctgcctgtgtaggatcaaagcagagggaacctctgtgttttcaaataatgtttttcccctaaagcagcaccagtcctaattgagtaatagagtaacaagaagtagaaaggggaagctttagcagctgggccttcacctggtcttccaacaagccccaactcgacgagagccaaagcaagagacaccatttggaggggaagataagaagtcttcacaaggtcttttccggtgttctgctttttcctgggaggcggccttggcgtgtccctgagacctcctgtgatgctcacggctctggcgctgccatttttcttgggtgtcgtctggtggtgtctgcaaggccagctataatgtcagggctgtgctcgatagcacagaaaagacagcgtcctggaggagagcttgttggagcagatttacaagggagggtgtgggtgtcactcacagttcacgctacaggacaatccctttcactctgggagctgagtcccaggtgagagctaagttccaggcgagaccagggagtcgaggggactggatttctgcttctctcccaggagctgcgggctgggaaggggaaggaacagagctgaggtgtgacatcgcccccggtttcccctgttgcccaggttatagcttgggtggggctgacttcagaggcaacattagaaccttttaaaatacccttaatgatttacatgaattagaacaagaaggcagctgggtgtcgtggaaagcgagtgggatctgggttatgtcctcactgtgcctttttatgcacacaaagatttatctacccatgctatcaacttagtgtgtattatagtgaaatgccgtaaataatctcatgtcccctttatacagataagaaaaatttttcagggacattgagttaacttgataaagttctccagttatcaacctggtaattccagttctagaaaatggcaagaggtaaatgccaacagtgggtatttatataagaatgattatggatcagttaagcaagtcagtaaaaggaaatcgctagtgtgcataaggtgctattgaggcaatacctttatgcttttggtttataaagtaaaacattttaaatcttggtatttgtgctatgtctgcataataaaatatttcataattaaagtcatactttggaagattttttattatataagaaaatctctatattacaacattaagtgaaaacagtgggagaataaaatctaaaactacatatagagaccaaatcttataaacaatagattaaaaatactagtaaaaatagtataatgactatactagatttgctgtctctgtgtgtgaaattatgattaaatgatttctagtttatcctttctatattattccagatgtttcactattaacatcaattatatttataacaacagcagcaaaggtcaacgtgatttatatttttagaaaaccaggtattagtagttatggttatgtagcaaggctggctcaagaaatggatcagactctgagaggaaagacccacggttttgttgggtattcaccgtgtgctccccttgtaggtagaggtgatgggatggacctggcgttcactgcagctgcctgtctccacactgcacagcctgctttggaggacgcccagcctccccttgctggcctcctagcagtctcgtcagtttttcctgcaatgtgagtcactccctttgctgtagcctgggtgtacctggaaccagccaattgcatatccacagtcaggcggccactcagtctcctaccagagtttacaaagccagggtcctacaaacaccctcataagtgggcttattttggcccatcccatgaaagaagaggctgagtctgacaacagcaggagcagcagcaatgatcgcttattccgaggcctctatgtgcagggcacacctccactctcccgccgtgctgcgagccctttgagggcaggacccgtctgattcaacgctattgctccagcatagctggacagggcttcacactggacatgctcagtaaacttgagaacgtaaaacagatgatcgaattcctctgtactccagatgattttgctaaacagaattattacatatttaaaatacaggattatcactatttgaagatgaaattagacacttatataataaattaccccaacacttagtggcttaaaactatgcacatttgttacccacagggtctgggtagcagggatctgggagcagactggctggtactctggctcaggccttccaggagcacgcagctagtgctggctgaggcagctgtcacctgagggcttgtggaggcagcagggcaacgtccaggctctcttatgtggcctctggcaggaggcctcgggtgctagccacgtaggcccttcctcatgatgtggcatttggattctcccagaacaagtgactgagggagtggtgggagggaggttggtggagacagcagcgtagccccttcctgtgatctagtcttatgggttgtgctcgctcacttctgccatatacattaggagcaattcataaaatccagcccagacacaagactccacctcttgaagggagaggtattgatatggttctgctgtgtccccacccaaatctcaccttgaattgtagctcccataatcctgttggattatgttggaggagggaccctgtgggaggtaatttaatcgtggagatggttaccctcatgctttctcatgatagtgagttctcacgagatctgatggttttataaggggcttttccccttttgctcagcacttctccttcctgctgccgtgtgaagaaggacatatttccttccccttctgccatgattgtaagtttcctgaggcctccccagccatgctgaactgtgagtcaattaaacctcttttctttataaattacccagtattaggtatgtctttattagctgtgtgagaatggactaatacaggtatcaaagaatttgcggtcatcttttttaaaatcacaaaatttcaggagatttaattaataaagtgagactcaggtctaggcaggtaattagaggggcctccaagaaggaaacaaagactttgtctaacacactatggtctggagacagatctcctaggggccttgctcagctttttgcttacagcattgagctccagggattggctctgcttgccacagggtgatgtgccccatctctttatgttactgagggcagaagaagggtggatatctatagtttgcctgcatttcaggatccaagtcaagaaggagaagaaagaggaatggccctattgtgggagcctccatgatcgctactgcatttggcagtgatatatactcccttaacctttcctctgcaaagaaattgataatgatacttgcactagtaaatgtccacttctaaatgtctgtataaataaaacaagtatctaaactcattcttgccccataaaatgtctacactttaaaagtaaatcatgccaatctgctcatacaggcagaaactaaagagcctttaaatttgttttgcaaacaatcacatcaggatttgttctaatatactgatgcagtggacagatttatgatttttaggaagataggcacatattttgcagagagtaaaaatggaaattcagtgatagaaaatggaggtttgctccatgtaaggataggggctcatatgactcagtggaaaatagaggataatcgactctattatcctgcctttatgtggaattgcaataatgtccattcatattaaaaataaaattgaagactttcctaataatccagtcattcacaaataaatattgattgaatgccaaatatattccaggcaccagacactctcttaagcacttggatacagcagtgagcaacaaaaaaccttgccttccttggctttgaattccaatgcatagggaacaaaagcaaatgaatcagtaaaaattattacatgttatatggtgataaattataaaggaaaaaaatcagggaatgaatatagagggtcagggaaatggcttaaaattattaaaagcgtggccaagaggtcacgttgcaaagttcacatttgcccaaatagctaaatgaagcaagggagtgaaccaccacagccagctggaggaagagcattttgagaatacagaataagtgcaaaggccctggggtggtcggggagggtggtctgtgcaagagcatgacgaagtccatcgtggctgaggagtggtcagaagaacctgaccatgtgtgcctgttggttatttaaggattttggttttaaccaaagtgagctgggtggctgctggagggtgtgaaggaagagactcctaatctgagatggatctctgggatgaatggttgttggtgtttgagaagctattgcagtaatcgagtcaagaaatggtgctggcgtggccccgggtggcagtggtgggtgaaagcactgagagtgtgttctgcgaggagacttgccaagattgacccacagaccacatgtgggatattagggagcataacagtcaggtttctggcccagcccctgcaagtatagagtgccattgtttttagattgggaatgctgagaaaggaacaggtttagggttatgtttggtttgtaaagtttaagatgccattggatactgaaataaatgtatgaatctggagttcacagaaaaggtttcgattagattataatagagcaaaatcaacttccagagtagaagtgggagttttattttttatttatttattttattttttaccagaactgctatttttacaaactgaaagtcccttagaacatacactgaaaaaaaaatcccagttattctctgagtccttacatagaattgaagaccacctgcctgtttgtctttgcctgtttccttttcttctgttcttaactcctctccagctcctgaatagcaattttgtttctctctgcctcatgcaacagacttttctggatgattcgccccatcccccgtcatgccaagcctctgccccacttcatttctctttcagtgagtggagcctccgccgtctcccagacctattgttgcctggaccctctcaagcctaccccttcctctcctccctcccctcctttactccgtccctttccatggagccacactcggggcaagaccatctgctctggccttccgaggcttccgcactgctggcagatgctccccacgtcccctagaatggtttgtgatctttctctgtctggtcccaacatgcctttccagcctcctccctccccacgccagcagttaacccacgcatccatccaggagatttcccacacagactgcacataccgcacaggtgtgacctgctggtgatgatctgctttctctaaaatggactttcccttctgtctgcacttgctgatcaacaaaaagcctgctgggcctttaagacaggcctcaaaccacctctgctgtgaagcctgcccttcctcgtcaagaccccaaacgaggctcacctccccgtgaccgtgcagcgtgctgctggtcctgccaacggtgcccctgacggagctgtggttggtcctgtgtttacctcttcggcctttccacccctccagaggtccgcctcttgtctccaggtctttgtatctaactgaccagttggacactcaccaacctgaatgccatgtggtgttctggaaagcttcctctgtaatttccagttcagatcagttgttcatcctgtgcactccagtctcatcctgtgcttaattctaccacaacaaacaacgcagtattaaaattgtctgtgcagctttctctgcagtctgaaagacctcgaagagaacagacctgccttatttactgtgcgagtatccagctagagcctggagctcagtaaatatctgtgatttcactctttctctttctccttccatcccttcccctgtcctcctctccctttcttctttctttccttctttctttcagcacacatcagtacaattccacacaatggaaagagaagagtgaacaaggcaggacatttagaagggaaagtggaggagcaaagtgaggaaatcttatcagaaaaggggtgatcagcaatgtttaatgttgtcacaggcaagaaatatgcaggcaaaaaaatcctttacattctgtaactaggatgttgcatggagatttatataaagagtgttgggctgggcacagtggctcatgcctgtaatcccagccctctgggaggctgaggcgggcggatcacctgaggtcaggagttgtagacaagcctggtcaacatggtgaaaccccatctctaccaaaaatacaaaaattagctgggcactgtggcgggcgcatgtaatcccagcttctcgggaggctgaggtgagagaatcacttgaacctgggaggcagaggtttcagtgagccgagatggcgccattgcactccagcctgggcaacaagagcaaaactccatactccatctcaaaaaaaaaaaaaaaaaaaaaaaagaatgttaacacttcttgctcctaccgtcttactcatttcttccttcgtcactcattcattcagtaaacattggatttctatttcctgcctcctctaagattttctaggcacttggacctcaaagatgaagctattctcacacgcacagattgtcaggactttgaggctttatgggtgatgggcctttacacattgtactgtctccataaagcccctccttagcttccatttttttttcttttgagacagagttccactcttgttgcccaggctggagtgcaatgaatggcacagtctcggctcactgcaacctttgcctcctgggttcaagcgattctcccgcctcagcctcctgagtagctgggattacaggcacacaccaatacgcccagctaatttttgtatttttgtagacatggggtttcaccatgttggccaggctggtctcagactcctgacctcaggtaatccgcccgcctcagcctcccaaagtgctgggattacaggcatgagccactgtgcccagccaagcccctttttagtttctgtggggacccctcattcagccacagacttgccccttcaatggccacttcattcttccatgtgcgtttttccttgttctcaagttgtctcctcagcttgagtgtgaaaaacatttcatgctttttagtatcatccttaggataagtctcatatctgtgcactttcatattgatcaaaaaaatcacaagaggataactgaatggacaactataaaacctcctgtttctctatttcatgtcagacaaccctagctcccttagctttgcttccagctcctttttcctgatgctttaatcattgctgttcctctcttaatgtgcatcatgcacactatagttctctaaaatcaggccactttaagccatccacaggattttatggaatactaatcagtgtcatgttccactcaacatgtgatcggattttgagagcagtgaacagggtgtcctctgagggcctggggtaatacccccattctgaatcacaaaggccagccccatggggtcagagggttggcctggttagccttgtggagcctgtgttctccaaacagacatttaattactgtccccaatgagtaccctgatcacaatacttattgctccaatggggtctgtgggtggggattgcaaaggggaaggttgccctgcttagctcaaggggagcatctcctgagaaagctgattccgacagaagtgcagtcaactcagcaagcctcttccttctgtcctgttcctaaaaccatctgctcattgcaggaagcgactccattccgtcagccatactgatggcattaggttctcctaaaacatctgggttttccttgtgggagaaaatcctgcagtgaatttagatgttggtggacctctaagcaagggcctcattgagtataggaggggaaattataaatgtcaaattataagtgtgcaaattatacaagtgcacccctgcttggccttgcagggcaccactggccagctcccccctctccaatttttcttctgttgccgtgatggtgaatgttagttgtcaacttgattggattgaaggatgcctagatagctggtaatgtgtgatttctgggtgtgtcggtgagggtgctgccagaggagactgacgtttgagtcagtggactgggagaggaagacccatcctcagtgtgggtgggcaccatcccatcggctgccagtgcaggcagaacaaagcaggcagaagaaggtaagataagcttactcgctggttcttctggcttcttgctttatcctgtgctggatgcttctttcagcttctcctgcccttggacatcagactcccggttcctccgcctttggactctggcacttatgctagtggtttgccgggggctctccagcctctggccacagtctgaaggctgcattgtcggcttccctggttttgaggcttttggacttggactgagccactaccggcttctctcttccccagcttgcagatggcctatggtgggacttcacgtcgtgagcatgtgagacaattctccctaataagctccgtttcatatacacatacatcccacagatctgtccctctggagattcctgaccaatacggttgcccacccttctttgtctcttctttgccacgttcacttctacgtggcctcacggaacccacgtggccttgcctttctggaatcgcagtctcctccatgtggagatgcgtcacctgtagctgatggataatcacttggaaatgcagctgccccggacgggaaggggttgtgcatttctcatattgtttttggctagaccttgagaaattttgcttcctggacaacttagtcatattttatgaagatcctttgtcagtggctagaaaattggacatgtatgatatatggctggggaggactaatgggctcttccttcaacactctgtcaaagtggggccagtgcccatggtggaacgtgctttagtaagatgagagaaggtgttttcatgattaacaaggcatggcattcgtatttcaaagatcacatgacatatcaaaacagtctgctaccgtgtatttatttggtggcatggacatgggacatgtggtattttctcagggacccttcggccctggacctgtgctgtgcaggcatctgcctgtacacactgcagctgttaacctgtgcataacaaacagccaatgtaagatcagatttgaggctgggagtggtggcacacctctgtgtgtgtgcttacataacatacactcaatgtaagatcagatttgaggctgggagtggtggcacacctctatgtgtgtgcttacgtaacaaacactcagtgtaagatcaggtttgaggctgggagtcgtggcatacctctgtgtgtgtgcctacataacaaacactcagtgtaagattaggtttgaggctgggagtggtggcacacctctgtgtgtgtgcttacataacaaacactcagtgtaagatcaggtttgaggctgggagtggtggcacacgcctgcggtcccagctactccagaggctgaggtgggaggacgcttaagctcaggaggtcaaggctgcactgagccatgatttcaccactgcactccagcctgggtgatagagtgagactctgtctaaaaaacaaaaccaaaaaaacataagatcgaatttgactcgaccgtttgtccctctgacacgtaatctaagatgtcagaagtatttgtgtcaaagaaggcaagtgggagagaccgggcctgaggtgatgctgtgttccttctttgatgacatcattaacgaggagagggatggccaaaagaatccaaaatgaaaagtgtgctgataacagaaccaatcacaggcacaactagcctgggattccaggcctgccgaggctgctcactgcggagcctgtgtctgattctgtgtgaccagagccttggctgcaaataacgaccagcctttcctcatcacccaccagcaggcacccaccacagccctgtttgaggtcctttgaactcacagttttagaaaaggtcagtagtcaggtgatatggtttagctgtgtgcccacccaaatctcatctgaattgtagctcccataattcccaagtgtcctgggagggacacagtgggaggtaatcgattcatgagggtgggtctttcctgtgctgttctcatgagaatgaatagggcttacaagagctgatggtttataaaggggagttcccctgcacttgctgtctttgtctgctgccgtggaagacgtgcctttacttctcctttgccttctgccgtgattgtgaggcctccccagccatgtggaactgtgagtccattaaacctctttcctttataaattacccagtcttgggtatgtctttattagcagcatgagaacagactgatgcatcaggataagtccacattgcaggctcttcagggcatggccccgactcgctttcccatctcacttttggcctgtccctcatgtgtaccctgggcccagctgtgacctatggaacggtataactcccctgaatacactgtgctcccacagattatgtgcctgcccactccatctccacagcccccatggagaggagagaaaggggtggcagactctgcctatgcgcccttgtttcttactcagagataaaagttcattcagaaaacatcttgagttcccccaggctccgttacttccttctttgctcccatagcattacctggtgaaaagtgcttctgttgcaaaacttatgttcatgtgtctgcctcacttctccatgaggggctcagtttcttaagaggaggaacagaaaggctaggtctggtctctgcatctccaaccgctaggccaggcgttatatccttggtgcgtgtttatagaatgtgatggtagacatggagtgtggtggggtgagcagagcagatgtgattgacattctggtgaaaaggctgagcaaacacaggacccactgctctgtccctgcactgggctgcgtgctggagattcagtggccactcatgctgctgctgtgttcttgtggaggtaagaggcagtgggtagaggagcaacaggtgatatgtgaatgctcctgactttgtaggaaatgggaaaggggctgatgggtgggggtgcacgtgggtgaaggaggtctgggaaggtgtctctcctgagaaggcagcagctggtctgggaatgaagggtgcgatggagctcactgacaacccaggcacaggtgagagcaggtgcacagtccctggagagaaaagaggctgaaaggctggaggaaaagttgagacccatgtggggagggacggatgaaggttcagatcaggggcctccggaagtgagggaaggagcaacgcactgacgctgagtgctttcaagcaggggagtgcagagaatggatttcaccttgaaaagtgaatgtggaccataacaagtgttggcgaggatatggagagaagggaaccctcacacagtgttagagggaatgtgagttttacagccatatggaaaatagtgtggaggttccttaaaaaaaaaatccaaaatagaattactggatgatccagcaatcccacttctgggtttagaaccaaaggaactgaaatcagcttgtcaaagagacatctgcactcccatgctcactgcagcactgttctggatggccaggatatggaaacattccctgtgctcatccacagatgaatggataagaaacgtgtggtgtatgtacacaatggaatactatgcagccttaaaaaagcaggagagtctgtcaattgtgacaacatgaatgaacctggaggacattgtgttaaatgaaataagccaggcacagaaagacaaataccacattatgtcacttgtgtagaatcttaaaaagtcaaaattacagaggcagagactagctcagggatggttgggggtgggttggggagatgttggtacaaggatataaaatttcattggacaggaggcataagtttttgagatcaattgcacaacatggtgactatatttaataatgtaaagtatgtttcagaaattgctgagagtagattttaaatatttgtaccacacacccacaaacataagtctgtgaggtgatatatatgttaactagcttgatataagcattccatatgtgtatatgtatatcaaaacatcataatggaccccatgaatatatgtaattattatttgtcagttttaaacattttttttaaatgaacatggaggttggggaaccttaccagggttcttttggtctccgccttgcctggggcccagaagtgctggtgaggggttgctccctactctggagctctggatgctgatcagagaccctccatgcctggtgacatctcagactcagtgaacagcctcaggggcccttcacaaaactgggctgtcagggccacctggagctcagagtggtaatttggttccatttgaacttcaattttcgttgctttgaaatctcattcagttgaatttaataacaaataaataattcatggggactggacaatgaaaggaaaatttaaaaatgtgttcacccaaatatataaaggggcaccttgtccctcagccctgttctctaccttcttttctcagctggcttctgggcagattcatggcgccaaaggatgatgcgttaactctctcagggtgctgagggttctctcatcatgagacttctgtgggttagggactgggcaagaggtgagcaagtatcccacctctggcaggccagcctctcagccaccaatttgctaagtggcccaccggtcatctctgagccttgtttccttgcttgtaaaatgcagaaatctttagtaaaccaattgatgtaggcaaatgtcatgaatggatacacagtcatctcagggaatttacatggtgttaaagtatcactccagggatcatctgctggttgcaaggggagaaatgtgactttatcctggagaacaccgatgctctccaccttatcaattcctgcatccctaacactgggacaagcagatatccttccatgccccatgcggtgcctagcatcacctgtgaggtaatgccacaaacttgtgagctgaacttaatcaagctcttaggtctaactttcagtgcgtaacaaacacaggctgcagagcatccagctaatgcacaccaggaggaaacagccagacaaatccagaaggtggaaacgtggaggcaacaactcacccattccttccagcaagccagcaatgtgtggtgggctggggagccactggggcggacaggttctaagttgaaatatacgttaccaccaaccaagggcaattcctgggcctcggctaaatccttacctatacaaaccagctataccagtcactttagagtaattggggaagttattacatgagattagaaaattgtattcattttttaagtgtgaaaatgttctttttcctttttaaaaaagcttctgttttaggttcagtggcacatatgcaggtttgttacatagagaagcttatgtcatgggggtttgttgaacagactcttcttaattatacaggaaaacgtctagagcttgtggtctctcttctttagcgttgcttactgagattttttaaaaagatgcatcctgaatgatttcgaggcataatgttttggtacctgtatgcaattgaaataatttttaaaatagatatggagtaaatatgaaaactaacaattttcaaaattttaatgaggagcatatgaaaattatactctagtatgctgttacttttcttttctttttttcttttttcttttttcttttttgagacagtcttgctctgttgcccaggctggactgctgtggcacaatctcagttcattgcaacctctgcctcccaggttcaagtgattttcctgtctcagcctcctgagtagctgggattatggggcacccaccaccatgcccagctaatttttgtatttttagtagagatagggtttcaccatgttggccaggctggtctggaactcctgacctcaagtgatccacccgcctcagcctcccaaaatgctgggattacaggcgtgagccaccgcgcctggccgctgttaattttctaatctttaaaaataataatagtttttttaaaaagctgctcacaaatattttattgatgatgtgtgcatttttttttcctctggtaggacataattctccctgagaaggggaaagacagtaagaattttgtgagttgcataatagtccattgattaccctttgtcccccagtggagggcactaaacccctgaagaagcaggcccctgtgtgggcgtgttatgattgtagaacaaggagaggggaccctccagtactcagtgtctttagtgggtggggcgggggcttcaaggcagtagcctcagatacctgcggggcccatgcagggaaccctaattggggtgcagggtgggggagcaacagaatgcaaaatagctcttagtaccttacctaaatattggttgctagattttttcattgactggaagctttcatttggctctggatagaagtgtgggcagtcacacaagtcaaggtaagaggggtggaaactggtttttgctggtgcttcctaacatttgtcaactgtggctttcaggctaccaatgggtggggagttttgtgcgagaaaatggaccacatttgcatcctggtgttctccaaatgatgttaaatgcagaaacattcaatgcaatgagtttgttcaattccatccaactaaaaattgtgtttgtgctattagtgcctaccctctgatcagtcttgtactaggtaggaaacatggtgcttaccctttactaaggagttgtgttacatgaaacagaaaacactatgactgaatcaaaaagaagcatcactctgcttgggtagtcagggaagaatcttgatttcccctggaatctggtacttacctcgcggtgaatatacaataacagccagagttttaaaatagacaagaaggacagaaatcagagagaaaaacacagacacatcagaccccttatcataaggtacaaacaatagagcagaagggagaccacaaacttccattctttatgggatgagcgagaaaggggatggaggctttggcaatgttgaatgggttttccacaggaacagccagccccaactgatgtgtagtgatttcctaggaagtttgcaaacctcatcccaccaagaggaaatgggtcgggagttctccatcatctggaggtcacagagcagacagaccatggcccaggacaagatctagaagttgttattttattcaaagtcagaaaaccttccagggtctggggatcagtgtctggatagaagagaaaatacaagagaaagcaagaggttaatgtgggctgaaggcttagaatgagcagttttaggataaaggatagttaggaaaggatgggggatggagaggagggtgcatgtaaggcaggacaaaccaaagagaaagacctgaatgtatctgctgtgtctgtgggacatagggaggttctgttcattctgaatgggggcttcgagctcaagcctaaaaatccatcctttcaaataggtacagaaagaagggctttgacaagtaccatgggctgtgcttgattgaaaggacagacacattcagttgttgttatttgtgattattgtcagctccatcattgatggcactgtgcattttttgaagtaggtctctcccatcaaactgccaggattccagtgatcagagagcaggtcttcagtagcacaggctggattgggtggtgcccactcccggcttgaccacttagctctgtggtgccttggtatcctcatctgtaacgtggggataataatggtgtctgtctcataagaatgttttgagaaacaaatgagaaaacccaagtcaagctcttctagaagtgcatggcagatagtaaacagtcaatcaacattatcagtcctatcaccggtgtgggtactgttgagatacctgtgagagtaaatcatgatttatgccaatggttaatggaaaatatttattttagttattttcttatctgggtagtgccagatgggataataaaaatgaaaacaggcagggtttcgtgtgtgtgtgtgtgtgtgtgtgtgtgtgtgtgtgtgttgctttgtttgcaagcatgatttagttgaaattagatgtctcttctgatctataatctctttgtcttcagactgaaacctgaaatcccatctgaatatggctgaagcaaatctgcacacagtgtcttgatgggaggatatgactaactcttagattggaattgtgttggtgcgtaggcaggttctattattaggggtaatgttaccacattattaaaatatttttaggcataagacaggattctttccttcacagataaatggtgaaacacacatattcctaatttttaaattttgatcaaaattttattaaggccaaaatgggcagagactgggtaacagaagccatattttccaatttgccctcctttactctcccagattctccttgcatgttggctggagtggatcacgaagggtaggaagctgagaaaggtggaataattggaatgttctgcaactctgaagccaaacaaacttaggttttggatgacgtggacagtggatatcatatcacctgttatggtgaaaccatcaccaatacttactttacaattcccatcacacaccccagtgactttctgtgaaagagagatcagatatctactgtatttagatcaactattacattatcaacagtggaggaataaggaaatctaggatgctgtttagtagcaaggaatgcatcaacaatagataaaaggtggccaggcatggtggctcacacctttaatcccagtattttgggaggctgaggcgggtggatcatttgaggccagaagttcgagaccagcctggccaacatggtgaaaccctgtctctactaaaaatacaaatattagccaggcgtggtggcacatgcctgtaaccccagctcctcaggaggctgagggaggagacttgcttgaatccaggaggcagaggttgcagtgaactgagattatgctgctgcactcctgcttgggcaacagagtgagactccatctcaaaaaaagaaaaaaaaaaggaatctctcagtaggtactaaataaaacagggaaaaaaacataactaaacataactacaaactttcttttctttcttttttttgtgataagaacacttaacatgagatctaccctctccataaatgtttaagtcttgttaactgaaagcacaataggatacagcaaatatctagaacttatttcattttgcacaactgaaactttgtacccatggaacgcctcccatttccccttctcccaagcccctggcaagcacctctctactctctgtacaagtctgcctgctttaggaagtggaaccatgtagggtttatccttctgtggttggttcatttcacttaccataacatcctgtaggttcagtcatgtttttgcatatggcaggattttctgctgtattaaggctaaataatacttgatggtatatatgtgccacattttctttatccattcgtctgtcaatgagcatttagatggtttccacatttgggctattatgaataatgctgcaatgaacatggaagtgcagatagttctttgaggtcctgattttaattattttggatacgtacctggaaatgagattgttggattatatggtggttctatttttagtgttttcaggaagcctcatactgtattccaaagtggctataccattttgcattccccccaacaatgtacaaggattctgatttctacacatccttgtcaacatttgttttcctacatatatatatatatatatacacacacacacacacacatacacacaacacacacacctacatacatatagatatataatagcaaccctcataggtgtgaggtgatacctctttgtggttttgatttcatttccctgatggttaatgatgttgaacatctttttatgtgcctgttggccatttgcatgttttagttgaagaaatgccttttcaagatttttgcttttgtttcttgtgcttttggtgtcatatccaagaagtcattgcctgggccaatgtcatgaagcatttcccccatgccttcttttgggagttttacaatgtcaggtattatgtttaagtctttaatacattttgagtcgttttttatgtacagcataagataagagttcagttctcttgtatggatatccagttttcccagcaccatttttggaagagactgttattttcccatcatgtattattggcactaactataatggtgaaaagttaaacgcttttcctttaagatcaggaacaagacaaggacgcccacagtcactgcttctattcagcatagtagtggaagtccttgccagggcaattaggcaagagaaagaaactaaaggcatctaaatgagaaaaagataaaattatttctatttgcggatgacatgatcttatgtgtagacaacccaaactttcttatcttcacagaatattttgcaagagttgagctcctagaaaatgagcttagatcatttctcccctctggccagtaacaagatgctcctacactgagcttcatttagcacagccctggacacaccaccaggcactcagcaaacatcagacaatttccagttcaatggaaaattctcagttatccatggcagaatcatggccctgtcatgcactggctgagtttgcttgaggaagctgcttaagctttctgactcttggttttgttatctgcaaaaggggaatagcagtgtctataccacagggataatatgaaggctaaatgagatcctgtaaagcaatctttccaagtcctgagcttgacacaataataaaaactaacctttatttaattattgagggtggaggaaggaggataaagaacagaaccaaagaacagaagttatttcccagtgaacttaaacaattcatgagttttctcatcttaagcagggaggccttaactgcattgtctcatgcctttaaccagtgagagtcagagagagctaaggcacatccaactccgttgctcaactcccaggcacccagcaacaggtatagagcattgggagctgcactctccatactgatgttataattaatcttccacctcagtcaaccgatcatagagttccacttttggaagtgttccaacctgcacccaggaggcttctgcagtcttttttgctgccagaatgtcctccctgatttacacctgacttcggcaacatctgagcattcatatctgtgctacatgctggctgtagccatgggtctcattctaaaacatccttgccttcaaatacaggcatgaggcaggagtggaggaaggagaggtaagaaactattcatcggccgcctcatgggcatgctgacggcaagagttatgaggtgtaaacctgggttcacatcttgttttcttctccaggtgagggtacttcatagagctcagaagaaactcaaggaccagctctctcgggctgcccctgtaatatggcccactgagggcaggttcctggctgcccttggaacagtgctgcagtcatcaggtggtgtgaaagacaaatgcctttgtgccctcaaaggcaaccagtatatatgggaggtgctgtccccccttctgccactcatcagctcatggtaaacagaggccacttaggcaccactcaaggcattgaccagtctgagtcctaattatagggtcctacttatagccattatgaacctcaaagccaaacaagatgaattttgtcaaaggactcctcctggctttagttgaacagaatcatcagactaggaagccattagtgaccttcgtgagtttccagatcttcattctcatggctcttatcagagatttgctctgaggtgatagtgttatagggccctgatgcaaaaagcccagtgcagattggcttacctgctgctgcatcttgattgtccatgggtggggtctactcctgaggtcttgggattgaaaaagttcacacggactgtaaatcctgccattgctactgatgacacttgtacttgttgcggtgtgtccattgtagtgggaagagctctgctcttagagtgttatacagcctatagggtttggattcttcacatttggttggttgactttgagtctcagcactttcaattgtaaggtggggacagtacaaacttacagaagttattgtgaatacacaaccatccaagtaattacacctgcagagctgactagtttactttcttgcttgctgtctggtaaaactcttgccaatcatagacaaacgatcaatgcataaggtaacctcatttgagagttcaagttctgaacagaagaaaaggatctcattcctgttatgaacagcttagttataaagtcaaatgtaaaatcaaatatgtgtttctgtggcaaatggttaaattcttaccttttacaaaacattcagtagtcacaaggtctttacacacccactgcttatccatcatatttatatatggtgtgcctgttaggtaagacatacacactttggttagttacttgaatagatcataaaattaagtctaggactatgttttctgctttatttaaattttctcatccaaggaaaaatttcataaagagtggttaaatgaatgaatgaatggacatttactgtcttgaataaaacctttttatataacttagcttgttttgcaaaagaataaaacactgggttcaaactctttatttttcattgatctttagaaatcagggtccctcttttgaatacaccccttgctcaaggaaaggaaccatttatgttctggccttgattactgcacaatggcttttactacatttgatttgcagcagttcatttgtgattaaattttctaattctcccagaaagtcattgaacaagcaaacagtttactttccccaataaaacaaaacctaaagtatttggtctttaataaatgttcaaaaattattttctcagtgtgtgttcgagatataaatatcccttcatctcaaccgtcttttaaatatttgaccaatctacctttacagagtagttgtttctccttatgtcatttctgatctatctttcttgaatttttctttgcttagtttttaatcaagccaaatgtttgtttaatcagatacctcaattagtcaagacctgtctcttttatcagaaggtgaatttagagaacaattctaaaacatagggtaatacaatttttttaaaagaaaaataaccaaattctaagctcagcttggtcccagggcaaattcactcctcattcttaattcttcttctccatttctggtcacgggaggggcacccccaaaatgctgaccctaggactccccaagatcctccagcatccaaaaggcctctcttctccagtctttactttctatgggaacaggttgaaacccctgggaatgaatacattctcaactaaaaatacaaattaaaagaatttcttgcttagactatcagaaacttgatctagtgcacatatttcccaagcatttcatttactagatctgattaagacactctgttattgtatcatttaaatttttaaattttattatttaaattttaaatacaagttttaaaggatggttacaaattagtaactcaaaataattgagtggagagatcaaggtacaagacactctgcctttaccttcaaagtctgagcaaatatgattttatatcgttttaatcagagattcttttaaagaccaagttactgcagtcctgtcttgttcttctcctattttatactgatgtgctcagtaccttggtgtctttgtctgtcttttagggggaagggaacccacgttttggactagagtagcacagatgccattcttacctcactgtaggtttctttaaagaatgtttagtcctgacaatgcgatgcagatttctttctctccccactctatcttctcttgcagagctttatccctttttcattgttcagcatgactgggaacctgccagctcgccacaatgaaacataatgtttttgcaaagtgtgtgtcaaatgtcgtgagcttagaagagattcatcgtagagactgctgcttaatgagtgtaaattaactgatcatttgctaaatctgatgtgcccagtggtgtgggtgggagaatgctggataggatgtaggagatgcaggtgagcagacgggtagcagagacacataccgtgtttctgagcgaggactgtagcatggccagaaggctgttctgatgtagagagggattttccgctcacggtaggacccagtaccatgagactgaggactgaaacacaaagttaacacagatctcccgaacagtctgctttagggctggagcctgctgggatcagtcctcttgagaagaactacaatctggttgagattgaacttgccaaagacaatgagactaaacaagagatgcctgctggtaaacatcaggggtgttgtgtggaagctgagggaggaagaaaacacaaaagctgtgcatgatgataaggctagtgggcctagtgttaccagtaccacagatctacagctcctcctagaggcagggcacattcagaataagcaacagggagctgcatgtcatgtagtcaagcaactgtatatttcttcttcattgatttctgggacatacatatgaaatatcttcagcttcatatctgagatggcaggaacatgacaacatattagcttttaggtagacacccgtaggtcttaggatgtggtggaaaattgggtgtcattttttccagataatcactggcatttttataaaacatgaagcccttcctaaagtctgtgcttcccagatagtagtgaggagaaataggcttgtggagaccataagggtttattttggagtgggtcttgtgaatttgacagtttaatagtcacgtggacgcacactgttgtttgcaggaggggccatgaacccctgccctgaatgaaagggaaatacttatgtccgtggtaaccagggccagtggcagccaggaagccaagacctggcctccgctgccactgctcatacaaaccaaacgtgtacatcacgtatgggatataggagaagcacatctgaagggctatggcagaagtggaaagaaggcaaaactcttccacacaggcaacccgtgctttccagacaaatctcacaacatcaaactagaagtattcatgccaccccctacccctgccaactagaactggctgtctgtgtcaggtcgtcatcttatcttagaacacatccattgatacatacactgtttcttcttccctattacctctgattctgcttctctaaaataaaagctgaccgactggttggaataataatacatataccacctggcattttacagttttacatcatctcaggtgatacaaccaggctatgatgcagtcatgtcaccatactctttaccagatgagatgcaaactcagaaatattaggaaatgtagctgtgatggattgggctataatcaacttgtgatgtgggagtttctcagaatctctttccctatatacatatggttccgagctagagctggccacagtgaagccatgagacttgggaggtgaatgaaggaggggccattatgctctggaggttttcatcgtgtaactgaacacaggtccggatgctcaccgcctgcagaatccagttaacaagaatgagttctggtagaaagaaagtgactttattcactcaaactagtaaagaacaagtggccgggttcccatccaaagcaaccacttcaatttggcagagaggaagacaggggtttaaaaaaggaaatcttgacgtgaaaagcttgcaagaattgtgctgagtacaacgtctgtgtaccttgttctggtggctatcttgggtcccagtttacctggatctcgggctggtgtcatctcaacaatggtgaggctgttgactcgccaccttgaagtcatctctggaactttgcaggtgggtctccagacttggttcatgtgtctcaagattacccccaggagcttctaaaaagggacataattagatgctagcatacaggtagatgaatgtgaagggagtatagatggtgagaaagggagggatgtggagttcattttaagacaaagagggaaaggcttctgcaatttgcttcaaggttatatcttgaaacgcacgagaaataagtaaaaagtttaaaatgcattttgcagttaaactgcccagttacaattggtcagaagtggtgagagacacagtggagctgacacagggtgcaagtttgtcttcactcttccttacccctgtctttatttcccgatttccagccctgctgacttgcagtgagtccagggccaccatgcgatgctgtaccccactcgacagacctttacttccatagcacctcacatcattcctgtaaaaggttgttactctataatattccaaatattgagagtttcactctcaagtttgaactctgactgacacattacctgtggtctccaggtgggaggtgatgtgttttttacactttataatttttttttatttttatcactcactatacttgactgtgttatgatttctatattcgtcattcttcctgcatcattttctctcttctttttttttttttctgagacagagtctcgctctgtagcccaggctggagtgcagtggtgtgatctcagctcactgcaagctccccctcatgggttcacgccattctcctgcctcagcctcctgagtagctgggaatacaggtgtccgccaccatgcccagctaattttttttatttttagtagagacggggtttcaccatgttagccaggatggtcttgatctcttgacctcgtgatccgcccgcctcagcctcccaaagtgctgggataacaggcttgagccaccgcgcccagccatctatgttcatttcaaaggggtcttccttaatgatagtgcccttgaaccaaaaattaaagagttgattaaagtagtagaaaatggtcatctatacaagtttcatgatttataagaactatggaaattgctccttagaaaatagctttctaaacatgaaaatacagttgattagaaacagtacacatgaggaactctggtttcatgcaaagttgaaggaaattcttgtgaaattaaaaatgcacccagaacagttgatgaagtctagtccaatgaaagggttttcaactgtttgatttccatcttgtcaaagaatcaacttttggttttggtgaatgaagtggtttggctgtttccccacccagatctcactttgaattgtaataatccccacaggtcaagggcgggaccaggtggagacaattgaatcctggggctggtttcccccatgctgttcttgtggcaatgagttctcaggagatctgatggttttctaaggggctttcccctttgctcgactctcatgccctctcttgctgctctgtgaaggggcgccttcctccataactgtaagtttcctgagtccctcccagccatgtggaactgtgagtctgttaaacccgttttctttataaattaaccagtctcaggtatttcttcatagcagcatgagaacggactaatccggtaatattctccactgtttttctattctctacgttatttacttctgctctattatttattgtttccttccctctgcttgctttgggtttagcttgctcttcttttgctagtttcgtaaggcagagtgtaggttgtggattcgagatctttcttccttcttaatataaatgtttacggctataattttccttccaattactgtttttattgcattccctaagttctggtatgttgtgtggtatttttgtttttattcagctcaaagtatttttgtgtttcccttgtggtttcctccttaatactttggtaatttatcagggtgtttaatttccaaatattcttgtgtattttccagttttccatctgttactgatttctaaattcattctgttgtgatcagaaaaagacactttgtgtgagttgatttcaaccttttaaaaattatgaagacttgttttgtgacctcacatacagtccattttagagaatgtttcaggtgcactggggggacatgtgtattctgctgggcttggcagagtctaataatccctaatatacctcgcttctaatgtaggtgttcccaccagagcatgccagtgtcatgtccacaataacaaacaaaaattcttttttttctttttctaaagccatattgtagattcccagttcaactataatatatattattttagctatctatttaaagtgtcacatcatcctagggacctttcaacggactgactacatttctcacaattatagtaattactgaaaataaacacatgagactattctcttcaactaaaatatcatcttattttacatttagtacaattgagaaatttgcatgtaaagctaaggaaggacacagctttagaaacaatggactcatttctctccagacctatgtgaaagttggtttgacagtaattaccttatgggagcccaaagttatgaaataaggatgaggaatgattgttcccatcacagacggatcaccacatcatcccctgtgcatttgcatgttgtgtactgatcagaggtggcgtggtgtggaggggcggcagtggtgacgtggaaatgtaaagaatttcgtgtactgaggatccagttaaaaatcacactggaaagagaaccacatatagtcaaggaaagaagaagtggcctacaaacctgtgatatgatcttgaaatgacttattttaacaagcatacctcccatctattatataaaataaaccgaagttactagaaagagatgggggttaaattccctatcacttactagctgagtgactttgagcctgtttcctagtctctgtgagcttgtgtttcttcatgtgggtaatagaagtcataataatactcactttagcaatttgctgtaataattggcaacaatatcttgaagcacagattataatgtccagtatgtaatagccctcttgtatgtcgctgtattctttctactgtccatagttctttaggttattagactgacttatgaactttgagcgctggtcatcagacctacttcacatggagcctcgagacccctccctcgaattatcagacccttccccctctggccatcatcctcctccctctgatcatcactgtgcgccctttgaccatcaccctcttccctctggcatcagactctcctccctctgcccatcctcctcctccctctgaccatcaggcccgccttacttcctcataccagcagccgtggagtggatcttcaacaagcagccaacagcagccagggacagatcctcgggcactgtttttctgtccgaaaaatcagaatcgtatcaaagggtcggacacctggactggcaagacacattggggttatttataacaggggaaaatgaggtctccagggaaacaaaccataataaagaatatgaactcccgcagaccgaattgccttcaacgatcctcaaagacttttgtgtttgaccaatatcaattaattacatcagtaaataactgcctgagccttgtacttctgtcctcccaagatccagaatgacttctgctttcaaaatgaatttcagggctttctttgaagcagtcttgtaaagttgttatatttagtttaaattcaattaaagctcaatctgaaagctctttctgaagcatttgttccacatttacatgaaggtatttgctcttaaaattgttaggggtatagctcatttctagtaataataagtggtatttcataaaccaggatacatgatcatttacttcctgatagcttgcttctcccagatctaattctattcttccttgagggctgttggtgccagtgccagggctgcaaacatcagggttagactggagagtgacccgtgtgctccttcacccctgggtggggcctctgtgcttatcagtaggctagcaccaggtgcaggagacagatgtgccgcctgctcacagggcttacctgggacaaatgtgccgctcgctcacggggcttacctggggacagttgtgctgcccgctcgtggggcttacctggggacactcactatgattacctgggacaaatgtgccgctcgctcacggggcttacctggggacagttgtgctgcccgctcgtggggcttacctggggacactcactatgattacctgggacagatgtgccacccgctcactatgattacatgggacagacatgctgcccatgccggggcttacctgggacagacgtgccacccactcactatgattacctgggacagacatgctgcccactcactatgattccatggggacagacatgccgcccacgcacggggcttacctgggatagatgtgccacccactcactatgattacctggggacagatgtgctgtctgctcacagggcttacctgggaatgaagttccactcctccacttgcttagttcttgtttatttgtctctcccaccatttcaagtctttgctatcatcatgaagaaatatgcagggtgctggctgtgcagtgatgagctgggagaaaatgatctgtgacagagctggtagttaaggaagaatcccttggctgaagcagagtgtaagggatgagaagccaaatgggtggagagcgggagcaggggaggagggtgagagcatgagagggacactgcatctccagaggctggagaggggcaggggtgcagcttgtcatgggacatgtaagagggccagggactgatgcagagagggacaggaagcagcctgcaccggcactgtgggagcaggcagatgggaacgtggacagggagttagtgttttctcctaaatgccatggaagacattgatgtattttcaacagtgcagatagaaagcagtaaatggtttcaaaaatatcccaaacaatacaatatatagaatttcctgatggatttgacttgcaaacagagtggaagaaagaagtatgatggcatctatgctttgtgctttttgagcaattggttgaatatggacaccattttctgtcactgagaagactcagggaagggcgggaggatgggggtaagtgtgcagggccggtgaaactgggagatccgtgagatgcccaagtggcaacgtcagctctgaggaaatgacactcagagacatggcctggactcgaaataaaatgtgggagtagttagcacacagattatgttccgaacctggaaatgaatgaccacacctaggaagaaaaagcaggaaaagagaggagagggcccttagagatcccaacagagggggctgaggtgtgtgtgtgtggtgagttggaggacagccagaagaaaagatgacgttccaacagctgagatgcagtcagggcgcagcccattggtatgcagcgtggaggtctttggagacatcactaggaaccgtttactaaaatgtcactaggagcagtgcctgtagaaaccagatcagggcacacgaaagggtaaatgggagacgagggagacatgacactctgctgtgtggactcagaaacctttctgcaaagagaagccaggaacacagcaggatgcaaactaagacgtgaaaactcattcttcgaagtcctttcagagtcctacctgcttctgtttatataccgcctacatttctgaaaattctagtgtaaaacaaacatgtatatattaaattacgttccttttacttttgttaaataaaaagtagtcgcattagagaagagcaaagctaagaaacataatgaaatgatgtgtaaggatcctaacatgaccactaaagagcaatgcacctgagtgtgaacgcatcaaacgcttccaggcctggcagtcaatccatgtgccatggcctcttacaaggaagtcatcgttctaacaccccatcggtagggcacaggctttggttattttatcagtgcacaaaaatgaattcacactgttactggctttcttctgctggtgcacattaggtgtgatggctccttgggcttacggatgacccctgtggctagaggcgagggtgaagataatgggttcacattgcacagattaaagcagagactctattgtgttcagaagaacctagagttaatgggccacaaacagatcatcttctggcctccctagcagagccctcggttgcctcctgacacagtccatttccactttgacacaagtgtttgccagctttgtggtacctgattattagggtcctcttagttctgtgattgctccaggaattcggtaaaaattgtcatctggaagaaccaaattgcagttcttaactgggtagaattcaggctcttcaattcttgattccattcattacgtgctcactgtaagaagtggtacctccttgggatattgaatcagaaaggtattagagaaagggctattcatggtgtagggatctttggacttgaaggtgaaatttcaaacatcttcaatattcattttggttctgggagaggtaggaaaactgtctagaaatggtccatttataatcatatatgtgaatagaacttagcattttggttggttggttggttaaatgtgtgattgtgaaatagggctatgatgagttgacataaggggaaatcgacctttaagtagggtgaccatataattttttatccaaatggggtcatgagagagggaagagtggtgctattaacattcacattgagacagatgaaaacattcacgtccagacagggaaacctggatgtgctgtcatcttatgagggcttgtcatttgctaggaacaatttggtggtcgtttttccttacacaacaaggagagaccaggagcctgccctcttggtagatcagctaaacatgtccacaggattttgcttccaagatgaacatgggtgtagctttcaggagtgtccatcgagcatcacgattcgaaacctgaattttcaggggcttctctgtcttgtcaccttcctttgctgcatgcttcagtctctgcttgaatttgcacctggaaatggggttgaaatacatttggtgcagaacgatagcatttcaaacctgtctaaacagtttgcagacattaaaaaggatttgtatgccaagaaggaggcccctagctcatggggccagccccagtttgccttccgaatatactcattttgctgccgttaaagactttctgtgtaatttgagtcaaaatatccctattttctagttataccgattttcttcacttctaaaccccaagccaccataacacttttttcaaagtctgttttgctcttcccaccccttccagctccttgggggatttcaagatgggattgtggagcatagttaaatccatcgtaattacattcagtcagctgtatcccctcttcttctttgcctttgggatttcactactttaaaaaagtattctctgttgctgaacaattaaacataacgctaaccttgcagtcagattagccataatgaatatggtgtgggcatttgatactaagttacgtcattttaagcaattaaattaatatctcaaagtcaaaaagctaattccaatgattgctgtagacattttaagaaaatattttccaagagaaaagggatatcaaaatataaccatttttcttttgccaagaatacattgcatttgttttaggtacagataagaggcattttaggtatagattaaaatctgtggtgaggaaatgtagtcaagaaaagggctttacttgcactggagaagacttcccctcatgcacggccctcactaacttggagctgagctgcttgctgtacacgagctgtgcatccaagtgagcctctgtagtccagcccaggactgctatctgctgttgcctccggctttctggtcatgctgggggagttggggtaaacaggagcagcatctcacacacacacacacacacacacacacacacacacagacacacacacacacacagacacacacacacacacacacacacaaaacagctctttctgaggttgggaaggaatcattctttccaatggcatcgttgcccagcgttggccagactgtgatctgtttctgtccaagaatgaagacagctttccctttctaaagctgttctcagctgttccctcatttcacaagctgctttccagctctgatgtctgtggttgctgtagcagcaggctaagccacacctgacccacagaaggacatgaggttggttctacctcacagagagaagctgaaatctttgttcctattaacacaaagataaggggctcggaagtgtgcctgagcgaatgggactgacagtagcaatgacggtggaagaaagcccaagaacgtctccacagagggatgcctggcaacacaggagcaggcccacatggccagcatctctgaggtttaccttacccgcaacaggcacagctggcctctctgccccatgcatgacttgccacatccctgaaatacgaattgcatgaattttatgctggaacaagctgcagagtgatcagtcacatttgcagccctgtggactatggctattggaccgtacaattaaaattaagtttgacattaaatctaaaacaaaattttttgaaaataaaaaggctagacatggtggctcacatctgtaatcccagcacttggggcagctgagatgggagggtcacttgagcccaggaattcgagactgggcaacatagtgagactgtctatttttctttttttgagacggagtctcgccctatcacccaggctggagtgcagtggtacgatctcagctcactgcaagctccgcctcctgggttcacgccattctcctgcctcagcctcccgagtagctgggactacaggcgcccgccaccgcgcctggctaattttttgtatttttagtagagacggggtttcaccatggtctggatctcctgacctcgtgatccacccgcctcggcctcccaaagtgctgggattacaggcgtgagacaccgtgcccagcccaagactatttttaaaaaatacatttacaaaataagatacatttaaaagtaagttgtctcatctgacggcagccttgcctgggacactgctccaaaggcaatcttagcagggactcaaatctgattgttactgctgggtcttctccctgaccctgggaggtataactacagaatcattcatgcagcatttgcaacttaccaaagggtaactttccacagttcccagcgttagcttagcaaccagagctgcagaatatgccgtcctgggcagaaaagggaatggtgagtactgtcagttgagctttgcatcttctctaccttgttgaggacataacatctccatcagagattcttacaaacccaccaccccccgacacacccccaagaagaaaagcctgggaagttctttctacccacatgccatctttagaagttctccaactttatggtagaggtcatcccgtcctggaaatgtcagagaggaagattatagaagctggtcaggaacttaatgaacatttcctgcaatacactcattgtggctagtgtcaccaactttaacaagtgacattaacaagaggcttatctagctagcctgagtcagttttgtgcctcggtgtgaaagctatttctagtaccattttgcttatagccaggaatagttcatatcaaaactgtggaccagagttcatttttagaggacagagctgctaagcagaaagcgacagggggcccaacctcaccctcctagctccttccctgttgacttaaccttttgaaaacatagacatgggccaggcacggtggcaaacacctgtaatgccagcactttggcaggctgagataggcggattgcttcagcccaggcgtttgagaccagcctagccaacatggtgaaaccctgtctctactaaaaataaaaaattagcggccgggcacagtggcttacgcctgtaatcccagcactttgggaggctgaggcaggtggatcacgaggtcaggagattgagaccatcctggctaacacagtgaaaccctgtctctgctaaaaagacaaaacaattagccaggcgtggtggtgggcacctgtagtcccagctactagggaggctgaggcaggagaatggcacaaacccaggaggcagagcttgcagtgagctgagattgtgccactgcactccagcctgggtgacagagcgagactctgtctcaaaaaaaaaaaaagaaaaagaaaaaaattagctgggcatggtgacacacgcctgtaatcccagttactcaggaggcggaggctggagaattgcttgagcctgggaggcggaggttgcagtgggaggttgcagtgagccgagatcgcgccattgcactccagtctgggtggcagagtaagactctgtccccccacacacacaaaaaaaaaaggaaagaaaaaaagaaaagaaaacacagacaaattcaaagaggacatggaagcttaagctagaagacaaagaggaactagtgaggggtgtgtgacatcagccaaagctgttggcagggatgtgtcctagaaggcagaactttcagcttcctcaaggtcgttccttagtcgttgccactgaaaaatgggtctcgatgggactttgaaaaaaacagacccggcatctagtgagttgctgaaacttgccagctgtaagatctggagtgtttcttttaaactgtaggccggtttcctcatctgtaggattatgtcacactatctaccctgatttcataaggtaatgctatgtgagaatgctctcacttaacttggaagaaggtcaaagcaggatgatgttactttcctcaattctcttttaaagactttcttgagtgctggatgccatgagggaaagcgtatccgaaacactcatgtttctcatggcactgatctagggctcaggggactttgcacatcattgtgttttacctgatgtttaatcccaggcctgacagtggccctgcctcagatctcacgtcagatgggggcgggtggggaggacaaagccttccagcctctgtttctccagtgcagtcaacagaatgagctcctgtcccaagagcctgcaggatataccaacctgagagtcagacttcagcctgcagctccacaataaaaaaaaataaagcaagagtagcccctgcaagacgccaaaacaactacggagcagatcaccatggaaaatgcctcagccagacatgtccaggtccttcagaaacacattgctcatagagaaataagtttttgcaggtgtagtgagagtcaacatgaacataaaccaggcagttcgtcagtggccgattcagaagccggagccaagggtcctgactgagggaactgaggcacacacctttactctctgggtcttagctttaagttggggagagggtgggttagatctctgctttccacaagttctaaaaaatgttcaaaggcattaagtaggggaaagatgatctaataagtttggaaaattctggattcaatgcaatttgcttacttatcctaagatttagaagctattttaagctgaaattctccacggctcccagaaggggtgtgatatgcagttttagcccaaacttaccttgccatgatatcttctttccaggaacgtcagttgtgactgataacatgctggacccgtgttgggaaaactgaactggatgatctcaaaggccttttcccttcagatattctctgactgtgactgcttgaaggaggccaagaattagagtttcatgtcagaggccctcattgctaaagaagtagaggctcagtgtgattgggaaggcccacgtggaactaggtcatccccttcagctgcttcccaaccactgctctgtaattacaatgtgcatccaggaagttatcaaaatcctgtttggagaatattggattagcagaatgtttgattaaatcaataagtggaatactaaggggtttttctcttactaattacatctggaggaactaacctcgtctgtagggatagactaggaagctatgtttcttatgtaaatgaagatagcctaaggaaaaaatatctggaaaaggtaccctttcaactctgatttgtaaatgtcaaatagaggtgctcaaggagaaaagaataaacaatttcatgaaactcaacataaattctaattataataggaatagttgaattcataaattgtgtactctctgaaaagttaaatattagcctgaaaatacaaaaaggacttggatatttcatttttacactcttacatacacacaactttttcctcccaataaataaaacgatatttttgagggacaaatttggcaagttttgcagatgagggtgagaccttattcacttcctcctaaatttaacctaggttaagaatattttcagtcactatttgttgaattctaggtcttagtgttctacctggtcacaatttgtattgagacagaaaccagtgaactcaaatcttcatcagccctcattatcagaaaactttggctggacagctgattgatttgctggttttactgctggcttaatattgatctgactatgtatttcccttggctcgctaaatatatacaaatcaagagaggtttttgatgtcttaaaaggaaacgagtaactgactagagttattgcctaagacccaatatgcaattcagcttaacccacagggcacctgccatgggccacttaatgaggacaccatccaccactgctcatgctgcaagctgccaatgcccttcttaccccttcacctcatttaccccattatctgtaatctgaaattaccatcacctcccctcccactatattttttatccctctcttcttcctcctcacttcccatgacgacacctctgcttcaggtcctcatttcggttcagtagtctcgaaagatctctcttcccattctttcttcaaatgcatcgtgtcctcctcagataaaaagatctttcttgtcttcagtgggtttccactgcctaaaggataacatccctattccttattcatcaaaaaatcttccattgggtggccctgattatctggctttatccctcactgggccaccaggagatgccacacgtgaaaccacatggcacagctccccctcccggtatatacagcacgttgttgtgtctctgccctttggtcaatagtattctctttccaagaatgccttccccacacttttcttctagcaaaacattgctcattcattcaagcctggctcatgttgctcctctgtaatgctatcctactttgccttaaatgaccactccttcctttgtgttctgcactatattgtttatatcgttgtccgttggattcatgcatgtctcttttgtcactagcagtgatatacataaacatcccaaaaaaaaagtagctctgggacaggaatgtgtcagaggccttagaaatggtattttatttagtctttaaaaataagtcatgttattatatacctcatagaaacaggctcacagaggagaaattgaatgccccaggtcacatagctggtcagcagagctgggattcaacccagctgctccgtgtcaccctttgcattgcttcctgttacttctccactgttatcccacctgagcctgtgtgccttcctggggattagtcaatgtgagggtggctccaatactgtgtttctgttgttctgaagggctctgttctttgttcatcctttgttaggagatgtgaagacattctgagggagtggaagataggctgcccatcctcagggctcaagagctggagagaggggataaatgaggaagtgctttgaaagtggacacaggatgacattagttaggcatgaggcataatactgctgggagaatacaggaaagtcattctccttcgacttcctcacattatagtttttgtacaatttggagttaatcaaagagtagataaaccgagaaaaatgtgtgttcaacaggaaaaatggcagggtggggctgttctaaacctggggcagcagttccccactgtatctgggacagagtcatttaatttcagtagtggcttttgaatctgtgaggcccacttgatcttctactcctatcagctcagtgactcattctcccggcaaagacttggcgtcatcccagggaggcagagaggccaactcagtggtacccacaggaccgagtgagtctctcacaggctgcatccacgccccccatggcctctgctaatgaggtccacacctctgctcagcagcctgccaatgtgatgggacacaccccatgctggaagagctcccaaaccagactttgtggaaacttgtggctgcaggttcaaaaggctaatttggttttccactgtgcacagggctgccactcagtgcagtcttcagattgagaacacttcctcccactatgggcagtttggcgtgaatgagtgagatacgtagtttctggatagcacccaggggaatgccgaggatgtgcacacaaagcaaggctgactgttcctttgctgtttgtctactttttcccattttgtgctgagactcatctttccagcacaaacaccagggtgaggaattggaattttagtgctggaagtctccagaactatgatctagtgctcattccctctgatcccattgccctgacattatctgatgcttccacagctccttgtacagggaggtgtggagttgggagagcagcagcctgtggtacagggctgcccacagggaaggaagaagacatggcggggacatggcctgactcccgatgtgctccttcctgtagggtcttccacatggctgggctccctcccgtcccagcacacatcctgggtccatgtgaccttgagcttcacaaggtcaaatctgtgcagatccaaatggtgtgtggatctaattttcttcctcaagaagccttgcacaatctggccctgcatgcttcctctgagcccacacttcctgtgagcatacacttcctgtaagtgtatacttcctttgagcgtacacttcctgtgagcttacacttcccatgagcttacacttcttgtgagtgaacacctcctatgagcccacatttcctgtgagcccacacttcttgtgagtgtacacttcctataagtgtatacatcctgtgatcatatatttcctgtgagcatacacttcctgtgagcttacatgtcctgtgagtgtatacttcctgtgagtttacacttcctgtgagctctcacttcctgtgaacccacacttcctgtgagtgtacacttcctgtgagcacacccttcctgtgagcttacacttcctgtgagtgaacacttcctgtgagcccatacttcctctgtgtatacttccagtgagtgtatacttcctatgagcccatatttcctatgtgtttacctcctgtgagcccacacttcctatgtgtacacttcctttgagcccacattgtgggtgtacacttcctgtgagcacacacttcctatctgtgcacttcctgtaagcctacacttcttgtgaatttatacttctatgagcccatagatcctatgtgtatacttcctgtgagcccacatttcctccgatggtatacttcctgtgagcacacacttcttatctatgcacttcctataagcccacacttcctgtgagctcacacttcctatgaggccacacttcctatctgtgcacttcctttgagcatacacctcctatctatgcacttcctaagagagcatgcttcccgtgagcccacatttcctatctgtgtacttcctgtgagcatacacttcctatctgtgcacttcctgtgagcatacacttcctatctgtaaacttcctgtgagcatacactttctgtgcacttcctctaaacacatacttcctctctgtgcaattcctgtgagcccacacttactatgatatacacttcctgtgagtatacacttcccatgagccccccttcctctgtgcaattcctgtgagcacacagttcctctctgtgcacttcctgtagcaccactttctctctatgcacttattctgagcacacacttcctatctgtgcacttcctgtgactgtacacttcctgtgagtatacactttctgtgagcccatgcttcctctctgtgcacttcctgtgagtaccactttctctctgtgcacttcctgtgagcccacactttctgtgagtgtacacttcttatgagtatacacttcctgtgagcccacacttcctctatgcacttcctgtgagcacacacttcctctctgtgcactttctctaagtccacacttgctgtgtgcattctcacctgcacaatcactcttgctcttggggttcttgcacatgattctttaccaccccagaactctggaaggtgttgctttctgagacctacctctcttgtgtttctccaatgccagttcatccatagatttcttcctaaataccactggcctccctgtgcagtgctttcactgggacctgtgttttttcttggtggcacttacatagaaggattgttgtttaatgacagtcgactccaagactgtcattggtagatggtggcttccaaaatggcagaaccaagtcagccttgttctttgtggtatctccagggtcagccttccctggtgttcccaaatgttccctaactgaaaggatgtattacagttgggcttcctctccctaggagacataattaaatttaaaagtgggcttgggttgtttgtagtatgcagttttttacaggggaaccacagaatctttattccagatttttgaaaaggtgcgcggtgcatttcatttagtccggtaagccgtatttttgtgttctgttgtcaatacattttcagacacacatcacttgcgaaactcctaaaatcttttcaaaatgctctcacaagcacataaacacatatcttcttccttattactcaggcacttcagacccagagaattgcttttagagatcttgatcataatacctcaaagacagttttctttaggaagataaagaacactaaaatgttaataatagaaccttgagaccctctgaaaagaagacttatgtcagattgataatttaggtagagttctggaaaacattaatctacaaacatatgcctgatagaaggatatttgcagaaatggctgcaagtgcaatattgttccagctggtgagtgtggtccataaaaattcagtctttaaaaattatagtatagtctaattgtaggactgtgtgctcagtgaaaatgcactttacctatagatagggttgggagaaccaccctgtcttaccacagtgtatgtctgctcaacacactgccatgacctgggaagagaactttagggggacattcttatgaagcccttccctatacctttttgttagttccttataatcccagaaattttttattagggtagataaatgaccataaaacgtttccaccccgttgaggatgtttcttaggacttcttttatgacaaccatctaaactcagccacatctgcctctggcgtgtctagtttggggccacctctttgcatccccctgtgtaattattttatgagtgaagtccctgctggaaaccagccctcttcccagtcaaaatccatctgtttctccactgcctgtacatgcctttctctttacaatacagttagaccatttgagtcaccttctctagagagataacacaaaagcagaatcacagacatgtgcaatcttccagtaaatgtcttccccccatacaccatgtatggggttgaaaaatggtatttctataaaaaattggaatctgtgaagacagggttacagtgagaaatattaatacacacattgcagagcaggctggtgtcaggttctgtgccaagggtctgtggtgcctctgacaaaggagaacaatgctgaggggacgaagcagcaggaggagatggtggggggggtgggggggtggggggggtggggcgagctaattatccaaattggaaaaggcccaagccccttggattaacacacatcttccctgctgaagaaagtgctcagggaatgatcatgatcagctgccatgacctccacttctcctctcacagggcaccaaaccaacatgcatcaggtggatggctgttggtgatttacatgggaaatgactgtggtatgcagggatgcaaaatcagtgtggcttcttcctccagaagtatggggccacccttgcctcaactcataagaatacactgatgttctggtgttgcctcagaggccttagcttacacaattcctggggtcagggttgggtctatccaaccctagggtgtttctgcagaaaaacatagaccagtgttcctaagatgccagcctggcttctgctcccaatctgcttcctctgaatcatacctcttctttgcaaacgaggtgtttttgtgaacagaaaatatgtggacttgactgcttcatttactctctcagaagttcattaaaagcttacatacacaccaatcaaggctttttatgagacacagccaagatgttttatgtgtatggtgccaataaacacacttctccagaaggaactagtactatttatgtaaagtagacacttaattcaactgaatggaaatagcaaattagagaatgcttgattatggcattgaagatgctttctgggatgaagacattatttggaaaatctccagatgctcaaagcttgaggaatgctgggatcaggcaggtaactctgtaatagaattggacagagactaattctgctcaagaacagctcaaatggaaagctcagatccacagggaaggagccaacccagtccctttaacttggctatggtggatcaagatcgtcactggaactctttggttgtgagactcaatatttattctgtgtaggcaggagcatattggacccatcatgaaactggtactgtcataggctagacctgtgacctcctaggtgaaataacaaaggctggaaagaggtgtccccatgggctttggggaagacttctcttgcccaacagtgagcttgagcaattacttttctaaattgattggtttattaaagaaatattaattggacaagacaaccatcaatgtgaacctagttcaacacaaagaacattcaggccatcagatgaccaaagtgaagcttcctggtacttagcatctgccttatcaactcaggcctgacaaggaaacatgtcagttgctggagaaacacccataccctaaacacctcctgtcacacagtggcaacctgaattactgtgaatccatttatgcggctctcttctctaagagcagaggaagtaggtgtggccagactcagaggaggtcctcaagcaggaggtgtacaagtcagggttctccagaggaacagaaccaatagaaggtagatatagacagatacagatatataagaggggatttatcagaggagttgtctcatatgcttatggaggctgagtcgcatgcaggccatctgcaagctatagaatgggggaagctggcagtgtggctcagttcaactctggaagcctcagaaccagggaacctgaaggtgtaactttcagtccaaggccaaagtcctaagaacttggggtgccactggtgcaagtctcagagtccaaaagccagagagcctggagttctgatgtccaagagcaagagaagaagggtaccctagctccaggagaatgggaaggagagggcaaattcacctttcctctgcctttttattctatccaggaccttaaagtgattctaatgccagtctcttctggaaacatcctcatagacacacccaaaataatgctttaccagctatctgggaatcccttaatcctggcaagttgacattggttaataaaattagccatcgcagtgggtcagggagaaggtggccgagtgtctgcttcctgtgcggagggcaccacaccttctgaatgacttcttggtccctcatagcctaagaagtccggtgaaatgcatttgatctcttgactactttttaccccatcagttgtaccatccaccttccagctatcttcccacttcatgcccatgattccatgcactatttatgctggagcactacaactaagaagtctcttttgcatttctttcttccctccagcaacacatggccctttatgcagctctcacagccagtctgtatgagagacagaaataatggcattgcccttgggaaaggagaaacagataaagattccttctcttgacttctagcggcaagcagtgacaaagtgccccacaaaatttaaagcatcaaggagtagcccgtgggaagatatccatcagatcctccaatatgtgaattaggtctgatggggggtagctgctcactggtcatgatatcttgggactcctgcttctatccagcccctacatcgctctttcatgattttaaatgtgcactcaaggagctcactccaaatccaagcctacatgtatgcctaacctactccaaccagagagctccatatttatgtgaagaaaagggccatatctgattaaacaaccatgattctgtttgcaaacaccaatccacacattatgaaagacacagcaaatgtccccaaataattgattttattcacaccaagtttactctgacggattaccacaagtaaacatgtaaacatgggtaacacttcactatagtatagttcatgccacttgcctgatagaaaaccatggagcttctcttaggaatccattttggttttggggtttgtttgtttgtttatttactttttttatattaaaaagagagatgaggtctcactatgttgcccaggttggtctcggactcctggactcaagtgatcctcccacctcagcttcccaaactgctgggattacaggcgtgaaacactgcacccagccaggaatcctttaaagtacaaggaggattcagcttattatagagccagtctatacacaataacctgaattatatacctaacatgatctaaatccttagagttttagaaacactcaaaaatttttttaagcctcatttctaataataacacagtgattaaccacaatgcttggcgaattgcctcaaaacctttttggaagtagggaggatataaataaatcagttaatacataaataaaatgcttgcagctcagcgaccttctggttctcaggtttccatatatcaaattatggattgaccccgctaagtaatctccgaagtcttttctatgtagaagtctataaattttctgttaatcccagggtgagttggggaccattttgtcttttgtccttgtcgactgtctttgtgagaagctgagtctgcttacctgctgggttcagtgagcaggtatgaaggcatcatgtatggacattgaagagttgcccagagataagctctcacgtttggagaagcatgggtgtgtgggctactgttggcttcagcttgtgtacaaggatattcaattttagaaagccataattaatagtttctcttcttaccatattgaagaagtcagcttgttgccttctggcgaattaaaatttcattaaacttttcagttaagaaaatacagcttgttgcaaaaacaccatatgcaccttacgactcttttccccacccctcctcagtgcgactcccatcactgcacaggtggaggcagtgaaggggatgccttgctttctgagctgctgaaaacatcagggtttcagttctgtcttgtttactgctctatctgatcaccttgcattgtgcttggcatgtagtagctgctcagtacataccatttgaatgaacaaatcaatcaattaatcagttaatcagccagtcgatgcaggtgatgcctgttcctaaattcctttggtcccagtaggtactttgcaacatttccctttcttctgcttctgttagaagggacctttttaaacttgaagggcagaggcccccacgcagctcatgcagatggtggtactaactggagaagcagttacagttgtacctagcatgcatttctgttggagctcatttcaagtaaatgacttatactttatgtccacagcaaagaggcccacatttgtggcaatcttggtcagtacagtcaggaaggaagtgtagctgaagatcactgaggaaccagagaaattagtgtatatctggatttaatgatcaatttgcttatgttaaaaatacatttgaatatgatttactgcccttcagttaatgctagttccttgcttgcagcaggaccaatcaaaaggagctaaaccttaaaacccagatggagatgttgaaggattctagctaaagtttatgcaattaattaggcatcccctattcagaatacactttctatttgtgcttagaattgaaagatatcgtactcccaggaaaagtacaaagaggaccacgagatacattgataatgaccttatccttaattcattccacacatactcagttaagtggcttaaataagtgatagagattttaatttaaatgcgagaatataaatgggcaaatatttgaatttaagtgaaattaacacaacgtgccaaatattgaataagaaactggaatttagttggcattggataatgtatttggtttgagatttgggtttccaaactgaatatataaatcaatgggcagatatacagtgaacacaaatataaataaacacagttccatgtttactgtttataatacgtccccccaaatatgtgcagaagtggaatgtgaagacaataaacaacttttttgttaggttgggggcaggggattctgaaagctacaaaatatcaaaccatttattcattgcatcccatctttaagatacagttttcatcaatatattttcaatgtttatacatgttacttagttctgttctttttctactcaaatgattgtacagttgattaatgtcacatggacttccattgtgattattcttttagctctgcctattcacattattaataaaaccatgaaaattaaattaatatgaccttatcattgtaatcactactttcatttttgcatttttctactcacttttaccaaaaaaaaggaacaagatgggaaaacaaaaattacataaaaacttcagcgtatggggaaaaacagagttgtctctaaaaaggatctgctctcggcatggtagcatcagagcatctactcaattgtcagccataaatgaagttcagaattggacacaccttcacagtcttccatatgccaaagcggattgttccaacatcagatgactccctgccatgtattccttgttagtttcctatgctaaatactagtaagataccaaaggatgttagaaatctgaggagaagttgcctaggatttagagatcactcctagtctaatatcagtaggtttttaggattacaggttattcaagggctgcttcctgtgtgtagaggttgtattatgagtcctgaaaggagagagaggaaaagagtctgccgtattcagaataaaaaggcaacaaagacagagtgttttgcggattgccagataagtcttttctgaccgttcccaatcctgaaagttctaacatggagactgcttggtctttgaaggaggtgaattgcagtaaacaaatcatgaattatcatctgcagtagatttgaaagtctttgagtgaatataactgggggatgtaaccttaactttcagataagtttctaaacagttcagcatatcattttaaaatgagcaatggatgtttaatgaagaaaatatgaaattcaggttatcatgtaaattacaggtaaacaaacaaaagggaaatacaaaagtgacctatactctaatcacccaaacagaatcactgttaacaagttggcaaaattctttctgggatttcctaggcatctatagtccaacttagctctatgtttatttaactacatttatgcatacaaatacttttctttacaaaatggtgtgactttattctgtaacctgctgctttgcatagaaataaatgatgagcatgttttatgtctctaactacacatttatcttgtcttaatggctgcttggcattcatttcttgggctatagcttcacagatttagctactagatagtctccaattatacgcaatagcacatatacctttgtgccgttttttgtacatatatctttgtacattcattaaataatttccttaggataagatttttcacaaattaataggtcagaagtatatatttttaatacatatgaggtgtgttggagaattatcttttagaaaatttatatcagtttatattctcaccagcagtatatgagggaatctgttctaatcagacattctcaacacaaggctttatcattctttttaattgttgccaacctaatagatggtagactctactaatttgcattttttgattacttactaaggttgaatttttttcatgtttattgacctttttctcttgcctctttgtgttcatttagccctggtatttggtatgatttctcctaatgctttgcaagttaataacttattcattaattcactcatttattcatttattcatttacttatctacatctctttcttttctgtgtgttgtaatctcatcccccccatactctgagctttaatttgatttatggtattttgtggcatataaaaatctttccgttttatttagccaaatttaccaatcttttcaattataattttagacctgaacaatttgggatctctgtgaattcagttattcatctgcatattcaagctaaaatagagcagtggcttagaaaccatctttcctaaaactatgacaatgccatttacagtaagagtcaatgaaatggggggagagtcattcaatgttcagaatagaaagatttagaagaatggcaaagttgagcatcatacctttatgaagtgaattgtgtccttctcaaaatccttgttttagccctcacctccagtctgactgtatttgaagataaggcgtttttttagggttacatgatgtcataaggatggggccctaatccaacaaaactgacatccttataagaagaggaagagacagcggagcttgctctctctgccctgtgaagacatggtgaggagaaggctgtctgcaaaccgggaagagagccctcaccagaaaacaacccctccagcaccttgaccttggatttccaggccccagaactgtgagaagttaaatttctgttaagactcccagttatggcagccaagcagactaatccacttaggctgatgcagtcaccagttctgctgggcacaattctaagatgcctcccaaaatgctcacttggccctggcgcctacacaccatctcccagttgtttactcaagcactgatttcagtgctgctgcaatgggatttggttataattaaggtcctggatcagttgccatccaaatggggagataatctgggtgggcctatttaaacacatgagccttgcttttagaaagacccctacagctagtcacagaggaggcgactagagagactttggatggcctctaggaaagcagacctccttgtcatgaactgcctgggggccacatgtaaagagctgcaggtgcctctagctgagagctaaaaggaaagaaagacccgagtcctaccaccacagggccctgagttctaacagccactgagcttggaagaggactctaagcccaagaaagaaatatagcccagccaaactcatgggaccctgagctgtgagtccgtttaagctgagcctggacttctgacccactggaactggaagataatgcatttgcattgtcttacactggtaggtttataggattttgtcacattgaaatggagagtgaatgtgtcagtgtttacatccctgcggagcaaggagggtgccagctacggaggtggagtagggggcctggctctgcagctggggcatcgcagacagcggtttggctaacggtgcagctgatcttcgcaagttcccaccctgctcctcatgaaacacagttgcgcctcgaacaatatgggcctgaactgcaagggtccacccaatgcatattgaaaatacagaattgaaggaagaggaaggggagtcccgcatatacagagggctctcccatacagatgagtggaaatgccaccgggtgaaatctgttggaacatccatacagaagcaaaatattagggaaacaacaggttacagaatcctccttgaacattttttctttcagagaagtcaagtgtgtaggtatttggagctaggctaggtgataagagggacgtaaggaatgtggtgtctgtcttacatgtgaatattgaggacccagtatctacagccacaaagtgacgaccaggtatcacccagcagcaaacttctgaaagtcacgctctgagaagcctctgcctccgatctggggccttcacctttccaggggcccaccccatccctcctcccagccttctgctacctgtctctccacttcttctacaagcaccctctccaaaactgccacatgttctcctgactttgtgtctctgtgggattgcctctatgatgtatcaggaggacgtgtggttcaggggccaactgaaacaccatgtcctttggttttttgtgaagccatcccccatttcctggaaccaaaatagatcccacagcacttcctgtgtaccctgatacctaacaaaatgttttaaagattgctttagctggagattcttacatatgtgtgtcctcctgggacagtgagtccggcaaccaaccctcgctgattctttccctccctccctgcctctcgcagcagctggccaactgccccttctccagcaggtgctccctgcaggcttgtgaaatacactggagggcaattgtctggctcagactcatgttgccatcagcaaatgaccacgtttaagaatgttatgccacctctatatttggcctgcattattcatataaatatgcttggtagacaagggacagaaggcacttgtgtcggagaaagacagtttaaagggcaacgacctaacacactataaaatacagggagtggggagtggggtggagggagcaagccgcgcggctgccaggcagggccctgctcccctgggtgcacttcctccctgctcccgtgggtgcacttcctccctgtccagggagtgcactcgcttcattgcccagtgcgactgggtctgctttgcaggggccatatctgtctgattgtgcttgggcagatttctcttgtctccacctagctggggtgattcaagtaggaaaaaagaaaaccctcctgcacagattgtgcgatcatttcatttccttgcctttgtttgtcatttctcctgtctgaaaaaacagggaatccactaaaggccagaacattgtactctgcttccatcctcatgaaatcttggcttttctttgcaggaagcgtccaaaataacacaggattggtcctggggtcccaggcaaaagtgagaggtcagaagggtctccatggttctcactcctctctctgtgaccttcactagctcacttccttcctgcccagttctcattctctcgtccagtcttttctttgtcttcctgtggatgaatacatgcataaacataagaataaaggcaaaagtctcaatggaatctatcaaactgttcattgttaaccactttcctgtaggttgggtgggggaggttttactttcactttattcatttccttccttccttccttccttccttccttccttccttccttcctttctttttctgtcggagtcttactctcgctcagactggagtgcaatggtgcaatctcagctcactgcaacctccgtctcccaggtacaagtgattctcctgcctcagcctcctgagtagctgggattacaggcacccaccactatacccagctaatttgtgtgtgtgtgtgtgtgtgtgtgtgtgtatatatgtatatacacacacaaacacatacctatatatatatatttaatagagaaagggtttcaccatgttggccaggctggtcttgaactcctgatctcaggtgatccgcctgcctcagcctcccaaagtgctgggattacaagtgtgagccgcagcacctggcctattaatttctgtatttgattttttttacagcacatgaaatagttttgatgtttaaatgaaggaaacaaaagcagtgctttcgatagcccaagcttatctttcctaaatgaacccaaacctcacagttattccctttacttcccactcccgatcacacttgtcccaggtggatcacgtccgagaccagcactccatgaattttaggagccagagcggaccgtgaaggtgtcctggtagctgaggtcctatggccgctcatgaaattttagtgagccatggcttccctgaggctgtggcccgcaaagtctgaagggagtcacctccttcaaatccactgagcaaggcctggggagtaatgggaggtcccccgtctgactcacacctgacagtcgggcctgtcccatctctggcaccagcaaccgcccggggacggtgagggaccatggggtcagcctcagactctctgcacatgtttgctggccaacgttccagccagcgggcctggactggagggctgggatggagagggtggggcaggaaggcagagcctgccctgagggaaccgggaggtgttccgcgcaggctctgctgctttctgacgtgtgaccgtgtgcacaggatttgtcccaagtcccacctgcctcttctggaaagtggagcgatgatgtgagcaggcacagaggtcacaaggagaattcagggatctagagacccccagagcttgccctgtgcccatgctgcagtgggcactctcctggcatggccacgtctgtcacgcgtgatgctcacagcctgctcactactagaaggctttaattttctgaagcagtgatatttaatttatttgaaatttcaaatgtcattaaaggagacgtgctatttttaggctaggaatttaaaatgcttccaaaatgcctcatccccatcgctcttattgcaagcatgtattagctgttctcacgcctgctgagaatgccctgtgactgaagcaggggctgcttctgggggacagtgcagccaccatgtgggtcaatataaggaaatcaggatgatacaagtgatgtgggtttgcaccatcatcctggctgctctgtgtgctgacgtgtgtataacattgacacgaggatgcctgtagcagatgggggtttagctagaaagcaggaggcagtgcacgatgagtatggtgcagtatctccagcagacctatgctgggcagaaacctcacagttctgtccaaagggagcttcatccctccgatggccattcccctgcagtccgtgaacccccaggatagctgcaccgcatcagcagaacaattgcagtgcctttacagtgaaggaacacaggctccagctgtcagctccatctcaaaacctacccaccccactcatcctgcacacgctgccccagccccatgccccagaggctgcccaagcacctagcgaagccctccaggatgcttggctctgggcctgttgtttcaagccctgccctgccttctggctgctggatggggaattgcagtgagattccttccctccgaagctccatctggtgcaacatctggagctggtcccccagcataggaggatgtgagtgggatgatgaatggcacctcagaagtgtgctgttggggagggcccacctgtttaccaacatgattgcaaaacttaaatagctctggggattctgaactgctcttcttggggggctccccaccgagagcattttaggccctgtgcatagcaggattataaaaaagtcatatttaagacttgatcatgcttctggcatttggaaggaaatggatggatgaagaagaaacagaaaagattatagagaactggaaaacaacaatttaactgctaggatatgaatcccaaatgttataggggaagttctgggatgaagagaagacggagcaatggctgccactgactcagtgatgtgtaggacatggggaagccgggattgtggacactccccaccgtggtaccccccgctccagtggtaccctcccccgcccccggcatgggcagctcagaccaccgggaaagttccagcaggcagatacattgcttcccacacaagctcattgggagaaggcggctctttttttctcattgttacaatatgatttgattcgtggtgttgtaatgattagcaagcagaaccaatgtggtttctttccccagcatcgcttgaatctacagcaaactgtccagagaagggatcacagtgggattctgatgccttattatgatgtcaccttcacgaggaggtttagaggtttgcttttgttttgctgttctaagaaaaaagaatgtgccatttggacatttcaccttcaatttggaacttaaaaatttagtccataaacaggaaataaacagaacttttgagagctccctctctcatttggcaaggccccccacttgccctcagcacttgggcacccaccttgacttacagaggaagccctggaaacagccaaggatgggggaaaccaatcctgggagcacaggggtactcgcctgccaacctgctgacctctgggaccaaataccagggctccgtggagacatggctttttctgggaggatatactgaaaaacagagcaaaaggggaattgtttgctgtgtgagattgccaagtcagccctaggaaagaaaggcccaagggcacatctgcagaaggactggagggtcagtctgagctcatatttgccaagtctccaaagaataggcatcttatggtctcagcacgagggagaagagagaatttcacctaggatggcttccagtaagcacctgtgatgtctgggttctctccattcccaggcctgagagcggctgcacagtcctgattcctggagcgctggcccaggccgggtcctccatgtcaccccctttaatatctacatttattcatgcagacgcggactctgagcaaagtatcaggagcctggtgattcaagttgggagaatccaccaaagtgctttccccaccaggattcactcacttgggcctctttggaggctcttcctccccactctcctcttaaaggccaggagagaggctggcaaggtcgcctgtctccctcctccacacctgttcctagatagctgcttcctgccgggactccgtgatcttgtctgcaatgggtccagatctgtagactgtcatctaacccctagattcctacagcggactgactaccattgtccgtgcatagcaagcttgtccctaaagctcagacgatggcctccccagtgcttccccagaacccgatgtggttttcagtagaggcttcttccatggaagctgccaatatgtgtcccacctgccggcattagacctggggcacctgattgcttctgcccgccccaggatgcttgccccaggcctctcccatccatccaggtcacctcctccctagaccttctcagcagcccctggcttgtctctgagctgcgggctttctgttcctggactgcccttcaccctgtccccagagcctcctcagcactgatctgattttgtcactgcattcctgtgcttgtaagcctgtgaccagcaatactgtcacttcttagaaaacattttggtctcgacacggttcacacaggcaatgccccgccatcattgcttccaattgtgttcgacgggaagcagacagtagcagcgacggctcttggtgctcacccagacctcccttgctgggaggttgccccaagaccctgcagcctgttactgatggaggcaggtacacacatagccatccccttgccctccctcagggaccagctgtgaagtacagtgcgtgcgtgcacttccagatggcattcgactgcagctggtctccagttgggaccacatcagtgcctcccgtctcccctaccccaggccacttccctccctcctcctattaacatcatgctccccaataatccccacagccccgcctcagcctctgcttctggggaacctgacctaaggcaacagcaacatttccctggggctgaggaggcaggcatgcttttaaagaggcttttccatcacctttgagcatcacctgcctacgagatcaaccccacacatttgagtttggcacatgacacattgcacggcctggcacggcctttctttcctgccttcatctttcgcctctctatgccctgttctttgagcttagcctggggttctccacagaaaccacactgttggactcttttatgccttggtgcatcctagatgtcacattacagtagtttggagagacttttcttaggtgtaagtgagataaaggggttgctggaggtgctggctacagggcagtgacagagaaagcagtggggtaggcttgccacatggaagagagcaggtgaaggaggagacataattttttcacaggaggcagctgctgcctgtccagcacatgaaccaggggtacagggatggggtgcgaccagcagctaatctaactggtgtatcttcacattgcatgttaccatcaggatggagagagcaggtgctctctggaccctctgtctcccagcctgactcttcccaagactgtgagcacctacagagcaggcctcaatccataaccttggtattcttgtgttgagttttatgcccgctgcaatgctagactgagatgcctcttgtatggaaaatatttcttaggagtttagcaaatttatgtcattggctgatatttcaggccaatccattttgggattagaacattatcaggatgtaaccttagagttcacttagttccggcaaaacctcttaacttcagttccctcatctataagaataagggattcatttgtgatcatatagctcaggtaatccaggaccagaaacccaggagcgtgggacctgatccacagctagaggatgggggactctgtagctacagcattttcctgaacacacaagaaatccagtaagcagcacacactggctgagtcggctttccaatcagaaacaagcccttgacttgccggagttggaagactgcaagtacctgcccaaatgtccacccaacagataaactccctgttacgtacataattacaagcattctttacctgacagtcccatggctggacaagccaagctaagttttcagtgtacataaaaagcataaaacccgatgaagtggcctgcctaaaaattaatgtgatggccgcaattgcagcttttgtggccctgacgttagtctttgaacgagtctgccttctgggtcaagtgaacttttactctgggattatagaaagcaaagtaagtgatctcaactccctgccgcttatacaagaggggagttgttacttttactttattttattttaagatggagttttgcttgcccaggctggagtgcaatggcgggatctcggctcactgcaacctctgcttcctaggttcaagagattgtcctgcctcagcctcctaagtagcagggattacaggcatgcaccaccatgcccagctaattttttgtatttttagtagagaccgggtttcaccatgttggtcaggctggtctcaaactcctgatctcaggcgatctgcccacctcggcctcccaatatgctgggattacagtagtgagtcactgagcctggccttattacttttagataaaaggcacttgttacatcagccatttcacatccattgataaagatgggtgcttctgaaatggccacagctgacagccaatacacctgcaggtccaccctctgctggtcattttctgaccacagtaagtgctcagcagccatccccagagcaggggtcagcaaaattctacatcaagggtcaaatagtaaatattttaggctttccaggacctacagttttcctatcaactactcaactctccttttacttgaagcaatagtcaacacatagatgaacgggtgtgactgtgtaccaataaaactttatttacaaaacaacagcaggccccggggccatagtttgctgactgccgccattgtgtagcctgaagtggagctcagaagcaggggctccagccgtgggtggcaaactctcaaacccaatgacaccaacagtatctttggttagagcatttagagttttagccatagttcaattagcagctgatgatttgttcctcgatcagcccaagcatgtgaaacataattgttccttcaattcccatcagccaggaggtgacagggaaatgacctattagctgacttcaggcagcaggaaaagtccaaagttggctgctgccattgccatattgattggtgatccaagagaagtgtggtaactatgaccaagaagaaaaggtctaggggaactattccttatattgtggaaatattccatacttcgctgggatattttcactgaaatcgttttgaactgagaaccagggccattcctctgactgtaaagctttgtagaatatattcaattctgcatgttactgatgggtgctaaccttttgtgtgtgtttgtgtgatgttcgggcttaagggatctctggacaataataatgataattcagctgcctgggatcttgatgaaacccatccactccttcccacctttcccatgtcagatcttctacaaagcaaactgatgctttcagtaaaatattactgatgcaatccaagaaacagaaaaaacagcccaccaatttactcccatttgaacccctgaagcctgttcacagtattaccacattgttattgaagtttacagaacaaaaccatagatggaacccaagaattcttctagttcaagcccattttagagctagattgactgaagtctaaggtgatgtgatctatgtgatttccccactttcaaatatctcctaagaaatggccatagaatgtatgagatttctttttaaaagaactttactcatactgcatacatgcatgtacacacacacatgcatgcacacacaccaaagctcaggatctcctttgaaggagtgtcgagctcacgaatggtaagagcccgtgtggctcaggccctctgcagagccagggcagagagacagatgccattttggggacaatttaggctgcacagctgctctctctgaactgccaacagctgaaccaaaatgctcaggaggtgggctgggcagccctgggctgtgggcacagtgtccttgggtatttacaatccctcgatccttgcctgattggttttccataggcagggcttcgtccaagttcctagggtcgcaataccattctcattagaaggttcctcttgagagacaccatggagcagggaaggtcttgggtgtcctcccatctcatttgcccttcccctaggtgcctgtgtttcccatcccagtggggatccaaagcatgtcctgggcattgggtaagggtttagaaccttgtccccgcctgcatatgatagacatggggagggacaggatcaggaggttgctaggtagagcctgcaggtgcctttccctgaactctgttatgtggctgagttcttcagagaaatagtcaggagctaaggggttaaacaagcatccctccctgcagagacaggcaggtcagaggctgcatctgttaaattagggtccaggccacagaggtaatacctaccactctaaactgttagccttccaatactacactccagttctgggagtgagtaactgtgtgtccagagatagaagccataagcacttgagttacagaactgctgagaaattggtctgatggtctagtagccttgtgccaggagaacagttcctatgtagaaactggtcagcattttcttctgaaaacgtaatcatcattgcagtgagtataaacttccatttatatgccaggaacctataagtttcagaatgtgtctgatccctgaagatgtcccttctctcagacggctggcccttgccccactgttgctgggttgtgtataatctgtatgtccagtcaacctcagctctcagcctctgagcccaggggacagaaggccgtggctttaaatgttcacttaaatattgtcaaggtagtatgtttattgtgtactcccaatggttgtcttagaaaaccaaggatggtgtcatccttagacctaaggggccccaggcctggcagtgccttccttcagagttctaagctccaatgcctgtgtgtggcctggctcacagagccatctgagcaggacccctgagcccagcctgtcttcccctcttggatgttctccaaccctccacccacccgccccatgcatgagtcaaccagatgccctgaggagctctgggacttgcacctacagggtcatcccgaggccctgtggccagataggcaccaatcccaggagagtggggaggtgagctcatctcttttgcaggccggcatggtatttctttggcaggatgctgtgagactgggtcccagaacagtgctggcctgttcattttggatgactcaaattgctttttaaacaggagtcctgaaaaaagtatttggccaggcccagagtactataggggcagccctgaccagggaaacattaatataccctctcccaaaatacaaatctcttttagactgttgccagcagtctcaggaatgatcaatactagtggttgagactagagggaccattaagtaagtggagttgatctttattggatatagctggccctctttggtaagatgtgatcagaagagaaattcaggcagcaggctacataatcttcatagaaagtaaatttcaaatgcatcatacaaaattcacagacaaacacatataattgcttaattgcttccttgtttaataaaatgtctttcctgatcaatacctcttaacaagttgaccaaaccaggtatagtttagcctcctgatcagatttagaccttgaatttaatggaggtatagataggtaggtaggtaggtaggtaggtagatagatagataacccatgaatgttgaagaattgtgtctatattaaaatttagccaaaggagaccagagtaatataataaatttgttcctatgggaaaagcactttaagcaaacatgtgccccattggtgggtggggaggtatatattggtgctattttttgtacagcattacattgtttccctggtggggaagaacaggttagctttataattttgggagagcaatttaatttaaaagatataccctcactgggataattaaatcctgatgtgtgaggttctttcaaatggaagatttgcttaaggtgttcacattttggttattctgaacatttctacttgctgtgttgcggagtcacgatactgaagggcacacatgtttttgtatctcacatatgtgacacatccttatctaaaatttcagagccaagagaaaagaaggaatcagatagtgataacccagtgaggtatctgctgcacagtctgcctctccaactttgctgaggaaactcgaaagtatggaaagccaggagcccggcacaggtcccttcccagcttctgtctcttagcctggcagagacttcagaggaggaactccctgagaatgggaagtcattctctagttgtcttgtgcttcgtgtttgtttttcattgtctttttcaaagtaatgtatgcacaacgtgggtaacactgacttttattggctcatagtgacaaaaacaatagtcccctgcctctctcctcctgaactctggccttgctccccagttgctaatatgttcaatgatttttgctatttcttaccaacaactactttaatatttctccataacatgcttaaatatttgtacttatttgggctgggtacggtggctcatgcctgtaatcccagcactttgggaggccgaggcaggcgaatcacctgaggtcgggagttcgagaccagcctgaccaacatggagaaactccgtctctactaaaaatgcaaaattagctgggcgtggtggcacatgcctgtaatcccaactactcaggagtctgaggcaggagaatggcttgaacccgggaggcagaggttgcggtgagctgagattgcgccattgcactccagcctgggcaacaagagcacaactccatctcaaaaaaaatatatacatatatatgtacatatatatatgtatataaatatatatacatatatatttatactaatttatttagatattatgcattgctttcctactgtaatagatgaagattaactcttccgtattacttttcacccaatttcaccttcccccatactcccatataattatgtttcaattttggttaaaccaatatgagatgattgcattgttgctgaacaagaggtacaatattacgttctctttttgtatacaaagactgttaatttagagacctagagctttcagatcttggaggggttcttctatctcaataactacccaacccccatgttcttttctcagagttcatggaattgaataatttggatggatattctaatttttaaaatttcttttttccatttattttaattctgcattctggggggtttcctaacctttatttttcagcctgtctattggctctaaatttggctaccattcatttaattgctaaggtctcttgtcctgtttcttcctttttttaaaaaaaaaatctcctaaatttctgaatgcaaaacattactatattttgaggctattccgaagaaacagattttgttctttttgaattctttttctctctgcattgtctctattttgtaattttaaatgtttattcatttagtctctgtctttatgaaacaacattcctcaaaggtctggtggtatctgtctgcctcagtagaataataaaagctgaatagaattttgggggctgagagtagagcttgtccactagcaggtgttactgtgattaagcagcgagtcagcttttaaactgaggactctcctatttgatggacttttctctggagccccctcattttcccagggcggaatccctccacctcttgcccagggaacatagctgggctgctgctgctctaggacacgggtcgggaggaggaggctgggaagggtgtctcgctcttccatgcaagcacttgcacactgtcccatcttcaactcagagcctcctcccattccccgctgggactggagtctctgagacctgaataccttaggttcagttcctccagagaatcaacctcccatctcgtgtgttactggaggagggtttttgcccaggtgcctgggctgagggaagggatcagaatacgccttattcagactttcaaccttcctgcatattcacttgctcacctggtttctgcccttccccgcacccgggccctcccatccccgagcccctgctccgtggttcctggcacctctcttggcctcttcttggcgttcatcctcgccaggtacttcggttcctgtttcttcagttccaccaaaccagccagtgttctcccacccatggtctgtctttgattacaggtgttgaaatgttaggtctgatctgctgttctctcttctcactcctcttcctgtggatttttaccttttttttcatttagtgttattttggtggattttcagcagtaaagaggaaataaatacatattaaatccagaagaatccagaatgtttaaatggaagtctttgatcctgtctgcttttattcagatcaaatggatcagatgacttaaatcaaaaggtaatatttatgagacacaaagaattactctctcctctcaacaaaaataaagcctccgcctctaacatcatccagtctgcctcccagacatgaacttgcgcacaaagatgtcagggagccatcaggcacggcactgcctaaaaagcccatgtggcataaagaatgagcaaagcgctacaaatacagggtccttctatacaggttattcacactgatcttcccaacagcactattagttggtaatatgtctatattgcagattaaaaaacatcagatggccagtcgcagtgtctcacacctgtaatcccagcactttggaaggccaaggcaggaagatttcttcagcccaggagttccagcccagcctgggcaacatagggagatctcgtctctaccaaaaatcagaaagttagctgggtatggtggcacatgcctttagtacccccctacttgggaggctgaggtggaggatcccttgatcccagcagggtcaaggcggcagtgagccctgatcataccactgcactccagcctggccaacagagcaagatcctgtctcaaaaataaaaataaaaataaaataaaatacatcagacatagagcggttaattggctacccaatccagaacaccaagtagcaaagacaggacttgaacccgggacctccaggtgtttctgggtgttctttgagttcctccatcctgaatcaatagtcaagcatcatgtataaatggagccacagtcctcaaggataaacactaactgcttgtaggccactgcaggccattcagtacagtgttttattgtgctgcaaagtcacctgtttccacaagtgcttccccaatgcaggctttctaaagtcatcatggaaagtaaattattttcccctaacaaactatgctaaaatgggcaggatgagcaggaagtgcttgtgtggtctacattgtatacaactatcacggaaagttcaactcatgggacacttgggttatctggaggacacatggccgtgagaggatgtggcgcttagaagctcccttcatcacttggttggccctcattcatgcatgctgaggagggggtgggaaaagttatagaagccagtagccaaacccggtatacccaaatgtttagcttagattgaagctttggtgtttctaatatgtacattcggctcacttccagaagacagagatgggggacttgaaaactagcttagcagagagttagttaatcctaaacctacctcgttctgtcaccttggcgatgaaatgactatcctaatacagtcagaagaggacttaataatcagccaggcaggtgcggggagggaatgccagaaacatgcaaaaccgccgacagcaagaagtttccattcttttgggggtgactgtgcataattaagtgcctacaattcccaaattaaaaataccagttcctttacaaccagcagtggcaggtctactcaggggcagtcaggaggctcccacaagtgcagctgtccagcactgcaccacacctttctcttttctccaaaagaaatagttttatataatagatatatccaaaaatgtagaggtcataaaaacaacagcagataaagctgtatccttgttggttttatttgtttgcttttggtgttatgtttagggtaacatgattgctgctgataagaacacattacctttgtaaacccagcactttgggaggctgaggcaggtggatcacgtgaggtcaggagtttgagaccagcctggccaacatggtgaaaccctgtctctactaaaaatacaaaaattagctgggcatggtggctcatgcctgtaatcccagctacttgggaggctgaggtgggagaatcgcttgaacccaggaggcagaggttgcagtgagccgagatcataccatcgcaccccagcctgggtgacaagagtgaaactccatctcaaaaacaaaacaaaacaaaaaaacacctgtgtagagcaagttcaccttttcatagcacatgcagaaagcacacctctgtgagtttgcaaagagaacagccctcttctgctgtgtgacatttcagaagatggaggctcagaagcttcaagtcttattttgctaccaggacagaaacagaagccaaatctttaggcttcagatttacctttttttcctaagagtgggacatcatatttaattttccaggtcaaagaccagcgcttgagttgatcatagatcttctcagagaagtcatctgaaagggaagtagtctgttttcttagtcacctgaaaagccatagaataagataaggcttagaataagaaaatattggtttctccatgagaagaaggaagagaaaaccaagttgaaccatttaagtctcagttgagttgaaatactcaagtgacaaaataatctgaaaattaaaagtatggtgtatctctaaacaattattttagcaaacatactctggttaaaaatgtattctaaagaaggttttatttaattataaatatctatattttgtttttcacctcttccaaaagggtagaataaagtaggaaaatgcacttgggttcatctcgaaactcagaggcagcgtggtgtggggcagagggctagcatgggaggtgggaggcctggtgttggcccgggaacccgcactgaccagcctgtggccagggcctcatctgagtggagggaggccttggtctagaactgagattcaccatacaagctccccagtctgcttgtggaccaggagtgtcttgggaatgggaaccaaactaatccaaagatgaagttcaactctttggttcttatgaagtgaataacccacaatgccatagacattcatttttctatacacttaagggttacaaaaggagttattaaatgtgaataacgtcttgaatatataaaattagactgcagctacagatttcccaggatccattccatattccctggaatccagcttgctccaagagcctggcacactctggagcttttgcttcacccagcaggtacggagtcaaactcgacacctggaatctgtatgttgctagtgttgagtggaactcaacacctggaatctgcattgctaacattgagtggaatttaacacctggaatctgtgtgttgctagtgttgagtggaactcaacacctgggatctgcattgctaacactgagtggaatttaacacctggaatctgtgcattgctagcattgagtcaaacttgacacctggaatctgatcattgctggtgttgagtggaactctgcacctggagtctgactagcattgagtggaacttgctagtgttgtgtggaacttgacacccagaatgcatgcattgctagtgctgtaaggaacttgacacccagaatgtatgccttgctagcattgagtggaacttaacaccagaatctgtgcatcgctagggtcgagtggaagtctacacttggaatctgcattgctagcattgagtcaaacttgacacctggaatctgatcattgctagtgttgagtggaactctatacctggagtctgactagtgttgaatggaacttgctagtgttgtatggaacttgacacccagaatttatgcgttgctagtgttgagtggaactctacacctggagtctgactagcgttgagtggaacttgctagtgttgaatggaacttgacatccagaatttatgcgttgctagtgttgagtagaactcaacacccagactctgtgtgttgctagtgttgagtcgagctggacacctggaatctgtgcgttgctcatgtttggggtttgtacttcagttattttacttgctcatggctttttgttgtaattgttttttgtttcttttttatttaaaaatcatcctttaattatctttagtatcttcagtttcattcactggcttaaccagatagtcgacaattatgtgttagacatatctgttctgaaaaatatttttagccctcaaattttttcaaaactaatttgcaagatgtatacgcactgtagttcaaatgtaaatcatcagtgtcctgattactgaggcagatgtatcaataagatcgccagatttgctagtgcaatgatgcttccttatacagcaaattatttttcctatggggatggtggggagatggatttggaggtgatttatcctgtaagagcaggtttggaaagttaattagcctctggagaaggttccaggatctctggggctgggtggagctataggggtgggaagcacctgggccactactgtgcaggtgtgtgcagtgaggatggctccctgtgcttggcccctctcactacagggcacgccttcttcctgccagctgtcctcagagacaagagtctcactcagcttcagctcaggcccgctctctactgagccttccacctggacttccaagtggaaacaccccaaagatcctcatccctttcctccactcgatgcctggtttggctaccacccataagtgtggtgttctgcctggccccgccaaacctcttccaggcacccaaggtctggcctctgctcaggttcaggtcttgggccatcgtgtattttccttctcagaataggtgcctgggttgttctgactatggtctaagagtcttccctgccctgccctgccctgccctgacctgctgtcccctccccttccctcccctcccctcccctcgcctccttctctttccctctctcccccgctccttccctccttcctccaggaattaagacattgaacattctgtctcatttccatgatttttcaaacagtgccaaaagagccagcaaatgactgtgcgattatctccaccaacctatttaaaacattgtcgttgtgtttgacttgatgtggtccttcatcttgaccatgatgtttgttttactgcttccttgatgtataatttacataccataaaatctacccttttaaagggtatgattagatggtttttagtattttcagagaattgtggaaccatcacccccagtctaattttagaatattttcatcatccaaaatagaaatccaatatccattagcagtcacttcccattcatccttcccctagccttcagcagcctctactctgctttctgtctctgtggatttgcctactctggccgtgtcatataaatggagtcatttggacttttgtgaatggcttctttcatggaggatactgttttcaagattcatctgtgttacagaatgtatctaaactccattcctttttatggccaataatattccactgtatgcacctgtcacactgttcatccatccatcagttgctggacacttcctggctggttttcactattcagctggtatgaatgaggctgctatgaactgttatgctcaagtttttatgtggatataactgttagatttataatcattctaattagccattttgtacttttttttaaagttttttttcttttattatactttaagttttagggtacatgtgcacattgtgcaggttagttacatatgtatacatgtgccatgctggtgcgctgcacccactaactcgtcatctagcattaggtatatctcccaatactatccctcccccctccccccaacccacaacagtccccagagtgtgatgttccccttcctgtgtccatgtgatctcattgttcaattcccacctatgagtgagaatatgcggtgtttggttttttgttcttgcgatagtttactgagaatgatgatttccaatttcatccatgtccctacaaaggacatgaactcatcattttttatgaccgcatagtattccatggtgtatatgtgccacattttcttaatccagtctatcattgttggacatttgggttggttccaagtctttgctattgtgaataatgcctcaataaacatacgtgtgcatgtgtctttatagcagcatgatttatagtcctttgggtatatacctagtaatgggatggctgggtcaaatggtatttctagttctagatccctgaggaatcgccacactgacttccacaatggttgaactagtttacagtcccaccaacagtgtaaaagtgttcctatttctccacatcctctccatcacctgttgtttcctgactttttaatgactgccattctaactgatgtgagatggtatctcattgtggttttgatttgcatttctctgatggccagtgatgatgagcattttttcatgtgatttttggctgcataaatgtcttcttttgagaagtatctgttcatgtcctttgcctgaaactgggtattttattcctcagaaagaaagaggagactcgaacttctaaacataaattgtgtttgaaaatattggagcttacttatcctaccataaaacactcagtttaaaatgagcagttttaagatacttggttttgttccaactaatacctctcctgcctttttttggtcaatttatttttgttattaaaatttcttctgccgttggcacccccagaacaatatattcttcaatagtttaaaggagctgcttcctcactgggatgtggacccttcttccttcttttaattacagcgttattaaactcctccaggttgacactttctttcattctctattttagatttgtcaatcagaggtgctccatgaagcagctccttagtgctgggggaaatgcaaagccatggcgtgtcactgtgggtgcaaacctgcttctggagctgtgacgttcttggggagggagggctgtgaagggtcatcttggaggggccacccctgcatctcacccgtgagccatccttctcagaggatgagagagtggataagagctcaggagctgcaagggagcattgcgggagcactgtgcatcataagaggggaggatgaaaccgacaaagacgggcacctggcagggagtgctagtaaactgaggcgtggactacagaaacaatcctcccccgaagaacttttgaaaatattgtacagacccagggcaccctccctgacctacagaagccaaaaccccagtgtgggagcacagtatgtacgtttagaaaagttttcatatggccgggctcagtggctcatgctgtaatcccggcaatttgggaggctgaggcaggtggatcacctgaggtcaggagttcaagaccagcctggccaacatggcgaaaccctgtctctactaaaaatacaaaaattagccaggcatggtggctggtgcctgtaatcccagctacttgggaggctgaggcagaagaattgtttgaacccaggaggcggaggttgcagtgagctgagattgcatcactacactctagcctgagcgacagagtgagattccatcttaaaaaaataaaaaggcagaggttgcagtgaaccgagatcacaccactgcactccagcctgggtgactgtctcaaaaaacaaaacaaaacaatacaaaaattgtaagtatgtgtggggctcatgtgctgagtttggtgggggaaatctttccatgcacccccacaactgtctacaatatgaaaacaatcttcaagaaaacaccagcgaacagaccattcgtctttccctgttgccacattttatcttggtctcaggctgctgacctgtcagatgattgacaaatggaaaccgtatggtggctcagagggaccaggcgtggtgtgtgctgcattgaggagagggtgggtaggcaaatagaagttaagcaccctaacagaaatcattctaggcttcagagcttagccagtagcttagcaagtggtattttctaggaagccactcagattagtgccaaccttctgcagaaatacagagctataggtgctgggtgagttgtgagcaaagccatgttcagaatatgttaagtttctattttttaagtgagcttatttgctgaggtaatgcagtttgcctgaggcaaatgatcatttagatcagctttcatcttttaagccagatcttgagatttgaggcgctaaactctttgcgtacgcattttacagctctcttacttggttgggatccactgcttcccagtatctgcagacccttctggggactgtgacctgcagggggttaggtagctgttttcaggggggcattttgagcccgacattcacgttttataacattagctgtgtgggggctggcaagaagaatctagccttttccattaatttagtgactttgttcattttaattttttagttaattcactgactttataattttgctaaaccctacaaactgctcagcataaatgatttcctttaatccctacaaaatgtcaggctcccaggcctgcaggctcagagtgtatgcagggcgaatgctgcttgtgtcttatccaggacagactggcctgtctcgcacctgtcaggcaactttactcctgatgctgctttctgggacgccatccaatctcatttggaggttttgtcagtgagcagatctgtttctgttagattcaattgaggcagaggcagacactgaggacagatgggtggctgaagataacaccggggaaaccagcctctaagaaatagagccactgcaattaagacttccactctctctccagaggttgtggagtcaacagaaaagcagatccatgtctgaagaccatgacaccttagaagcccagacagacgagagggaaaacagcctagaagaccttgccttattatttctactctagaaagatgcacgggatcaataaagtaaatgagctgtttcatccaagctggccgcgcagatccagggccacagagacagacagacacataaacgcattgatcaccctgctagggcctactggcctaccctgcatggaaaatgtgaatggaaagaaggcaaggaaaatacactatttgtagttctgagccacagctctgattgtaggtcacctcctttcctctgtggaagggcagtcacattgtgatctttcaaaacattggctaaggcggtgatgataaccaaggctgatatgttaccagcacacagcagatctcagggctgagagtgaggcatgaatcttccaagtaagtggctccatatgggcctctttgaggtctttaaagtcaacagtctcttcatcatggaattcaacttgacccctgttccaccgacatcagaactggtgaggtgacagggatttagagcgacttgtcaaagggatgggaaatgcatttgctcaaatgataatgacattcacaatagtcaagattcgttgagctaggatgcatgctaagaactttacaagcatttctattaaaatctcaacactgctcaatgaaatatgtattatcgtctccatttttagataagagaattaatgtttagaaaggcaagttgatcaggcatatctgtgcagcaaatggtaagactcgacttgaactaaccttagacaaaaaaacaaaaaacaaagcaaagctgtggagtggcaagagcaaggctggccttagggacagcgggatgggggctcaggtgcagctgagaccctacccataccccttctgattgcgctgctggcttctccacttagggaatgagaggagacaatcagttgctattctgagtcatttcctgggtctctgagtaaaaaggagagaagcttcctctcttccagcttcagtttgaagagtctcaggcaagaacccggttggcctggtagagtcttatgcccatccttgaagcaatccctgaagctggaggatacagtcctaagggtcctaagttactgggtgccatatggtggtgggcggggtggggtccatcaccaaaatggagcacagagggagctagtatgaatcaggcaagcagttggctccacttccacatgagatggcagcaggcatcgctaagcctgattcacagcacctgggcttaagttgcagcaccgatacataccagctatgggactttagagagggcattttctctgtgtcttgatttccttcattttaaactgaggacaatcatatctaactcctgtgataattgggtgtgttaaatgaattaatgcattagaggagtatctaatacaaggtagatgcttcattaatgtaagctaatgttatttttaccattacttttactgttattataaggagctatgtatcttgtccaaggtcctgtaatagctaataagtaaaagagccaaaattattattattatttgagatggagtctcactctgtcacccaggctggagtacagtggcgagatcttggctcaccccaacctctgcctcccgggttcaagtgattttcctgcctcagcctcccaagtagctgagactataggcacgcgctatcatgcctggctaattttttagtagagatagggtttcaccatgttggccaggctggtcttgaactcgtgacctcaggtgatccacccacctcggcctcccaaagtgctgggattacaggcatgagccactgcgcttggccccaaaattcttatcagagttacagtgggagatatcacaccatgagctctccttctaaggatgcccaggccctgaattctggcacctacctcgcctgcattttgtaggttgcactgatttgcttagtggggccacagtcaacaggctctgatcaaagccacccttgccgcagctgacccagcagcctgcccagctccatccagggctgttagcccatcctaaaaaggccctctccttatagaccattgcccgaggaggtctttccaggccctacctcctgaaactcctctctggcctagtctaatatcccttatccttcctaactttcctaagtttccagtcctaacttccctctccacctgcaccttggacatgatgattgacactgtgacttgcttctcaaaatcagctcccctatcaggtctgttttgttctccgtcctgaagacagtggtcacgacctcgcccaaccctgggctggggctcagcctcctgctcattacaggggcagacgtgccctttgatgtcaggcctgaatagaggttccttatttattacaatttattatcctccgaatctgcctggggttttgatagaacctggctgccaacggcttgccctggcctttctgaaacctcaccatttccacaatgaaacaggacgcaaggactgtgcccctggtatgggaagggaaggaggagaagcttgcgtttacaagtgagatatccacagacagggaacatactacatttttttcttctagactagcctctgtggactagttcatcctccataaggttgatatttttttcccaaagcctggatttgcattgcctagagccacattcacggtaggagatgggtcttcccagtgtgactggactcacttcttagcactccctcggtgggtgagttaggctggaatgaagggaggagccacctttgggattgcggtgctgccctgggcacctcacactgccttctcttcctgctgctcgctggtgcatgcttagaaaacccagtcagcttgttttgacctaaagcaaaaaccattattctctgagtttgtaggtaagcttccacccaaaatattgttgtgagaccttggatttggtgatcttgggctagctgcctaacttctttgggcttccatttctgctctatcaggtaaaggattgggacagatgatcttttatggctataaacatccagtgtgctccaaggccactgccaaatatacgcttcaacaacgctaggagtggtttgcatgatctcctaggcttgggaactctgggagcagggattgtctgttctgtgcctggtacatgggggtcatttaatacacgtctcgacaactgcatagcccttttgctccctgagctgagaggacagaggaggatgttaacagtcactgtctcaaaaagccctgagcaaatctgctctgttctcagcacctctcagcactgcctccttcatgagtccctgctgggtgggtagggggctaattaagcttgagtttcaagaacttgtctacaaatccacttcaagggctcacatgcaaatcaggccctgctggcagccattaccatctcccacctgcagcccaggccttagaggccaggattcacaagcagaacaacacctgccctcctctgagagctgtgctgcagcccagggccacgtggacagggtgctggtgcattctccagcaacactgttgagctctctagtttgcagaagagtccaagggtcctcacaaaacctgtgacaactgaacaatcccaccattcttatatgatatatataaccaccattccatatgtataattatgattgaaaccgaatatcattcctgattgcagagtctccaagatggtaatttctgtcttagtgtattttccactggtagttttgtttgttttcctgactaacgttatgaaacagtattactctcctgttacagatgtacacactgggatgcagagaggtgatctgacacaaggacagcccatggtcaagcccctttgacttctgtctgctgttgaaaaggatgtgcctccctttcactgagcctcattgcaatacttgtatagattctgtgcccctccctcccttccttccttcttccctgcctgcctgcctgccacaggtgtttaatgaacatcaactatgtgccaggggctgtggagtattctagaaatgaaacaaggttcctgctctgagtttttatgttgacgagaaggaaagggtgaataaacaaatacattaacaagaaaatatcaaggagcgataagagccctgataattatttaagatgagactcaggaggcaaatgtgacttgagcagcctgccccgcctcctgtgtgaagaaaggcaggaaaacattccagcaagagagaatccccactgttagaatctctgcatgttgtcattagctgcatagatctgcttgttgaaacatgaaccaaaactttcaatcttggtctgcttgccctggataaagtgcatttctgagtcttggaccacagcttgggaaattagcagaggcaaatgcaattgtctcttctaaagtctttttttttctttttttttttttttgagacagggtcttgctgtgacccaggatggactgcagtggtgccatcacagctcactgcaacctccgcctcctgggggcaagtgatcctcccacttcagcctcccgagtagctgggactacaggtgcccaccatacgcttggctaaattttgtatttttttgtagaaagggggttttgccatgttggccaggctggtcttgaacttgtgagttcaagccatccaactgcctcagcctcccaaattgctgggattacaagtatgagccactgcgcctggccctctcccagtcttgagaccacagtggttggaagctttaacagaaaacattatatgtgtgtcttcctcaggaaatgtattttgttaaaaatctgtaacatgaagggaatggtaggaaagagtaggctgcttttgcatttaaaacaatgttaggagtgaatcgctttcctggtgggttatgttagaatgaatctcaaaccctcactaatatctttcagaggaattttggcaaatagcagttgtttcttggcctaattgaagtcttggttaatttatcccaataacaataacattaccagtatttgtataacaaaaatggtttctgactgtgccagcgtgggacgaatgagactcatcacaatttgttttagggatggagatttagaagaatgggtggagaacattctaaatggaatctatggacagggtttttattcttagtgaattttgaagaagtgacgtaaaggaaacagtttcgtgtaagccctggctcctccctcaggggcagctggacaagtcgagcagatcctggaagtaaaaggcagccccggatttttatttctgttttccctttcaccctaacaaggccgtgctctcctgctcatctctctccactgcctggactcctctctctctgccttctctctctgtttcctcccccttctctgtgtgcttccacctcccgctgctccctgctctccctgtctccgttccccatcccttcttgctctttgctgctgaccagctgtgcaactctgtgcatctgagggactcctctggacgtcagctgccacatctgtgttattgaaggggacagacacgggattcctattatggccaacgcagactcaccctttctgcaggctcaccaaggaacgaccactcagggagagtgggtctgacatcctgagaatcaccatgacttccccaaaccagtgggacatccggggcctttgactgtggctgggctgcctctgacgggcgggaccctgacacccaccttagctgtgacagttgctccatgcagctagttcctgggcacctgtgcagttccttccacaggaggacattctgccctttgccttctttgagacatgggtgtcttgcttaaggggaccagtttcccccacgtgcctctctaccatcctttggctatagggtattttaaacatacagatttattttccttttctatttacagtttcctttgggtgagaacggagtgagttggttatgaccgggggacctgagtcacaccactttgattaatgccagctccaccacgcactagctgcatgactttggacaaatttcttactttcttgcagttctgtttacccattggaaaactgaaataataaaaagaacaaccttacgtggttggggagaagtagatacacggattcattacagtgcatggcacattttatttttatcttggttaaaaaatgcatagcatagaatttaccatgttaactgttttcaaatgttcagttcagtagtgtgaagtagatccacacagctggaaaccagatctccagtgcacggcacatttttatgctggaaatacctctgttagaaataaatccttggaattgatacatacacaaagccgtcactcatcacaaatgatggaactagaaagccaaggcctattggtgtctaagagtcagcctgcccatgctcacagacctgcctggaaaggttttgttttgtttagaattttctttttatcaccatttcttcattactggaagcctggctctttgcagacaaatcgatatctccaaggttaaacaatttatttttgtatatttttcaggagacatcgagtccctgtaatgcaagcaagttgctcatttcctgcttctccagttctgtcttccttgtcccctcttcccctgcctctctcctctcttctcttaccctctttgttatctcatcataatttcttcacagcccaatttctttctttctttctttttttttttgttttgagatggagtctcactctgtcacccaggctggagtacagtggcatgatctcggatcactgcaacctccgcctcccaggttcaagcaattctgcctcagcctcccgagtagctgggattgcaggcccctgcaacacgcgccccccacccctgtctaatttttgtatttttatttatttttaatattatattctatggagtcatttcccaactagcatgtcttatgcttgaattattctttatacttaatactgcccatcacataaaagacgttgtcacgaacccagtgttgttggcagaattttggctcctatgatctctgtcacctggtgtcacaccaatgggtatattacagtacctggcaaaagagactttgcagatggaattaaggttggaaatcgtcttggattctctaggtgggaccagtgtcatgatatgagcccttcaaagcaacagacgaggtcaaagcaagggaaggactcagtgtgcaactggtggcttaagggaggagaaggcctgagaaggggctggaccctggcaccagcatgagctcggaagcaggttttccccccaccccacccccagagcctccaggaagaagtgcagcactgctgaaactttgatctgcaccgccccactcccaggccctggacagaaaatacagccactctatgctggacctgggacctatagaactatagtgggtgttgccttaagatgctcagcttgcagcaatttgttttggccgcaacagagcactcctacacctaccattcactggcagataagagcttagaagcaaggctatttattcttactggagactggcttttttttttttttttgaggcggagtctcggtctgtcgcccaggctggagtgcagtggcacgatctcggctcactacaacctcagcctccagggtagctgggattacaggtgtccatcaccacacctgtctaacttttgtatttttagtagagacggagtttcgtcatcttggccaggctggtctcaaactcctgacctcaagtgacccacccacctcggcctcccaaagttctgggattacaggcatgagccaccatgcccagccagaggctggcttttttttgcttcaaatgctttatgaccaaaactgtctatgtgcagggtccccagctgaagtggatacatattttgtgttcatggaataggaggaaattagttggcctttcagaaatatgggacaagatttcttcttagaaatgtgccctaagcaagtgaattgagtaaaagtgtggattctgagtccctgctccttgcagaggactatctggaaatcggttgcattctcaggaaaataattcagaagtgcagtatcctgtggaccactgcatatttcctgaatcagtatctttgtggatatgggaaggggatgtatgtatatgtttggtgagcgcccaggcagtacatacaaacatttgaaacccactgctgtgctccagtgttttttaaacagctggttgagacccattgaatcatgaaatcagtgtagccagaccatcgtttaaaaaaattagaagtgcataggaaagaaaaggtaatgttatcagaatgtcttgcaacatggtaaggacaagtgtgtttggtgaaacttttgtttcaatgtgtgtgttttcactatatgtgtctgcgtatgtgtgtgtccagagtcaccatgtaaaatgagcaggaatatttcagaagcactgctcttgtctgatcttgcaaatctcaagcctttgtcctggactctccaatgcgctgggtctctgatcaaccctgccctgaccacctgcgtggcctgccttgccttatggcgaccctcggaagagtcgagcaggcagcgcgtgcctggggctttcagggacacacttccttccattcggggacctgtgagtatgtcagtggaaatcatttttttttctttttctttttttattttttgagacagggcctcagtctgtcgcccaggttacagtgtgatcctggctcactgcagtcttcatcttctgggctcaagccatcttcccacctcagcctcccaagtagctaggattacaggcacacaccaccacacctggctaacttttgtattttttgtagagatggagtctcgtcatgttgcccaggctggtcttgaactcctgggctcaagcgattctcccaactctcccttccaaagtgctgggtttacaggcatgagtcactgcacccagccaaaataattttctattcgctggggagtaaagttgtctttgcatctcccgcacagatatacacaagaaatataggcaggtgctggctacggatgcatagaaatggatggcttcaatacaaggtttttggttgatgtggaacaatattaccgcatagataaagaagccccttcaaaattagctttaccaatgagatatggtaaaaaaaagaagtataagtgatgaaaactaaagagacatatgactgtaagtgttaagacttgaaggaaataataaaagccaaactgcatctctgattttaaaatatgggagtcataataaatcaacagaaaggataaaggtatgctgaggaaagccaaagaggagtgaccactgttggtcaccaaactgctggctatttgcagaagggcctgaggccctgacctgagacttgtgctcaagtcagcatagtttgggctcattggaatatgtgatgctaacgatgtcccccagaagagtattttgttcctttacgcactttttaaaataatcatctgtgatatgaaaatttggactggtcttgaaggaatgagtcctctccttacccaggtttctttgtgatgtcaggcaatgatggtaataagaatggtactccagtactaggagtaatacggtactttgatagcgcactaatgcacagcattggcagaaggctcatggtggatgtgaaattaaacgcttcgtataacccataggcgatgttgttgtctttgtcatggacaggggagaaacatgaggcccagagaggtaaggtgagcactccctaatagtcagcattgggtgaggcaggaacattgtggccctgagtccctgagattcagggcttttcccatgaagccaacccactggtcactgagtggtttcactcctttcaccaaccaggatacttcagaaagcacttggggtgacccaaagctgggtccagatcaggggagtcggttgtaagttgtcatgacacttcatccttacagaaggtggaagttactcatttctgttcaatgagctttgaagaacaaaaggtcactgctaatttgaagattaaacctttataccaacaacatcctccaattactatagaaaatttagcatccaccatttgctcaggaagcaaagaagtcactgttgaacaaactctgaaataaccaaggcctccaggccccacacctcttttaaagtgctttcatgctgaccatctttttttttttttccttctatcttcagcccctaaccacaaagccaaaaaccacaagaaggcagaaaagtacaataaatgggttttctctacccatccccagcaattgtttcacagttttattaagttggggattcttggaaaaaaaaatcctgaaaaaaaaaaaacaattctagtttaggatccctctttgagtgctctgcaacataggcgagagcagtaaaaacacgttccattgaacacagagcctcagacatagacatctgtctgttggaaggaagtcactgactatggctttatgctgaaatacacagatcacgtttatataggattttatcatttgaaaacatccctgctcagagatgatcctgcctcattctgcaacagccttttgcagtttacatggaaggattcagattaggagggagaagttgaagagcctttagactagaggcagcaggaggaggaacagcctcagatgggggagagaggagaagttggcatgtccaccactagcaaagatctgggtgctgcttcaagatagaacccaagggaagtggcagggtcccaaggggaatgttgagtgaggctctcactgggggaggtcccagattcctggcccccagcccctccaaagggttatgagtcccaggatggcccagaagcaacagggctgacacaccttaaggagcaatgcaggctgaagaagttcctgccactggtgactcatcatcagaattcccctttccctgggctgtggctctgcataaactcacaggactgcagaccaggcctggaggagatgaccccagagaggaggaagactgagtgtgctgccagcctattagaactcagcattgcattcaaattctagttgctctaaagaaaattaggaaatgtgatatttcttgcacacctgaatttgtaggctacatgcagaacaaaggacaaaatgagagtccaagaaggaagtgcagtgctttaagggttgagtgaatggagactgaagggtatttaacgggccattggcatcaaattagaaagtatgggtcttagaatttcttttacattagaagactttgggctgaatattgatattctagggataaattcttgataccctaaaattcagccctcatacaaagcagtgattgtgatttcatgaatgttgtccctgagaaacaagtgtctggcatgagctccccatgtctggaccaccaagctgataccaataatggctgttgcttccttttcccctacatcaaaaccttaggtttgcttcaggcttatggccttggtcatcctaggagtcaccaacttgctatgagaagctggcctgattttgtgtcactttcatctttgtaaagtataaacacaacatgtgaagttgttaattttcagtgcactgccccattctgtagcgttctactttgtaaatgacattgagcatatacactttccaccattgtagtaagcccaacattcagtgaagacagatgcctccatttatttaaaaaaaatcaacacattattaattttaatgcaatttaagctaaaaatgaccgacaattcttggtttaccaacaacctcttttaaaaattgagactctcataagaggatttcggtttaaaaatgttgaaaggtctttttgtatagaaacagaatgaagtacaggatatatttaaaatgtggctaattaacaaaatatttgtggtggctcatgcctgtgatctaagcactttgagaagctgaggcaagtggatcacctgaagccaggagttcaagaccagcctggcaaacatggtgaaacctcgtctctactaaaaacacaaaaattagccaggcatggtagtgcgcacctataatctcagctactcgggaggctgaggcataagaatcgcatgaacccgggaggtggaggctgcagtgagctgagattgcaccactgcactccagcctgggcaacaacccgggagacagatagatagatagatagattctctctctcaaaatatatatataaatatatatatatgtataaatatatatatctatatataatatataatatatatacacatttatatattatatatagatatatatttatataatgttatataaatagatatagatatataaataaatatatataaatatatagagagtatatatatgtttacgtatatatttagagagaatatatatatatattcgagtttatattattatttttaagatttcaaaagccttcccttaaacacttagatccatgaatatcccgtttttttactaatgtgggcgatgaaacttcaaatgacttgggaaaagatattctaggaatgacaatctttttttaaaaaaattcttgctaggaagaagtatcagaaacctccatgttcttacccatattttcagtgattaacagtttcttgtgatgcaagttttctccacagtttgtttccagggttacaaatccatcatgcctaccttttcaaaatcacattaattcaagttcacattatttttatcagccatcaattaaatattaatcagcttttcttggtctttagcctataggtcttacttacaagactctttaaagaggaaatactagaaaccctgccagttcaatcccctggcttggaataattttgtcagcagtactgactcctgtagctatctgtgttgcttaacttgcgacttctcttaagtggaaagttgaagagctttaagagtattaacttgctttgtttccatattgacatgatcaacaggctacccacagatctgatgcatttcaatgcccaaacacaagagcatgcccctggaaaactgctgattctgagttccagtaaagctttaagctcctgagattatgaccatttctttattttggttttccactcgtagaaactgtctttcagataagagaggaacactactgtccagagagtggtgacaaggcatcatgggagaggtgcttaaaagtctccccaaccgccccatcatacttccttgcaagagccagctctggtgtcagaaattccctagtgttctgctggtttatgtaagacatgaccctctccaatgtgaatgcctctgtagagagagccaactgatgacggccttaaataaagatcctgaaactcctgtcctcttcattcagccagagaggagctgagctcacagccctaaactattcatttctaccaatggcagaaagtgtatagcccatttttatatgtttaatatgtaaggcagcataatattagtttatacacactcatttggaccccttatctctctgtgtgtgtttaatttgtttcttttgccattttaaaaacacttgaggtgtggtgcactcatgaaaatgcatctccctctttttttttttttttttttgagacaaagtctctgtcacccaggctggagtggttcagtggtgcaatcttggctcactgaaacctccgcctccctgttcaagtgattctcctgcctcagcctcatgagtagctgggattacaagcatgtgccaccacacccagctaatttttttatttttagtagagacggggtttggtttcaccatgttgatcaggctggtctcgaactcctgacctcatgatctgcctgctttggcatcccaaagtgctgagattacaggtgtgtgccaccgtgcctggccgaaaatgcatctcttaatggtcttgaggactgagccccatggctggcagtctgggctgtggatgtgtgatcctgcttgggtttaggaggatgaacaagctgaacttctcacttaggaaattgcaaaataccattgcacactgaaacctgtaaatttattttggaataattatggattgctaagggggacagaaattaaggccataactctacaaattgtaaccaccaggattgcctaggtaacagctccaagatctccagggctccaagaagaagcgtttatttctcagtcttgccacatgcccattgctgacctaccagggggctctgctgtccccctcctcatgctggttgccatgccagaggaaagagagctctggaaggttttatgtcggggctgttcaagctgctcatgccaaagggatgctgcttccttctagaacctgttgacaggtcacccagttccttctggccatagcaaccaggaaggataatgtaacatgtgcccgggggaggtgggctggaaatgtttggcagccagcactgctcacacacagatgtcaagagatgattttcactggacagaaaagccagcagcctttccggaggtgaagtatcctccgtcttcatgactaggaagaggctttgtgctgtgtctctcggtgtgctattaatatgtgagccagtgcattgccctaaccatcaactccatcctgcttcctcatcaagagaaaaatgcaaaaccacctgctgtgggatggagaagaccagcgcattcccgaggaggcactgctttcccttgccctcacagcctggcctttgaatattctcccagaaataggttcttggttctcattctcctttcctgagccctcctttctcacttctcttcccactctgtgccctggagtgccttcctgtaattcagagctggtgttcttttgggggatttctcttcatgattgagatgagactgtctaaggggctaatgtcacccatttcagaattcacttcccggataaggattcttcatagctgtgttaagattttgctgttgttgagtccccagctggctagtgctcttggcctccatcacttttctcttcctcctttcttgccccctttggtttcatgaagctgattttttctcaagtttcgactcttgcctctgagccaccttttcagtgcatgactttcactgccctaaaataacctatagcaagaaaatcccaaaagaacagtgttcattcactgcttctaagtgacaatcagaacttcttttaaagacagcatattattataattcattacaatgaaaaacagaaggtgcctgggtgagttgaagtaattgtttagttgtggctcctgatctttttaaaaggtctgcatgtgaactaaacactctaaatatgtccagtccctcctgtcaaattcctgtaagggcagaatcacctcggggagtggttcttccggagtggtgattgacatgcaaaatgctgcgcagagagcctcagcattcactagggcgtcttccttcctcccctcctcctttccttcctccatgactgaaggcttgcgtggttcccacaccctgctgggcactgatcaggttctaagatctgccttcaaggaacccacagcctcatggagagaacgacggacaattaggtcaccacaacaccggatagaaaccccacaggcgcagtcagtgcctgcctggctcacactttcataccctagagccaggactccaaaaccatgtgtccaatgaatcactcagcaccgggactgtcacaaaagtgagtgtaaagaactgtgggtcattccctctgcatcgtgcatttctctgacaggggccctgcactatttgcggaggcatctgtagatttatttcttaattgcctaaaccactctgaaatacctgtccattcccttagcataagattaagtggataatggccaaatctctatttttctgagtagccaaacttagcggtcagcatttagcctttatccacaaacatggataggaagccctgcccctgggcatggcagacgggcaggaccaaccaagaagcagggaccagcccaggcacagtgaggaccctcagcatcaggcaatgattttgagttgagataatggttagtgtctgtgtttctcagagcaggatatgctctttaatctaggatgcaaagcccatatgaggtaagaaaaagaatgtagaaccatttggaaaacacccatttttcccctgggaggctgagtaggtcagggggatccgctggcagggggtcctctccactcccctctgattcccagaggccgagaatgtcgtgttcagccattggttactctgtgctgcacggtgaagtctgtggttgttggtaagcagcgtaaaagccagggagtgtctgctgcaagaatccctgggcatcacgttgcttccgacactggtctgtgtgagtcccacagacgtcctagcagctgcaaggggcacacacctccgacctccgaccggcaggtatgaatgcttccaaagtgcccggagtgaacagattaaagcaattttggagggtgagtaaaaggatacaaatcaacttactgaacaaaaagaaaaagtttaatttctggaaaaaaaaaaaaaagtagctgacctgcagtctgagatatgctgagagatacacacattatcttacaaaatttctgcggggaggttcagtcgtgcctgtttgatgccttactaaatgttgggaatctaattttaactgatctgcagcagaagcaatcagcagccagctctgtgttgggtgtttactcagagcaaaagttttctgggaaaggcagtttagcatctgagccacggtgcgatggttagccatatttatgaccactcatgcatcaaccagcatagtctgatcttagcctctgggagccgatttaagtcttgaatgtgatggctaatagatagaattctgaaaatatgtgtatatatgttttccttcagactctctagtctctcagaagccctatctaactagaaggacaaaagaaaatctcagtctttgcattgtactgttaaagcattagaatgtactaaggcaattgtaatcacaaagcattcaaatgtatggtatgcattgtaggctattaacataatcctgtgtaatgagaagatcagcaccaagctagcctaatggcagacagcttctgggatttcaatttttgcctggattcacagaatagtaaaacctcttgggaattcattgcttttttttcagttgtcagaagctaggctctgtgcaacaagtaaagaattctttcctgaatagttattctacttgggattcagggagatggtaaatgtccacgctgggtatcaatatcagagtccgttccatcagtgcttagggtctagaaaggaatggatgatcctgaagccgatgttcagtgatccctcacacttgtaatgcagggctggaataacgtgatgggtaggtttccatcttggttgaacattttatgattctatggttttctttcaatgctaggattgtcatcctgatcgttagaaatcactttagtagatgaataaacagcaagcagtgagcgcatctaatagatttctgacaatagatcgacagcttttctttctctctgttgctctaagtcatttgagaaaagcctggggttacagatattctttgtcaattacttctggaatccccatatctactcttttaggcttttaaagatgagataatatgagtatgctagtaattttgaaattacttcttaagcaaggttctgcattcactgggtagaaccaaaataatgcctttccaaattaaagcatgtgtatagtatataagcgggtatttcttctgagtaagcaagaagatattaaaaacattgaaatgatggaactctgcagaagaaccatatgacgcatgcacaactctaggctgcattgggaaaaccagccatatttgggtttgggattagcctcttggttttgtgcaagttgcttagtgccctgtattacccatcagtgaagtgagtggttcctcccagctctgagatttcatccgaacagcatggaaaacagtagatcattttcaccaaatatctgtgtagataggactgggaacatctgattaaatgtgttgagtgtcacattttctagatgttagaggactctgacaatgtcttgttgaaatcatacttgggtctggctctggactctaaaaagctcttccttaatgacatcagttgtgatggatcagagtcacttgtagatatggtgatgaacaaaagactagtttttattttctctttcacagatgaaaccttattttagccactgacatctccgaatgatctgaaaatgtattgcatacaacacctcaaagtttcagatggacactccctcagttgtatttggaagggaggccccaggggccccttggcatcctctgagagatgttcctgcagacgcacaatgcacacaagtgcacagaggcaactgacttggggtcccaagctagtagcacacaggcatggcctgagtactcagaggaggactccggtggatatgagcagacacccagggtttcacttgtcaccaacacagtccagatgatgaagcaaatactcaatactccaaagaattccttaattatttaggaaatttaaatgggtgatataattactcggttgtctcaattctgaattattcattctgtttttaatggtagtttgatgctagtaactccaggctattattaataattttttaaaaaatcagaagtagattagaaaacagtttcagaggaaggatttaaaagcctcttaatggaggagtggctatgcggcattgcattcaaacagccacagctgaaggctgactgggcttcctccaggctgtcctccttcctgagccagttcccgtttggagtctgggctggagggagctcctggcagtgccatgactcagtctggtgaaaaagcctgtgtgtgttcaggctgactttgaaggaagcacctctaatgatctgcagccagggtggctttgaagatggtaagcatagaatttcaagaactggactttgggtactcgtatgaaatggaacattattataccactaatttgttctctttaaaaaacagtgagagtcttctcatggttttggtagtctctatttatttatatatttttattggtagcaagtgggaataagagcacagttgtttaaacaaacccaagaccattctacttgctgtggctggaaagtgaagagtattggaatcactgttttaagtggctttgctgtttagactgaatgtgcacgagagccaaatgactatttgatttcactagaaaaatctgtaaatctggttattggatactgtataaagccatttaattccacaaatgttagcccacagaaatctgtgcactggaagagctcctttaaatttacaacagcaagaaaaataggtttgctttcctatatactctctactgttagttacaatgacatgaaacaacccaagtttgaatatttaagagtagccacaatcacgaagggcagtgtgatagaaccgagcaatgaacaggatgtaagaaatcctggtttaatcctatctttcctatggttttgcccaaagtggtcacttctcctccctaagcttcagtttttctcacctgtaaaattggggaagagggtgtagatgaaatcagcatgattctgcatgtcagtagtacattattatctcctagaaagctttaaaaaaaaaacttctgatgccgagactctaacccactctaattaagtcagagacacaatggatgaggcccgggatatcaatacatgctcaataaagctcaccaggtcattctaatgggcatctatctaaagttgagaacagtagaaccgtctgaaggtctcttctggctccaacattccgtacctgaagatgctaatggctctttctcaatgtcagagcacgatgcagatcgtcttgtggtcacggtggttctcttgactcttctggtcacgcgtaaagaccgggagtggaaggcagcacctcagcagatccaaaggccatgaacaccccacagtgacttcccaagctagagactgtgagtgtacttggtgtggacaaggcattcgggaaccactgaattaaatgggatatttttattcttaagagcagtgaactctactttcaaggggatgaaacaagtgaaaaaaatactttcccccccaaatatatttgtcttggctacaccgaggtctaatcagattttaggtatacaaagattaataagacacagtccttatcttaataagacatagtccttatcttaaattaatttacaatctagtaggggtgagggacaaattacaatctagtgggggtgagagacaaatagtaactgtgtaatgtgggggtctctaagtctgatattgcttagctatgcagttttctagtctcagaaacttggctaatgaattcaaaactggaaggaggacccctaaccctgtcatttgcccagttaaggtagttgagttttgcgagtgagcttttcattatgctttccatacatatttctttgaaacacaaaggtatctaataaacccacacaaccccacacctgtacacacacagactctggtattgcgaagtgtttacactgatgtgcaacaagcctctatgtacttaaatatgcaaacctatatttacatatttcgataaaagaacaaaatacaataggatacttcatcagtcatgacacaaaggtgaaaaccactgttaactacttgtgaacctcttattctatccttaagcatctggaggcagcttgtgtattagaattattgagcctccgtgtcccagatttgtgtcagaacctatccttatccaagacttcttccgaccagggagagaaacaatagcctgggtgtttgtgttctttgcagctctgaccaggtaagactagttgtctataggtctccttcttgcgttctgtgggtctccctgaaaccattttctgcaggttgttaggaagtagggaaggctattttaaaattgctaatccaaagaggaggtaagatgagatcgtgatacctttttccccaagggactaaccacacaaccaaccaaccaggatagtttagtagaagaagcatcaacagtgctacaaatcagaatttgaatttgtatctttccacaacctagctatgtttgcttaggcaaatttcaacctgcctgaatcagatttcctccaatttaagatgaagctggtaatacccctacgtagtgtttgggggtgaagattaaatttaatattaatactgtttatacagcagctattaaaataactagcacatagtagatgttcagttagtggtgtccaaggtggctgataactgtcatgggagactgagtgcaccacttagtaagatgtttgttccgccaactcagtctctatgaagtagctctgtgtgatgtgggagaggtcatggggttgcagtggtacatttggaaaaagaaaaaatactacctcttagactcttaatggagtaaatggtgtcattgcgtagattctcattagccagttctcccttccctctcatgccgtgtctctggggttgagaccagcgaggctatctttgtatttgaatctctctttgtggtctggcttgtgtttcagtgtatatctttccacacaaaccagatcaactgctttcagctctgggaggaaaacaaagaaacaaaatgtgatgcagtcaaacaatttaatttctcaaagctttatgattcaaataaccaacaacattttacaatgagtcattttgatggccagtaacaccacccatggcttcttctttggccttaaataccgtccttttagagaacgttcttagtttctttttaaccaacagtcaaaaattattaatttggctctttattcatgaacattaaaagctggaagttaataaatattttatgattgtaaagctccaatgcatatctgattgatatggagggataaagaattgaaggcaagagaggcctcctctttccagaatttgcaaaatcaatataacttgggctttcactgatatactaggtgcatgactaacattggctagagcaggtgctgtctgatggaatggcgctgccaggaaaccctgatgctgccccggggaggtctccaggtgagtttgatcattgcatctttccctagtcttccaggtgaggttggctagaatacccaggggaggaaaagagagcgtttatataacaccaccagcccctctagtaatgtcaagatttgagagaagtatctagtagctcttccttctcaaaaggtgatgggttcctgggctgcaatgtatttttgaaaaatcatatctcaatcttggaataataagcaggcaagtctgtcagttaaaaggtacttaagtatatgatttaattcatattatgtaatttttttctgcaaatatgttcaggaactcagctgcagtgttggtttttctttaaagatttttttccctttcccctagtgaaccagaacagattcttggagcttgctattgattacgcagatggatgggtctttctgagctaggaggagagaactaggataaatagagtccattttttttccaaaagcctgaaaagcccatgaattcacctggtattctggcaagagctgttacttcttaaagcaaaaagggcattgaataggtttttcataggatggcccttcaaataactactcctagccaacaaaatattttagaagcttgctttgccatgtgctcttgtaggaacctagaaaatttccattatcagctgttttcaaagaaaatatttattttctttttattttataaaaggaaaagttaattcatgaaatataaataaattctcagattggctattatttgcttaatagccaataataaaagagcaactgctattgattgcagagaaagtcagtgaacaactttgtgaatcaggggtctgttgatagcttattgttaggggagtaatttgcgaggttgagatcctatgctctgactgctgatgccattttctgcaaacgttgcctgagccaagtcactgactggcagggcttgtgtatgtgaaatacaaacatacttgtaagatttataaacgattacatggtcacgggcatcttaatggaaagaagactgctaatcattgacattgaatatgtagagaacacttcttttgtaggcagatagacttattaaggtatcttgagtagttctttaatcaccctgtctctgttgccttatttataaaatagtgataagattacttaacctgttaaaattttgtgagaaataaatgagatcataagtgcaatgtgcgcacacaaggcctgtcacttctgaaaaaaatgttggtttcccttttccctctgtgcagaccagcctgcatttaccctttagctgaagcatctaggccaaggatgtgtgtgctcagtgcatagctattgaatgaggaatgggtagaagattgattgaatgaatgaatgaagctagcttatgttcaataaatacctacattagcatttatgggtgaaccctgaatcagttaggaatgcgtcgagtctgtttctaaccaggctgcctcattactgatattaacatttatattccctgaaagcatcagggaatcaggaaaagattctttcccatgttgtttctgttcttacctggccttctttagggacatgaacttcaggtagttctggctattagccactgtacatagacattacatatgcattgtttgttattctcctttgaatttaagattgctctttgactaagaaagtagagtgtttccactctataatttatcgactaagaaaaagaggcaggagaaaaaaaaccacacacaagacaaacatttaacctaaggctttcaggggacaagtgctggtggatttctgtctcttaatgcttgagtattttcctgttttagctgcacgagtgatgaaagtgaggtgaagactgatttaaaggcaccttttagttcaagatgccttgtcttggcaaagattttaagatgaaacaaggtctccgactgagcaggcagttatcattaaatttcgttttcccattgaatttccattttttcccaattgtacaacgtcttgatagcatcactgattcctcatgaaaatacatattttctacttgataaagccacctacaaataacttctcccatcctccaaatcccacaaatgtgatccctactacaattagctaacacctagtcactagttaatctggtagaccttccagttccttcactgcctcttggttccaggtattgcaccagcactgcagaggcaattagggcagaggccttaataagaaggcctccactgaacttaaagccaggcatagggaattcgtgaaagaaaccatagtaaggtgtgagaattgccagattaagacagggataaagtactcttgaaatatccaaacagaacacttacttttgcccagaaggcagaagcttgaggaaggccacaagaaggagatatttcaattagatgcttttataaatgaattttaaaaatccccatatgggtcaaatgaattctaagtgaagaaaacagtgtggtctgtggaatagaaatacggaattttatagaatctcgtgcaaacaggaattattttactccagctagtaaagcaggtgtttgaagcaggtggcggggagttggcatgagggtggccgtcagtgaggccagagaagaccccaggccaggtggaacatgtccctgttgtacggaagtccagagctagtgagctgatgctcatgcatcatttgaaatagtaaacatggaaattaaggcatgtgctgttcagaaggctcagtaaataacatgtggagttaatgcttcctgtatacatgtagacttaggtaagcaaagcctgaggttcttgggccttttcacttgctattgccatggaagagccaacaaactatctctctcagttccagcagtcctggttcatggctatttacatgcaaatgtcaacaccagattgaaaacatcagagtgattttgctataaataaaaagtacattagacttttagattttctttgggatctgttagtgagcattacctgtgcgtgcagacctgtacaagacatcttggaagtgataggaaaaaacagcattctcgtgtgtagtagatagattcctattttcacacccttctctagatatctgtcagatgatcttatactcatatttttgaggaagcaagagtgggatatctgttagagccccatttgggcaaagagtaaatagaggggcacagtttttatggaagcctggaatgatggattacattttaataaggagagaaatttggttgcagggatacgaataagcaggttgaatggaggggcagactgggaggctgagtctcaggaccgcagggccagagcagcacctgcaggtgagaggtctgcagagaatggcagcatgtttggagtgcatgtgaggcaggggcatgggggcttagagtgctcctcttctcatggtgggctcacatatgtgatgtctacttgtgtttggaagcctgggtgacaggtagaccacctgtgaaggatggggaaagagattcctcactttagtagcattatcaagttcaagcaccagtatggaaataggaagaaagcaaaagtatgtactcctcccggctaagcaggttgtgagaatcccagcatccttgcacaccctgggatgcgctcaccacagaggggtgtgcgctggtctcaagggaaaaacagaagcaggcctttttgaattgaagtgcaattggtgtaatataggcaaaatagcaactcttttcctaaaggaacatatcgtgcccaattttaattagctctgatgaagtctaggaaaatgggtgactcgtcagagaagctgttaaacttcagagaaaaactgcctatagccccaaggtattccttactttgacaaaattcttatttttccttaagtgtttgtcactgtgaaacccgtcccatttccaggtgccgtcactgttggtatagcttgaaaaagcaacacacttcctatggtaagggcagcttatgggtgtttgcaggtgcaaggcaaagagacacaaaaatctagatgtcagaaagaaaatataaccagggggtgaaatagaagggaattatcataaaaatcaagatgaattggtaatgaatcagatgcatatttttttctctttttgaacagttttattgagatattaatggcatacaacaaattgcacatattttaaagtgcacacattaataagctttggtgtatgtatacatccagaaactcacccctcaatcaagatgctgaatgtgtgtgtctctcctgagagtttcctccacgccctctgtgacacctcacctcgctcctcccaggcagccagagatgccctttctgccatggaatgtttgtgtgcatttcctagaacgatacataaatggaaccatataggatgaattctttcgttgtcagacttccttctttatcccttccaataggcgtatagcaatatctcattgtggtttcgttcgcacttgcctagtgagaaatgttgttgaaaagtttttcgtggacttattcgtctctcctctgtcttctttggtaaaatacctggtcaaatccattgtcagttgtataattggattttgtcttgttttattttgttaccatttaattttgagagtttcaagaaatatattctggatacaattcctttgacaaatatatcgttggcaaatattttctctcactctagctcttcttttctttcattctcttaacagtatcattagaaaataaaattcctcattttgatgacgtccagtttgccagttggttctcttatagattatgcttttggtgactgcctaggaaatctctgcctagtagagagggtcacaaggttctcttctatcttttttttctagaagttttaacatttaggtctgtggttcattttgagataattgtatattgtatgaagtacgggttgaagttcattttttctgcatatggctatctagtcattccaataccatttctcgaaaagacgatccttcctccttgaaatatggcagtaacaaattatagcacatgtgatataaatgacttgcaaagccacacttccaacctgcattaggaatggacggttacaagggccgctccaggagcccacctggaggaaaatggaaactgccattggctggcagcctgttgggtaagaatggaaactgccgttggctggcagcctgttgggtaagaatggaaactgccattggccggcagcctgttgggtaagaatggaaactgccattggccggcagcctgttgggtaaaccgcatcaggctgcattcacggatgctcttctgtggcactgatgggatgactccaggaagtctatggggaagtaccacaaaatgtggaggaagatggcactagacacctgaggagggaccacatgacctccatccaggtgccaaataattacagttgagatgatttccctgcctctactaacccaaattcacccaaattcattgtccacgttggtgttaggtgatatttccaaaaaattctgttatgccactcctttgaaaatttcctaggaacctcaggtaggtccttcttcttcagagttctagaggacagcagtgtgtccttgcactccctgccatcttccagcaggaccctgtgctcagccctgctttccacctgtgcctcgttcttacatgccttgtgtgagggatgtggcttttccctttttcggtttggcaaacaccttctcccttttcaagaccctctctgaaaacacctcatgtactcctgttggtattagcccctcttactttgtgccaccagatcagtttctgtctctaaatatcattttcgctccatcggatagaataactgttcctcctctcctctctgttctgtgtttccccacagagctgtgatggatggaggcctgtttgctgttagatctgctacagctggaatgtaatcttgcttggagtaagaacttacaaatgggccgggcacggtggctcatgcctgtaatcccagcactttgggaggcagaggcgagtggatcacttgaggtcaggagttggagaccagcctggccaacatggtgaaaccctgtctctactaaaaatacaaaaattagctgggcacgttggttcacacctgtaatccaagctattcaggaggctgcagcagaagaatcccttgaacccaggaggtggaggttgcagtgagctgagattgtgccgctgcactccagcctgggtgacagagcaagactctgtctcaaaaaacaaaacaaaactcacaaatgttcatttagtgaatgagtaaatgaattcagtgaatttctgtgttattcatactcatcctactttcatggagtttttatgaaaaggatgatgaccttcagccatggggagcattgcactgcctccttccaaggaccacctgggctccctggccatgagccagttgccccaaaggcatttgacttagattaacctgaaaacatcgatgtcatcatccctcagccctgctcagaaagctgcagggagccttcaccctttcaggaccgaggccaagctccccaggctggctttatacatcctctaacagaagctggccctatcccgtttccacttaattgactcttccccatgggatactctccttaattaaaattcatctctaccccctaataagcgtatgtgttcctacctccatgactttgcaccctgaaatgctctcagattccagtaaaatctcccttctcctctttaatctccaagtttctatgttttggggctctgagtctcttctccccataaagtctccctttctgaatttccagcctcactgcccactgaacatctaaccagatactgctttgtgtattgagtttgatggtataattagatggtgtatatttctgccacccacggcacagcctggtgaattgcaatctttattcattgatattgtgatagcagtgaacttgggtgtggggaaagtttaatgaaggtcaagcagaagatatgtaaagctctaaatacagagagtgatgatttattcagagaaataagagaatccatggggaataccagactctagcttccttgtggacaagaagcattcctgtgcctctgtgtgctctgtgctccttctccctaactagatccccacccttgccctagcttggtgcactgataccatacgtcgatgcagacactaaagagatgacttccacctcctcacaaatattcaggtagaagaccttccctcggaacacccggtcatcagagagtgttcctgatttcgcttttgcaaacaagaggtagtccagcttggaagaacatccagcgccttccctgaaattcatctgttctccactttccactcttgactgtcataacaaaggacagttgtaggtggtgcccagtgacccaactcagtcagctttatctattggcaataaggtagtattgacatatcaatatttccttgccaagatgctcatttgttcttaataagaatcaataatgttcaattaatatagattatgtcactaagtagttaatttagaatgtcgttgctttgcagttcatatcctaacccacctgatcctaacagcatccacctaggagcccagaccgttgggaaggagaagagcagaaaacctaactggtccacctggaagacctagaatttcattccagcaggagcggcccacccaggaaagggcctccctcccacagcagctgctgggaatcactctctttgatgacatcattgtcatctgggcagggagcagaaccattttggggtttcccatccattcagtgctcccactgaggtcttggagtatggcccagatggctgtagatgtgcaaacttacgatcatcctggagcacggggccctgtgtcatatggatcctgcttgatgtgtagatagtgcattattttcctacttgagctctttccttttccaggtacatagacagggttgccttgaggcttagtcacccttcgcccattctgtcttactactacagagggtgagagactggacaaaggggccctcagtgtaattttcacttcacatattttattattattttttttttgagatagggtctcactctgtcgcccaggctggagtgcagtggcgtgatctctactcactgcaacctccacctcctgggttcaagtgattctcgtgcctcagcctcccaagtagctggaattgcaggtgtgtgccaccacacctggctcatttttttgtattcttagtagagatggagtttcaccatgttggccaggctggtcttgaactcctgacttcaaatgatctgcccgcctcggccacccaaagtgctgggattacaggcgtgagccactgcacccggcctcacttcacatattttaaatttattccagtagtctaagcattatgcaactctggttagataatgaaggtcatgatacacctagaaggttacagatttcaactggattaaccattgttatacaaacatatgtgcatgtggatatcagaggattcagagcctctctcctctgttttgtaaattgaccttcagtctctcatcttaggaatgactcttggccttggatgagggcctgacgagggtgggttgagttggtaaaacccggctgtgttagtttccagtccatctgaacccacagccccttttcctggctttccctgctatagcccatgaacacaatcacagtttctgttgatcatcgttatggtcctcccaaatccttcacctgggctattggtttactagggttttttttttttggtggatttgcccaaatgtggggacacctggcaggagacagcagctggggttcctcgaggctgcttggagccctggcccctgagtcaagtcctcacgttcccttttatttccttctcccctaattgcaagtcgtcaggagtttcaaatgcccaccaacatttggagaaggcttgtgggctgtttgcaggctattcagccccaaaggctgtacggagataggtgtgggttatcctaagcgtccctgctcctcatgttgtcactcatccattttcagtaggcgctgctcctaaaatgcacgttaatattgatgctgtttcatccgggttcttttcctttctacattgcctcacctggtttccactattccctagtaactaggtaggagtcatttttttagatgaataattgatttgcttaagggactttgggcaaacttaattggtagctgagttagaagtacacattttgttcatttatttgcccgtcctttagatattcatgaagaatttgcatagaagcctagcactgagtttataataaaaattaacctcatggcatctatactctcagccacttttttttttttctttttttttgagatggagtcttgctcagtcaccaaggctagagtgcagtggtgtgatcctggctcactgcaaggtccgcctcctgggttcaagtgattctcctgcctcagccttctgagtagctgagattacaggcacacaccaccatgcccagcttttttgtgcttttagtagagacaggttttcgccatgttggtcaggctagtgtctaactcctgacctcaagtgatccgcctgcctcagcctcccaaagtgctgggattacaggcgtgagccaccatgccctgctttctcagctactttaaaacaaataacaacaaaaaaatctcctgattgtcagtgcagagccccgcccgtaatgcctggactcacaggctgctgggcttagcagtctcctcaaccccagctgcacaatggaattactcggagcttttaagaaagaaagaaataataataccaattcaaaatcaaacacggaacacatacatcggtcatcagtcacataccatagattcttatttaatcagtccagggtgtagcttggctttggaaggctttttctttcctggctcctttttttttaaacaattttttattgatgcataatcaatgcatatagttttggggtacatgtgataattaagtacattcatataatttgtaaagagcaaatcagagtacttaggatcttcattaccttaaatatttgtctttatgctaggaacattcaaatgattcccttctcgctattttgaaatgcacagtagatgagtgtatgctgcagccaccctgctgatctatcgaacgctagtgtgcagctgagggtgagaaccgccgggtggagattggaggagacctgagtctttaataaacactgagccgctggggaaaaggtttgaggggcatttgctaacacaaatgctaaaggtcagtactaaaaactactcaggccattcttaggcatttttgtcttagaaaatgtcaaaacagctgtgacctcatgatttctgtctcgtgaggactctgaagaatgccttagtgctcctgaattaggttgtaaatattgtacttttttctcttgagttttctttggaagaatagtgaatgattaaaagaaaaccaaagcagtactattattttagaatacggaaatgcaaggtagcaaagtgtctaacacctagaaagttagccccgcctggacaccagctgtgaagctctgtattaattgaacaaatgctgtccaagaaagcaaaacttcctaatctcttctgatggtcctcaatataagattagtatagaatcttcttagaattggtttcctttaaaaaaaaaaattgtgggcttctcttccccatcaaaatgacatccctttgagattaatgcaggaagcagagggcacggtggaacttgtctcgctgaatattctgacgtggtcaagtttcctaatcaacagcagagatacaaacttgcattatagttgtgggtggtggggaaaggattgcctttttttgttgttgtttttttttgagatggagtttccctcctgtcccccaggctggaatgcagtggtgcgatctcggctaactgcaacctccgcctcctggattcaagaaattttcctgcctcagcctgccgagtagctgggattacaggcacctgccaccatgcccagctaattttttgtatttgtagtagagacagggtttcaccatgttggccaagctagtcttgaactcctgacctcaggtgatccacccaccttggcctcccaaagtgctgggattacagatgtgagccaccacgcctgaccaggattgtcctgtaaaagtgaatttttctaggcaattgaagattgttaaaagtgggttaaggcttatgcctacctaaaacattcattccaattagggcctcatccacatttaaattccagattctgaaaacccttcactcctaaataagaaagtattggggcagcaggtcccacgccggactgtggaggttggctacgtgcagtgaatgagtcatttctgtaccctctagtgtatgtgtaaggtacagctgcagatagatccataggaaacagggactccaagaatagcagttagtaaatccgtgatccgtgtgtcatggttctattgaaaggaaagtgtaaccacatcagtgggtctgcataccattgaaaagagtttctcaatcaaaaacctaaacacatgtcctgaaaccatcacttaagcactctgagatcttgatccaattacctaaacttcctagatctgttttttaattttttttgttaaatcattgcaataattcttgtatcacagagttactccagagattaaataaggcagcgcatctcaaacacttaccagtttttgttaaattaggacctttttcacccactacagttagtagtacctaaaagtggagctacgactagttttcttggagtgagttttgggaatttaaataagtaaatcgtgtgatggagtttggaagtgataaagcactatataaaatgctcatgcatttccccatttcccaaatgtccatggcatgagtcgtgcattccagatgcctggtgtgttctgggaatgcaaggctggccatgcgctgggtctctcctcatagggtttacagtcagttaacagcaatgcacacaaaaggatgtattgaaatagatccattggaggagtaaaaatacggtgacaataaggggacagagaagaaaacagacaaccatggccagctcctaccggaacagtggtaaggatgccgaacacattcatacatttctgtgaaaatgcaagcccttccatttcattttggttagtaataatcatatattttggccaggcttccctcccccaatttcctacggctctgcacttgacattcaccaaaaccctgttagtttcccccaaaccggacgtgattccactcctccatccttctgcccctttccgagcagcttccttcagggctcacccacacctggaattcagcaccagctattacatctgcatgtcggctcctgtgaacccgtcatcccctcctactacaggccggggccactgggccctgttagttcagggcccctccattccccagaatcttcttccactcacaacagggcaagggtttttaacatgcctccttccttccatgccttgagcttcttgcaggcaaataacaaaggcattttgtctgagtccccagagctaagcacagaacctggactatattaggcctttaatttttttccaaatgtcagctaacaggcacaggcatgcatacatacacacgaagcattttatttttttacctgatggggacacaggccagggtttgacttaggagtacataataaggattgacaatcaggacattaaagcagataactttgggttcaagttctgattttgccgcttactaggtggtgaccttgaataaattacttaaattaagattttcccactcacttgaaaatggggataataaaaatcataacaatacattttggagagtattaaatacggaaatgagctaaagttagctcatgcccggcatataatgtttgcagctagcatttagagtgcatggggctgctgatgtgttgatgcctgaagttgcgcaaatacaggtgggtagtggaatacggaaacaatgatcccataaaccaggcccaaagccccatcactgaaggaatgcttaccttagcctgaattttccagtatcctctacatgccacaggcagagccaccacccagagttgaagccatctgaaggtgacatgctgcagccttgtcctcgcaggtcattcttcagcctcctgacctctgctcagaagcctgtctgtgcttacggactgggctctgcacagctgtcacatcctatcactgcccctccaggtttgcagtcaaagaccacagcagagatgaggcataatgaaggacagacacacccaactgagcaccaagcaagcgacatatcctaatacatatgtgcgatgtgtgcatgtaagggcaggagagcaggagagaattggaggaaatagctgcaaccaaaagtgaagaaataataagacacctggaaagaggcctctctcttctgatctgtgaggccgtagtgcagtggaagcgcctgatctagagagaggcaggcggatatttgtccaaactgcagctcacacctgtaaccccgtttccctcctcaagtcgtctacatttactttgcctcagtttcttataagaagatagaggcagtaacatctatttttgtgtgtttttgtgaaaatgacatattatagagaaagagtctgttaaaaatagaagtgcttaataaatagttgctattgtaagtggatgtcagaggagctgttacaatatatcccagaaagtgagccctgggaaggcgccgattttccatagcaatcctgtttctgctttacagttgcttcctcttacgtgcatttacctgcctggtcatcctgcagggcagtgccacctgcgcagtggtgtgttgcatccaggaacaatgtccacatgatcagtgtcaggcacagagtggcatgggcatcctcaccattctgtctccagtcccatccgtggacaaaatgccccctggaaagttgaacagagattgcttcaaatgggccaaatatgcattagtgaggaactaaactgctttgacagctcctgtgtctcctggatgggaagtggggagggagtcatggagttttaatctcatcctctttgtggcactgggcacgccactcaagatccctgcttatttccagcttatagcatagaatgagaagccattcacccttgtgtagagtgatgctgggaagaattaattattcaatgacttaagggtgcttctgatatcaaaagagcccattatcatcatcggcctcctctccccagtgtgaacacacggcaaacctgagactcattggaagggacgctgctcagacctgcgagccccatttccatgggtaggtgaaatgtctcatggctgccgacacccttgcggcaggtcctgggcgtggttaagtagggggaaagtgtatttcttttctgtggcaagatttattctgtaggagagctcatactttggaagcagcaataacctaggactgctcttaactagcttgatgaccttgtgtgtgtgtgtgtctgtacgtgtgtgagtatgtgtacctgcatgtgtttataccgtatatatggatatatgtgtactccggaactcataatatatacagttataaccattgttcaatcataagctgaatatgcatgagtcactctttcctgcactgaactccattttgtctgtcacaggcgttagatgacagcttagatcatagcctgctccaatctttacattttaataagcaccttttttcaatgccactctgatacaccctctggtccttcattagtcattgctgatattatttctctctaagtgcttcttcctccattttaaagaacaacttcgatgtggttttttttttctgttttttaaattaaactttgtattttgagataattgcagattcacatgcacttacaggaaataatacagagagagcccttgtaccctttccccagtttcctccagtggtaacacccaggacattgacatggatgtagtcatgatacaggacatttctgtcctcacaggacccctcctgttgtctttatgaccactccctccaagccctacccatccagaaccctgacaaccactgatccattctcatttctataatcttgtcatttcatgtagttaaataaatggagccataggtgtgtgaccttttgggattggcttttttcctcttggcatatttctctggggatcatgtatatacactgatatggtttcaatcttggaggaatcctgattctgaaatcctagagtccaaatctgatgatttcagggctgaacagttcccttctttgagtgatgaggacctgaaggctgagagacctgaggtgtcatgcccagggatcacccatggcacagcctgagctcacagcagagatccggcctccaggcccggagcactcctccgccatgaggtcttttacagctcagactgggcaaagctctttttaattccaccaaacctagaattgttaaaaaaaaaaaaaaattaattaattaattaactaaaaacgctcaagatgccctcttactgccagccacaaaggggattctcagccatcccagcctttgtgggcactggagcagccgtggcctctcttggtcctgcctgtgtgtgcaggagcaggcacaagtgggctcaggctgatgcccccagaccaccctcggcctctgacccttgcctgaggctggcctccacaccatgatgccatccaaggaaaggcatctccttaatgcctctgagagttccatttgtaaacatttttgaatgaaggtctctaaagaagcagccaaagggcaggatgtcccacaacacaaaataagacatcctccttatgctgtctctgaccaaagtcctcatgctcacacagctggcccttccctctcttctcttcttctcttccttcccctcaaagaatatcccagcctctatcaaccagcaccgtggctctcatcaagatctttgccggtcctcggcccttgttctccgaacctctgtgctctcttacataaattagcaacctcctctggcatctctaagcctgtgcaccacccattccccttgtcccatagcacaggcagcacagaggcatggcatgccagagaaagcaaagaagggagaagccttaaattcctgtccttgaatatgctcttgccccagacatattgctcatcgggggtcataacagctcgcaaagcaaccttttcacgtacctgagaaactctcccaacgtgtccaagcccgtatagctgagtcacttgacctttcttcactatgacctcacctacctgggccctcaccaatccatccagataattgtaagattgtataaagttgaccgctttctcaatgcattctcttttctcatcaagatatcagaaatctttgacatgccctagaaaaaaatgcatgtgatacggggttttactgtagagcgatggaaatgttttggaactggatggaagtggtggctgcacaatgctgggaatgtactaaatagatgacatggaattgttcactttgaaatggttaatgctgtgtgatgtgaatttcacctgcatacattatttttaaatgcgtatggggtcacttccaaggtgaagtgcccagtcttctttcagacatgaggtgtagctagagcattcatgaaggtatgcaaggaagggctgagatgagcagcaaggggtggaaaggaaagggtaccgaagtgctgctgtgctccacgctggccccttacatagctggagacacaaaagtggggcctttgcgtatccagattcgaagaatttgatgagggcattatcaagatgaaaatgtggaatattgttgttggcaaagccacattaacacacccacatagcacacatataaaagttctaatgactgtctggtgctttaaaatccagggcttaatacaagcaactcaagttaaccaatttaactgtgaaaacccaatcataggcatttcctgacattttgaatttgcaattgtaatgccgttggtgtccatgtagtaaaaaagtgcaatatttggaggatgcgtattttacttttagattttatatatttatcaattggcatgatcttaaaaaaaatctagcattaacaccaaacatatacaagtgttgtatttaatgtctgtgcacctaaatcagaccagtcagaccacttcacctgttgggctctccaaagcttttcagaaacacagcttatcattcacggacacctctgaagaccagaggcattgtctgctgaggctgcatagttgcttagggcctgaaaactttgtatggtagtttgtaatttgcaatgaatcagttacagccagaattaagatgattttcactctaactacaaaacaagtttgactgtaaacaaacctagagcaatatacagagtatatctggaagagatcttccaatacatactatctttttataaatgaagaagcagaacccagagaatctttttttggaaagggaatttgaagaagaaataatttttttaacgtagccggatgcgatggcgcaggcctgtaatcccagctactcgagaggctgaggcaggagaatcacttgaacctgggaggcagaggttgcagtgggccacgatcatgccactgcactccagcctgggcaacagagtgagactgcctcaaaaaaaaaaaaaaatttaagaatatgtgtattcccgttttttacatgtaattgggtatttctaattacatatcacttgttttttattcctgtgatatgataaagaaaacaggcattggttactggttccttgttatttaataaaagaaagaaaaataaacaacctctataagtgttaactaacttggcaaagcaagccttgatttccggcagtcacttagggaagaaagaggccctggaactctggaccccataatatcaaaaactttcactactggaatgcctcatagcatttacagagatccagaaatggaggctgcaaaaattatgactaggtaagagttggctagagacaaggaagcatttccttggccaaaaatagagctgaactctccttgctgttgccagcattacaccacatacatttccaccagttatttgaagaccccttcacaaccaaagacagccagggcttcgcaaggcccagacaccccgctgactcatcccatctgcagcgtgcaaagtgctatttgtcactgcctagttatattccactctgcccaacagaataaatattaagtaagcgctatgtacttacataatttgcagaattgatcggctgacttaaaagcttgaatccccaacaaaagaaaatggagtgctttgtgcaaatgttaaatgcacagtttaattggcaattgtgtgttggaaagctattgtaaaaggatcacagttttgaggtgatgctccagatagcacagtcagggaaataagttttcatctttggcattaaaaaatcaggtcttggaattgaagtaaaaaaaaaaaaatagggcagcctcagtctggatctctgtctcatcagaatataactttcttcctcctacactctgcctcctaaatcagaatttagaacatattaaatatgtaggctttaaagattctttccttgcctaaataatttatacacgtctactaaactgttaaatatcaaagaaacacatgcacatggacacacacactcagagcattttacaacagtgatttccacctcccaaaaatttaagaacgtgctcagcaggaagttagagttgtcaggtcccctccagtggaaacttaaagaaatgtgttgtattttgtttcaatgaggatctggatggagagttcgccatcttgattcacgtaacaaaaataggtgagagatacatgtgatccccgaggagaactattagacttcccttagatgcaaaggttgtctcagtcgtgaaaaaaacgtgtgtcatttcagcctattcagtgcattctgcagcacctgctagaatatttatcctccttctctttccacttaagtcctacatttacataaaggctactggagggttccatgttgaagcaggttttatttgcaaaactcagcctccatggatgtgtctttctgcagcattcctttgtgcctctcattatcacctaagggtttataaaatgggcagtggtaactctagttttaaatctagttaactctagagattaaaatccagtaactctagattaaaatctagtaactctcagctattgtgaacaagttgaagttaaaaaaaaaaaacaaaaaacctttcttcagctgcgactgaaaaagatccagtgataccaagcgtacctagtttccatcctcataaaataatctcttaagtgtaaagaagcccagtgcaaaccaccatgaattatcatcatcgtttcctacagtgagttcggaaattgctttttgcttctggatactgtgaaaagccaggtcaggaatccacaatgggcatcagtcatcattgtgttgctaatacttgccatcggttcaagaataggaatattaagattgcatttcttcattcttccttgccaaagggaggaacaagacagtcaaagggcatggacccctggcccttgattgaaaacactaacagatatgcatgcagttagaccccagtgttcatgtgtccaaggcaataggacttccaggagagacatccaagtgaggaagctgcaagtgctgcctggaaacacctctatcttcaaactccaccctctctggcttggttgggaaaacctcattactctcaattttctaccaaatgatggtgaagaggagtcatttgttggaagaaagggattcattacagggaaacaggtcttgaaaaggatcaataccatggctgcctccttgtccagccaaggggaacctgtgtggctctcccaagcctgctctccttcaggccctcagaagttcatgctgtcattaggacagtcctgcagtcaatggcagggggcgtgatgtcccgaggtgtgtgaggtcttccctgagcaaacctgtcctttccagtgacctgccacggtgcccaaaattctctcatccaacactgtgttagtgagttgcttgaactctggggccaggctgcagaattgagtgccagcttttcttcttactaactggataacttctggcaaaatttaaaatagcagtaattgcagtatctacctgataatggtgttggaaggattctatgattaatacctaggaaaaacttgtgagtgtctggtgcattctactatgcaataacattagttatttttattatttaacctcagtgtgttgtctggcaaatagaagacacagtcagcaaaacacagaaattcgttaatgaagtgaccgccaggcacctggacgagccctgagggtataggcaaagacatgctggtagaggaaggggtaagagagacctgaaaattgaggtctgtccagggaggccgggctggagacaccctgagttcctagaaagagcaagttatctatgagggagaagagaaccattatagtggtaattgtgcaaaaaggaaaaaaaaagacaaaagaaaaaggcagccgtaatcgttagatgccagggacagtgctaaccactttatttatatcatccaatttgatcctaaagcaatcttataagctgggtatattctcatttcatagaaaaagaaacaggcctggagtgccctctcagttagtcgatagtggagctgggagctaaactgttgcccaaactggatccatccagctggcacaggtcataggaaccccggggtctcagcacttcccagatgcctctgttagtgcttcctcttacttggacccagttgtcttaggaaagcaagacagcagagaagcccagctcctttctctcttcctggtacagaaccagcatcagcattatttagaatccagatgtggccaatgtgggatggctggaggagggaacaagctggcagacagcccccacctgggcataggtacatgacaggagggaacgagcaggcagacagcccccacctgggcataggttcatgaggaggaaaacctgccaggaggattccacacctgagtcagggagtcactgggtttttccagcgagcacccctcacgtccatctccatgtttcttcccgaccccttcgctctggaagtgaggagagggaagtgttaccagttgatgttgtttatgtaatgctaggatcagccaaagagtgaacatcctgctctttcaaaatgaattgttggtttgtaagggtgtttgctgaccttttcaccagtaccggggaagaaatgcgcatttatggctctctttttggctttagaacagataatcccagggcccaatctttgccctcttctccacctccatacacacaaggaggcattggtctgcggaaactgtttactcagaggaccagtggccctcgtgcaactgcagtcaccaagttgccatccgggctgcagctttcagctggctctcctctgtgtctgtgctggaggtgatgaaaccccaggcttccacctgccctcatcagggtccacacagggaagggacagccttgtcttgaggcctttcatgctgaatctaaacctccccattatgaattgacgtggtgttacttgggaagggatgatatttctcaaactcctcctgtgggcttgtcacagcgccctgccccttcctccctcatctcagctgcccctcactgggcatcggggacaggcaggtattcttcactttatacatgagaaaggcaggcccagacagggtgggtaccttgcctccatcacatggctcatcagtgctggacaatcgagtatgaaactgccatcactcccatgcctgcctcttctctgtggagacaacttcaacttcagaaaacgttagtgagtcttatcatattcctacagccacattccagaacatgctgattttctcatttcaggacagtttccccaggcgctttcaacttcttataccttaaaagaaataccaaatgcattactcatgtctgtgcagtattccctaagaaaataaagacatctagctcataggaattccagaaagataaatgaaaaataaatgaggcttcagaatgctcacaaaacaaggactctatttgccttaaataattaacattgagaattcaaacctgaccaacttttcctccatgattaaagcaacccagggagagggcaggtgattccagtgctgggggtccctttagccataaatgtatggacgtgtgatgccgtagcactcagggcctgggagagccggggagcatgaggatgatcgaggtctcggagctcaatcaatcagcaagtgcttcttggtcacctattgtataagtagaaatggatgccctatttatttatggaaaccatcaattgttgaggacctaatatgtaatctcatctaggataaaatccttgaccttgaaaatcacaatcagctgggagagaacacagagtaattgttagaatgcaagatggcaggtgccatgacagaagagcaggatggatgctgaggagcacacaggtggggtactagctcgggcctcagagcaggcaggaggacctcatccaggaaacatctctgagttcacttcccaaggacaagtttagccccaggacaaggaggagatccagaaggcattctacaaaaatgctcaaggaacaagggcattggagcacaccatgttggcagggaaacagacaaagaccagacatcagcgcttgctcagaatcctctgctgctctcgaagggctgtgtcctccacaggtgggaggatgccacctgctctgatggtccaagcagtgtgggttcagccagcgctcttggcacctgggagcatgattccaaatgtagacgtaatccagacctgcagcttcaaaaaaggagccaccgtggtcagggtcagggctgacacagggccaggggaagagagtttgcaagtagcaattcaatacttttatttcagaatgtgtagcaagtatttgacatatatgtataaacaaaaatcatataaccagtttcctagaggtagtccaggccatgaaggctgcaacttattgtttctctgccctgacttaaagcatgtgtttccaagttgatgcctgttctttttatgcctcatcaccaccctgagtgttcagtgaggaattgctgcaaggacaaagagttcccaatgtaatgtggatacaaaagaatccaaccactcagcttcatcagtgcccttggcaatgcacgtccaagaagcctcgcacacagagctgggaggccatctgaggtctgaccactgtgcctgccagaagatgagcattctgtttgtctctacagttgtgtgtgccctgtggcactttcacatattaagatttgaaccccaccaccccccaaccctgtgactgatccccacagcctcccctttagcctgggtgaattaattgaaatcataggagcagtcttagctgtgcccgtcatgcggtcccttgagacaaatgcattcggtagatgatacatgacagcctgaacacaggccagggaggagaccctggaaaagcagggacagaaggaagacaacttcccagccagcggccttcgcttcaagacagaatccactctcctccctgctcaccagtaacatgagggctgagcaaatgggaagatggtctttgagagttatcgacttcctccttttccagcaacgacatcatgcctctaagtagcagttcttaggaaacatgaagcccccaaggacagctggctggaaactttcaaagctttgcaggcataaccactaatgaggagcaaagtcgctgtttatttgagatggtgacagacactatcagcacacttcacacagttcagatatgtgtttaggttcagaatgatggggatttcaagaccaaaggctctcgaaaatttcagcaacccaatttattcaccaaagcattaagccaggatctattttacatcagattgtttgaaatagtgatgtaagaaatgtgctcttgatgtggagcctccagaaaaggacttgatgtgctcatgggttctcatgacctctgaggtctttgctgcagagaattcaccagcctagtgcctggcacatcacaggtgctgtgttaactgaaagaatgatgaattattaaataaacagccactgtgatgtggagaggaaagagttgggcacacttgggttcaaagagcaccacctccaaacgccaccttgcctgcctacttctgatggacactgttagcaaattgcttaaacactccaagtttgtgtttccttatcagtaaactagggataaaaatatgtatcttcactgggcatggtggctcacacctgtaattccaacactttgggaggctgaggtgggtggattgcttgagcctaagagttcgagaccaggctgggaaacatagtgagacccgtctttaccaaaagtagaaagaaattagccaggtgtgggggtgtgtgcctatagtcctagctagttaggaggctcaggtgggaggatggcttgagtccagaaagtcaaggatgctgtgagtcatgactgtgctgctgcactgtagcctgggtgacacagtgggatccagtctcaaaacaaaatatgtgtcttgcagtgttgttgtaagccttgatgcactctttcctagtgtaccgaagcagcctaataaatgttagccccccggttgcctttccacttaaagagagatggggtgtattagcccattttcacagtgctataaaggtactacctgagactgggtaatttatgaagaaaacaggtttaattcactcacagttctacatggctggggaggtctcaggaaagttacagtgatggcggaaggtggaaggcaaaggggaagcgaggcatgttttacatggcagcaggagacaaagcatgcaggggaaactgacattttgaagccatcagattgcatgagaactttctatcatgagaacagcatatgggaaacctcccccgtaatacagtcacctcccaccaggtcccctcctccacaggtggggattacaattcaagatgagatttgggtggggacacagagccaaaccatatcatgaggaggttatatcaagtggatttatagaactgagaaacagttgagaggctctgtggtgtgcggatggttttggaggttaaacaaaacaaagaatactaataccagagttccttccttgaagccagttaagatcgtcacactcaaagggaagagatagactttatcttgtctctcccagtagattgataatggcaggaggagaaagggcctttcctatcctttctatgcaaaagtgtggtgtctggaacagcatctgggtgtcaccagacagtcttttggaaatgcagcatctcagcttccacctaagtaggctggcccagaatcaacatgatgaggagatccccaaatagtttacttgcactttgaaaagaaacactggcctagagcaccttcccctctctgggtcgccaggttctttgatttattaagtctctgcagctgactgatatggagggcaagggtacttttgaggaattttctgaatagtaggctgaattcttcaaccagccaaccaaacaacagcatgaatctatcttatactagatacgtactgcttcttctaaaaggctgcagagagggcagtcgtgggcccagtgaacagctgcattctggtcggtcctctttttcccttcctctgccaggaaccacagcagtgttgaggttctgtaagcacgtgcccagttggcaatgagcttatctctgagcatctgaacagaggagaagcccagagcagcctggctccagggaccccacgggacgcattgagtgctgagctaactcagggaggagaccacaacaaatacaaactctgggaaatcagggacagggcaagcctcttgggattcatccccggcggacatgcccagagactgtctgccacagcttttggcaatgacagatcttaccatagggctcctactaaataccctctggaaaagcactggacagtgacccttacttgaggatgcataatcaagggtgtggtcatgtagccatcataacatagggatttggaagattgaggtatgcggaagggccagttccaggaatagagctcatgcttggtccaaggactagggcagggccttcaggagctcgtggctttgaggagggataaaggagaaggattggtagcaaatggcccagagattcttacaaatccaccttcatccataaggaggttggagggtgtatgatgatcctctcttctaaaaggctccctttcaaattacagaaccattgggtaattcttctattacccagggaatcagtgccagctccccaggcactgagtcccaggaggaagacagctcatcttcattcgtgggaacctgtcctatatgtgattgtgcccttgggtaaagtggactttacaagttcgttattgctgttgtttgagcagaggtcatgttttttgtgttactgttgtttttttttttttttttcaaattataaacctcatatatatgttaaagcttaaattcaatctgatgtagagatttaactgtggaagtgaaacctctctaaaaaaaaaaaagatcctaggaaacaactagaaatatgagatttattctaatcctaattgcatgttccatatttagacacccttcccacaaaaggtgagagaaatgcttaccttgtccaattttacgcacaagcctccactttaaggaaacagattactttttttttttaaagaactctcaaattacccattgataaatacagcactcaaatttttttttggaaaaggcacaaaggtaaacagataaaggagttgagtggtcacctcatgacaaggacagtttgagggtttactcttgttttcatgggagcattggtgcgggttacttcatctgaaagaaactttgagctctgaagctatgtctagcacatgttaagtaagagtggtccttggaaatttcaagcgttggtttgcatggaagcacaaatcatttgacccacatgaaaagaatgaaatgggatggaacagaaactcaaatttaaagtattaagtgcttttgtcaactgcaaataacatgtctctgggatgttagtgtgtaaattgggcagtaagattccatgtgtattagaaataaacttaattatttaggaggtagggtggacctcttcttacaaaattatattttctaaaagaaaataaaagcctatgagctatcaacagacatattgttgtaacaacataaaaagtacatctttagccagctttcactcatccaggctagtgcaaataaggtgtctattaagaaatggacaggtcatgctcaaaccttccacgaggctgtggtcccatctcatccctttctcactctgacaggggcacagtgaacttcctagtccattccatgtcctgcccagctcagggtggaggagccaaagagccctgctgtgaccacccaggagggagagagggaagggcttggttcctccacgctgcccaagcctggtctgtctcagagggcagggctgaggaccagagcgcctgtgggccagatctggagcagctggcgggagtgaatgacctgtgattctgcgtcctccctctactgtggtttcctgtctctgaaaccttatttctctcagcatcctgactataattaacatatgaaaaaaagaagccaaataaatcaagagaggctgaagcccttcgcatttaaaatccatccaccatcgtttcccccattttatcagctgtgcatgtgctgagatggattatgcattgacactgtctttgaatagagggtgagttgggatcctggtaaagcagccattagaccattaaaggcagtaggagagatgcaggaagtgccaggatcactagaatctggggtccctaatccacacaacctcacccagccttacaacaagtcctgtcaccctgaactgcccaggcttacagagtaccttcaaagatgtgaaggggcagcttatctttcaaggtaaccaaaatatcatcttgatattaaatcagattacttggctaattcatcagtttccctcagagttaggtaccctgcacatgtcgttgtcacctttagatggcctcatgcatgggaatgtgaattattcataggctttctttgggttgcaggaaaccttcatattgctttagtttcttaatgtatttgataggctctttgtgtatgatcacattatatgggtattgctggcagtacagtaaattttaaattatatagtctgcagctttgcactaagacatggtaggagatgattcatcattttccttgtcttcctgtttacatgcggacatataattcatgctcagaaactatctttcagctcatctggaagtgctccactgcaccaccacagaatctatctctgccagtccagaattgtaaatcacttttctattaaacagcggggctaaaaatgcaaacatatgtactttaaatatatgtagccatctccaattcccagaagatgagccaaaattaaaggatagtcaaaaaagctagtgctagaatttaatgaatgaatgatttgacttgagatcagaaatttgcatttctgtacacatattgaagatatatatacacacacaggtttcccagaatgggcctgtctttgggaactgtgtattctgcagattttgtacactgaatctctatcattctgaaattttacttcctaagattattcactcatgcagagtcacaagacagacttgatggtggggagaaaaggtctgtataaattctcagtttagcatgatatgaagcccttgtctgccatcctcttgaccttcatccccaggccaagacaatgaagtcatttgctcaggatgatggacatctagactcagtagtgagtgcttttcatctccaaggataagattccacccagcaaatctgcctactcaggcagtagtgggagttagatatttcagaaaggttttcagcagtcactgtttctttgcccaacaatacacatcatcatggttctctactccctgaacctgattcagctgtgatagtggataaccattttcacacacatgctcatgaacatctggcattgttgaagaaggaagacctttccgggtaactgaagcttacccattgaagagttttttgtttaatattgcagctgtcttaatggaatccttctgaactgtattatttgcttgcctactttttttttttctttgagacggagtctcccactatcgttctgttgcccaggctggtgtgcagtggcatgatcttggctcctgcaacctccacctcctgggttcaagtgattctcctgcctcagcctcccaagtagctgggattacaggtgcctgccaccacacctggctaattttttgtgtttttagtagagacatggtttcaccatgttggccaggctggtctcgaactcctgacctcaagtgatctgcctgcctcggcctcccaaagtgctgggattgcagttgtgagccactgtgctcagcctgcttgcctactttattaagcaaaggctgccaaaccatttcatttgtgattctgtgattctgccgagaattgtggtggctgtctgtccctgtagaccattggttgccttgccttggagctcacagcctttcacctgtgctttatattcttgtacatttcaagaactagagttccaaaatccggtttgctagacttgtgctatggtttaaatgtatgttctccctcaaaatgcctatgttggcacttaaaccctaatgtgatagtatcaagagatgggtcctttgcggaagtaattaagtcctgagggctctgccatccttaatgggattaagccccttataaaaggggcttcagagagctgcctggccctttctgctcttccattccttctgtcatgtgaggacacagtaagaaaacaccttagctaatgaacataggaacataaaaccaaacacctcacttataagtgggagataagtgatgtgaactcaggacacaaaaaaagatacaatagaccctgagacctagctaactggggaaggtgggaggagagagaggagcagagaaagcaactattgggcattagacttagtacctgggtgatgaaataatctgcaccacaacctccctgtgacatggatgtacctttataacaaacctgcccatgtgccccgagcctaaattaaaagttaaataaataaaataaaatgccactgggaagcagaaagcagccctcaccagatgccacatctcgtaagacatggagactgttggcacctggatcttggaattccagcctccagaactgtgaaaaaatacattcctgttttttctaaagtacccagtttcaggtatgttgttatagcagcatgaatggactaagacaactcatatgataagctgggctgccaagtcctgcagaaatacctgtgtcctcttcctgcacagtacaggtcagggctttcacgaacaagttttgctgtggctcttctggagttccaggggcccttctgtgagtgggttttggggggctgctttcttccttatttcatggtagtcttgaattagtgataaacagagtttgaccatatgtgtggataacatgtacaggtcttgattgaaactcaagtttgaagagcgtttgctgggtgccaggcataaaaacggggttcctgcttgtattaggcctcaccctcgttatttaattacccactaaaggcctcttaacaaagtcactctggccattaggtttccttttattgttattgttttaagacagagtctcgttctatcacccaggctggagtgcagtggtacgacctcggctcactgcaacttccaccccccgggttcaagcaattctcctgcctcagcctcccaagtagatggaactataggtgcctgccaccatgcccagctaatttttgtatttttattagaggtggggtttcaccatgttggccaggctggtctcaaactcctgacctcaaatgatccacccacttcggcctcccaaagtgctgggattacaggcatgagccactgcacccagcctaccactgtgctcgaccctcattaggtttcaatatatgaatctggggggcatcagaccctagcacagcttctcacatagcccctctcctccccacccagcctctcttcttcctttattacttctgttaagtgcagcctattcattggttgaccttttcagtcctataactcagtggcttagttttttaacaataaatcacaggaaggtggcttaactattgaaaattttattaaaatggttataataatgacttcattactctctgaggcttccagatcttctcttcattccagggaagctggctatgtgaaggcatctgagaattgctattaacctctgctgaattaaaaacaggagcggatgaacaatgttggaagtgggccgagggcttttcagagataatagttgtatgatagcacccccagtttaaatataacacttttgcattataaaaaaggcatattaattcatggtaaattgaaaatttaatttaattttctctagatgagtgaggaaaaaaaaaatgaagactccttactctgcttgattcagttaccatggggatagaacatcttttcgggagaacctctgtgacatggcacatgagccctcaccttctgcttcacatgcctggttttgtcgcccacttgctcttcctgatgaatctgccccagcatccaaatagcacaaacccatgaatattctgtaacccattttcatctttgagcctttgctcctaatctgttacctttgacccctatcctcccagccacccaaattgagcatatcttccaatgcacaactcaagtcccaccgcctctgtgctttctctaactccacagccacacacagcctgtcctctggccttcctcaggtcctaacagttgaggtgggcataaaagaaatgagcagatgaaaataatctgctttgtagccaggcgcagtggctcacgcctgtaatcccagcactttgggaggccgaggtgggcggatcacctgaggtcaggagttcgagactagcctgaccaacatggagaaaccccatctctactaaaaatacaaaattagccgggcgtggtggcgcacgcctgtaatcccagctactcaggaggctgaggcaggagaatcaattgaacccgggaggtggaggttgcagtgagccgagatcacaccattgtactccagcctgggcaacaagagtgaaactctgtctcaaaaataaataaaataaaataaaataaattaaataatctgctttgcaacagacagaactctttcagtaaaatatccagatccggaagctcatttcctgcatattttgtctgcctgatgagcccctcctcatgtacctgcatctctttggtgatcagtcttcaaggcatggggtggaaccaccagtgctcagtctggaactccaatggtgtgattggcaggagcagagatgccacagcctttcaggtcatgggaaggctttttggtggttgttggtgttcttcatgtaggaccctgacaccccttccgtaaatgtaattattgttaaaatgataatccttgagataatggaaagcaacccagtgaggctgtggaacctgcattgaaaattgttgaggtagaacagactgctacaggtgagagagtcttggtttccactcctgtcggcatttggcatttttgcatgtacaaagtctgttccccatcccatgacaaaccccaggtgaatcactggacataaagatggtatggccaaggagaagcaaaacattgcagaccgtctctaccagcagaagctcagcaccagggtgcaactcagatgacagattgtaggtaaacacgtgtgcttactacccattcattcattattcattcatccattaacacgttttgcaaatattctttaagcatccattgagtgctaggcaccagggatttgatgatgggcaaatatagaactaatgatacccagtcagagagagagataagaatcaagtgtaactacataagcaaatgtaaaaatgtaatggggacacactctctgaaacctaggagttggtgggagatgctggtaacagcctctgatagtggggtgtaagccagcaagatcagccaagccccctgaggctctgagatcaaattgaaatccgaaggatgagtagaagatgaagaatggtgaaaagaatgttagaatattctaggcagaaacatgtggccaagtcctgttgggcgggggcagatgagaggaaggaagaggtgggagatgtccctagtcctgcagggcgtggtgtgccacatcttcctagaagcaacgggaacccatggagaggctcttggggtgagggtagagtgaggacaacttcacatttgcacacagggaaaatcctcttctcttcagagtggagaataggcaggaggggagtgagcatggaggtgaatagaacactcagaggccactgtggcccagccggggaaacatgacctgaccattccctgggaagacactgtggcccaggaggacacacacactgtcactgggaggacactgtggcccagacagggacacacagcctgactgttcctaggagaacactgtggcccaggaggagacacacagcctgactatccctgggaggacactgcagcccaggaggggacacacagcctgatcattccctgggaggacactgtggcccaggcagagacacaggcagcctgaaccatgatggtgatggttgagtggagagaaatggacaacgttaagagatactatgatgtaaaatccatgtgtgagccaggagaatagcttcaacttggaggcggacattgcagtgagctgagattgcgccactgcactccagcctgggtgacagagtgagactctgtctcaaaaatataaaaaaatcaaataatacaataaaataaaatccatgtggcaaggtgacccactgattttgggttgttaggaaaagagaggtatcaaggatgactgctaagttctgtgctctggataaaaatgaaactcaactttgaggaaactgtgtactctaaatgtttctgcattggtctcccaggccattccaatcaactgcaaagcttcatctttcataaaacatgaccttaaatgaagacttaactatattctaaagtttgctgtgtacattaaataccatatgtggtgaacatttccaaattccttaactgtgtgacacttcatttgtttttggtttcaaaatggaaatcacaactgtccccaatgtatagagttagattttaaaatttaccaatactaggcaattgcacaaaagatttctagtaatgtccacaggaaattaacatcagcaacacaatttgatgacgtaagagggcttttgcaacatatgatcagttccttcattgttaacattttaaaaacattctgatatcagggctgggcatggtggcttatgcctgtaatcccagcactttgggaggcagaggcgggcagattacttgaggccaggagtttgagaccaacctggccaacatggtgaaccccgtctctactgaaaatacaaaaattagccaggcatggtggcacatacctatgatttcagctacgcaggaggctgaggcaggagaattgcttgaacctgggaggtgaaggttgcagtgagccgagactgtgccactgcactccagcctgggtgacagagtgagactctgtctcaaaataaataaataagtaaataaaaataaataaataaaaacatactgatttcagagtaagcatatcatacacaagaaattacctttatacctcgaatcccttttgatttttagaaaaataagctcagaaaatatgcacttttcttagaatagtctgcaaaaatttaagaagataagagttttctttcagaagacattatacagcctatatattttaaaatagaatatatatctatagaacaggtacatgattttgagcaaatcatgttacctctcttgaccttgccttctttcacaatggatactccaattacgtgttatccaggttcgttttggcttttacgattgtttaattctactttttcaatcccacttcctttacccagtaataatattcattggtgtttttcccttaatcgaagaaaaaaaatgagaaaaaaaaatctcattggtttgggagtctactctgtgacaggctttgagcatgtgtatatatcttattagtaatctcagcacctgtaacacttgtgtagggaatgtttcattttacctattctatcgataaatagcctgatatttaaagaacagagacatttactaacttttctaaagttactggaggcaggatgtaaacatacgaatttctggcttcaaaaccaaaattcttttcctgggtcattagaatcccccatctaccaatacactagtgcccaccctctctctgtggagtcagtaatactttaacttcgtatagcaagcaatgcttcaaagcaacctcacagttttggtcccactaccccttaaaattggaaggcaattcatgttacccacttttgatgaatgagcaactgaagatgatccagcagcagccaccaagtggctgagacacaactagaaccttgtctctctattaaatgcatttcctgatgacacgatgctgaaccttgagactcacaggagattaggcccatggagaagtgggaggaagaggaacaggggaggagaaaccatggccagagttctggggctgaaggaagatgagagggaaggtggagtcctcaccaaatggcatcatgtctgcaaggtgctctttcagaaattccagtaagatccaaaagcatcttgccaatgaaactagaaaccatttgataggttcgatctggacaatttttgtcttatgccagatgtgagttgatgaatgtcaaatgatagtttcagatgtaaacagcagggttcctgaccacagcagaagagcagagaaaggaaggaacccttcagctcacagaatgtgaaaggcatcagtaaataggggagcatcagtgcccatcactgtcaagggattactccaagacacagggattcttcggggggcctttctaatgtcttaacatttaatagaattgaagtgtctttcttcgtacagtattgcaatccatgtagtatgggaactttatcaaactccagaatatgtgacagtggacatgtgatcctattaccaattttttcaggatcgactctacatgggcatcctcagtaggctctgctgtcaaaaatccataattaatgctgttttaacaagtgtcaaggcaaatgtggccatttgtagagaggaataattatttgcttatttttggtggtatgtgatcttcagagtcagagaaagatggggcttacagtcaggtgtcaattgtcagtaacgtgcccttgacttccaggaagttccttatctccttgaatctctcttttacacctagtgaatgggatgacagtttccttcaaccagtttcaaggatccagtcagataatagatggtaaagtgagccctgtgctattggtggcaatgtaaaatggtgcagctgctacagaaaactgtacagagttccgtcaaaaaatcaaaaatagattacaatatgttccaataattccacttctgggtatttctccaagagaagtgaaattatgatgtcaaagagatatctgtactcctaggtttgctgtagcactattcacaatagctgagatgtggagaccacctaaaagtccattgacagatgagtggataaagaaaatgagggacacacacacacacacccctaggaatattaatgggtgttaaaaaaagaaggaaattccgccatatgctacaacaaggatgaacctagaggacattatactaagtgaaataagccaatcacagaaagacagatatgacatgattccacttagatgagagcggaatggtggttgccagggggttgggagaagggaaagtggggagttgctcttcagtgggctgtggttataaagtttgttattgcaaaatgaataaattctaaaaatctgttgtataacattgtgaatatagttaacagtattgaacagtcactgaaaattttaagatagtagatctcatgttatctgtttatatcacaataataatattaataataacaaaagtttcaagcaccatggcagatgtatctaagaggtcttcctcctctcaccctgcccctcactctgctcctctcccctacactgttgacatcctcctggactttactcagcctgcttcacaaggacaggttcagggtgggtaagacttatttggggagattgtcattcaaaactgaaggagtactgagtgccagacactgtcatgatcagagggtggaaacccctgctatttgaatggatcatcaggcaaaatgaggaagtgtcaggaattgccctatgcctgccttttatcctatgattcagagctctcattcactaaagctacaatttatttaacctgctcagaaatttcaggaggaaaatcagtggatgagaaatcaataataatgaataatctcccattcagaaatatcattagagattatttttcattattccactggtaacagcaaatttaaaagatactgttataaactccatagcccaagcttaatagaattaataatcaaatgggatcctgagatcaataattctcaaattgttttttgtactccaggaattcccagtgtgtacttcaaagtgaatctgacacttcattttaaaaacaatttggagtgacttttgtccctatgaatgatgccaaattgatagtttaaaaattgatgggtttaacccaacaatgaagagactgcaactaatcagtccattctttccttctgcaagggtccttggctcatcaaaccatctcgaagtcctcatttaactaattttattacttgatctacaatttatttcaccccagccacaaaatagaccagtacttagggataaaagtagctgacacaaattttgtttcaaataggtcattattttatcttgatatataaatgtcaaagataccgcttgggttcaaatggtgccagaagacagacaaatgggcaggctatcagagagaaatggaaactgggaaagaatctatttctcttcattttagtaagaacctaagatattgtcctaagcttacaattgcagggacagaaggagaatctgaattagcattaaaaatgattttttaataatatatataagggaacttttaaagttcatggaaaagtggacttaaaagataaaattaaaaacattaactttatttctcagtataagctccatcaagttcaaaacactttttaaagcaatgatgtcagtcatttagtccatccctaaagaactgagggtccctggaatttagccatttcaatgtaaccttttttacattattaactgaagaaaaataggtgccctttacagattttgtaagattaggaaacaaaaagaggtcaaatggagccaaatcagtatggtaaggtgaatgcctaatgattttccattaaaactctcacaaaattgcccttgtttgatgagaggagtgagtaggagcattgtcctggtggagaagcactctgtggtgaaggtttcttgggcgttttttttctgctaaagctttggctctctcataataacacattatagttatttggccctccagaaagccaacaagcaaaatgccttgagcatcccaaaaaacttgctcttgattggtccacttttgctctgactggaccacttccacctcttggtagccattgctaaggttgtactttgtgttcaggatggtactggtaaagacatatttcctctcctattgcaattctttgaggaaatgcttcaggatcttgaccctatttgttgaaaatttccattgaaagctctgctcttgtctgcagctaatctgagtgcaagggttttggcacccattgagtggaatgtttattcaactttaatttttccaccagaagttgaagcaattgagatagctatagtgttggcttttgtttttgctgttaattattggtcctcttcacttagagcatgaacaagatgatgtttttcctcacaaattgatgtggatggattaccactgagggcttcatcttcagcatcatcttgtctcctattaaaacaagtttttttatttgtaaactcctgatttttgaggggcatttcttccataaactttttataaagcatcaattattacaccattcttccgtccaagcttcaccataaatttgatgtttgttcttgctgcaattttatcagaattcatgttgctctgatggaggcttttttttcaaactgaggtcttatcttttttaatgcatcaaactagatcctgttcagacatgttataacaaattagtacaagcttatttggtgcaaaatattttgtgaaacccatgcatagttggtttttataatacacattttttcatgaactttttgaagaacttacatataatatttcaatagtggtttatatatattttaaaatgttttagccttataaaaagattagagaaaaaatatttctggtttgggaattgaacatcataaaggaaagttagagtttgcaagatctgaactggccacctgagaagcagctacattatccacatttccttctctgcaccctcctccgcaccctcctccaacccctccctcctatcctctccccatcctcccacacagatatggatctgatggtatgcacgaagcacatggaaaattctgtggaaagacaagaggaataagctatggcccccactcttaataggaagtaggtaaagatttgctctgcaaggaatgataatcaacaaactatttctcagttcttaaaaagaagagataagctagaccttgattagatgcagagaactgtcattagagatgagtttctcttgccttctttccccctgttgctgtgacttcttcatctttaagggactgatgcagcttcatttccacgtgggtcttgtgcctttggattccagctaaaagctcctcccagctgtgaacctgggtcatagcccatgagagccacaagggacttgagtgtcttctggttcaaccacctcattttacagttgaggggctggtgaagggactttcccagtgtccccctgagttagatgtaaagattggggctagcccaaaagctgtctgagcctcagccatctgtcactcattcctggtgcttctctcacctcctcaccaaaagacaaacactgtggtttatccaaaagtggccttgcagattttctgattcatgtctttttgccactcaaaaacattgactgaatgagccctgagtgccggatactgttctaacctatagactactgtgtgaagagtagaattaaagtaaaacaaagacaattataacataaaatcagtccaaactattctacctgtaagtgcataaaatgataatatgcatttttgcatcactgtaaagaaaagtatttcatgtcaccagttccattcagagcactgtaattggcaattacttatttttgacatttgtaagacttcttgaaagatagaatttgaatgctgcatctagtgactgattcttcttgcatattgagctgtttcattattttctactctgctttaaacttgaatcagtatagaaccctcccacattcttgacagggtcctctttactcaagatcttgggatcacaggtttgatctggatcaccctgtctcgtatcttggaaatgatgtctttgacatggatagagatggctagcatgactttgatttgttgtctgtgcctttccttgtggcatgagaggaggctgagaaatactgggctattgtgaatgggaaatgagagttcttacaggcacgctgagcatcccagttttgggcattcagtccaagttttgtgtgaggacatcaggagcctccctaggaatacgagtacttccttcagtgcatcaggcagtatgattagaaccacgatgtaagtgtcaggataacatcgggcatgagagtctgttgctgggtctaatagcataaaacaggaggtggtcacagcaagtataagcactgggaggtgtcggcatggaataataatactggtgcaaggagtgggcttaacatcataactgggaacccagaagccagcaaaatgcaaatcagacaggcaggcagcttctgtctcccttctgtgtctctatgcctgcagtgaagactacctgttgtctctctcctggagcacttgcgagccacagatgagagaggacctttcagtgactgattacagcctaaaggctccaggaaacagccaccactgcgggcttcccccacgtgcttctctgaaaggttgtcagcagtgtattgatgattttcaagtatttgagcatacttgtagcccttgaggtcaaccggcttccttggagatggccattctactctaccagccagggaggaactgtccatggtgctgcttcgcatccagaggctacagggttgccgtgtgataggagccacctgggcagggacttaccctcaaacagcctcgtgtttcatggtgcagcactacagggacaaatgcttacctttgggccagtggagagcaatagcaatcaggacttgggagggaacctaagaggataggacaagctgatagggtgagtggggtgaggtgagatgacaaaggggcaggtactgaacaaaatcaggctatctaacaggcaggcatgctctttaatgggtagggtactatccagtcaagtgtaggccaagaaacagcaatcaagattccttggcccagaaacagggtgtcccagcaaacacaagagcccagaaacagggactctgcaggtaggcacatttggaagctcagggaggcagacttctcctctggagtgatcatctactgatagcaaaatcctagtcaccagggagggctttggtgtcaggacctcaatccctggaaagtagataagtaccatcagaacaagaaactctgtctggattggaatggtgttaagggcatcttgatatgttattcctgcttaagtgactcttaccttccatgaggttggttgtgaatcctagaggctgtgtatggagaaccaatggccctgttagaaagggtggacactgggcagctcatcccacattcagaccctttgcagcaggtctccatgttagcatgttctattttgacaaagccttttgtcctgccaggcatttaatggacttcacacattctacctgcggagctcacatcagggtatctatatctgttcctctagctatatttgtgtttgtatcttgatgctgccaagcatagggaaggcagggagaagccaaaagtcagcagaaaacagctgagataaatgacatacaatgcgggaggaacgcagatggaaatagatggcatgggagtttgaagaagcaaggagccacgaagtgctaaagtctgcaaggaggttctcaagctcatctcactatttatatcacagattacagatttcctgctcgtgtcaaaaataagtcattgccagttgctgtgttttgaagaaagaatcatgcttaaaattatttcacttagaagctcacaaatgaaactgttgactctaaggaataaactgtgtagatagtaagtcttaccagctgtgaattagagtagtttgtgagagtcgaattcagacattttcttttttgagaaaagctggaatagaaagggaagcacttctgccaaggttaacagtaggatgtctttataaattcgatgtagctgtgagggaagggacttctgcaagctttcgtgcatttgctcattcaataataatctgttcatcagtgcagtgacacaaaatatttacagaacacagcatcagtggctaaggagcttataagcaaatgaaatgttaggtgtgttatgtgtgggttaaatggtgcccacccgaaattcatatgttgaagtcctaacccccggtgactgtatttgactaggggtctttaccaaggtaatcaagttaaaatgaggtcattagggtgggtccaatctaatatgactggtgtccttatgaaaagaggaaatttggacacagacacccacagggagaatgccatgtgagatggaggcagagatcatggtgctgttccgacaagccaaggggcaccagagattaccagcaaacccaccaaaaacttggagaagggcataggacagattctcttacacagcctcagaagaaaccaaccctgatgacaccttgatctcagacgtcttgtctccagaaccatgagatgataacttttctgttgtttaagccacctgatctgtaggactttgttacagcagccctagtaaacaaatactttagaaaaagtaaaaagagaagcgaagcaaaacttgcatgcacaacaggtatgatgatgctcatgactacagacagtgagaaaggctgtgggttggattactctggctcagcctcatagaaaaattgaggtgaatgtttaattgagtgtggggttggtctgaagagaaagaatagaaaaggagaatcatatttcatacccttactattcagtcagctatggaaagcatatttggggtggctagaagatgccaagtacagtgctaggtgatgaagcagtgaattaagttaggacaatgtggcccatgtagcctctcaacaggaaggcaggttcagatagaggaaacagcaggaaaaaggtgacaacttgaaaatgagtctcttcctcattcaggtagctttggtgctttgcccactggttgtataagagaatcctgggaaacagcctatgagtagtatttgatatcttgggatgtgggaggtaatcagatttcagtgatgataagacactcccatctctgagctgggtgtttcccagaaaattccaaggacaactggcctttaacatctctctctatggttaacttgctaaacattatccagaaatagccagcaccaacatctccttcaggaccccaacagccaggcattttctccgtagactttgctccaagcctcttatttctgggtttggatcctacctttggacttgaggggcttagatattatcacttaggtggacaaaccatccagttaaacacacacacccacacatacccaacacacacacagacacacacatacacagaatcaacactcaacacgcaaacacccaacacacacatgcacacacactttctgaagatgagttttctcatttatgaaatgagctcatctggacttgccatgagggtccaacaggtgccatgcaatcaggtgtgcactcagtatgggctgggtggagatggccatctcctttcccgtccaggcctggttcctgtgtgctgggcctctgctcttcccacctcacacagcccctgcatggaacagagccggccctgggaggcctgggatccccgtgcctcccttcagcccctcttccaaaatcttgataccggacacacaaaggacacagcagatggccattgtatgatgggttttgttctgttttgttttggtgacagctttattgagatgtagtttttaccatacaatttacccatttaaagcatacaattaaacgttgtttagcctatgcacagaattgtgtaatcatcaccacaatcgattttaggacatttttatcacccccgaaggaaactgtgccccttagcagtcactctgcatcctctgtccccaacccctggcacccaggcatctgtgatcactctgtggatgcacctgttctggtcagctcatccacatggtatcatatcgtgtgtgttttcttcatctgacttcttccctgagcgtcatgttttcaaggctcatccaggtggtagcctgtgacagtgcttcatgcctttctattgtcaaataacgacacagtgttttacaacccctttccacataggttagtatcaccagtgtgcttggatgaattgcagtttgcccagtttgctgttccaaaagctagagaattcctttttttcttttttcctcttactatacaaaccaactctaagtgataattaaaagcgtgagctttgaatttaatcagcactttgttcctttctattgtcaaataactacacagtgttttaaagcccctttccacataggttagtatcaccagtgtgcttggatggattgcgatttgcccagtttgctgttccaaaagctagaatccctgtttttctttttttccccttactgcacaaaccaactcgaagtgataattaaaagtgtgagctttgaatttaatctgcctagattcaaaatttgccatgccatttcttaggtgtattacctgggcaactactaacaccttgttacctcagttttcttatctttattttatttatttatttattttgagacaaagtctcaccctgttgcccaggctggagtgcggtggtgcaatcttggctcactacagcctctgtctcccgggtttaagagattctcttgcctcagtctcccagctatctgggattatgtgcgtgcgccactactcccggctaatttttgtatttgtaataaagatggggtttcaccatgttggccaggctggtctggaattcctgacgtcaggtgatctgcctgccttggcctcccaaagtgctgggattacagatgtgagccactgtgtccagccagttttattatctttaaaatgagattaataataataccaaacctaataggaatgttgttaaatttaataatttggtaagccattaaatcacatgaaactatacctggtacattttaaacacccttaaaagctaaatattatatatcatattctgctttttaatataaataggtcacacaatatatcagcatgcctatagaggcatttcatccttaatgttacttaacacttcaatttattacgaacctaaatggccagaaagctcaggtaaacaatttcccctataattttacgcaacaaaaattgggatttataccaatgatctcaaagtagtttaaattcttaggataatttcttagcccctgatgaaagattctcttcattcttttgaatgatcagtgtaattgtacttctagggaagatatagccgtttatttctcactaaaccatgacctgtgcatgggtgaggcagcccacagtgagcctgaatgtttggccaatccattccttatgtggactcatggaaagcctcagcctataatcagatttaaagaaatctgtagccatatgtgtttccctgacgtcggtattgctgggccatattaaattgctttacatccctaataactttgctttctattgttctctattctgctgcacttacacaaaagctccatggcagagaaattggaaagaccagtaaaaaaataaggaaacaggatattgtgtgtcctggagggtttccccggtgctccccagcctccattgcacaacctccctccacacagccccgccccatcacaatttccaacccctttactcaccccctgtgtctcatccactttcctctctgtcaaaacccacacttagacattctcagagtccttcccattgaggtccaaacaactagtgatggtttaaaatcttacgactgggcgtgagggaaggcccataccttgagataaagctaatttgaagctgatggcaggatttccaacagcagccagaggaggggcagagtttaggggcagtgttttgtcctatagtccttaaacctgccttggatgtggctggttctgacatcttgaataatcccttagtatcttgtttacaggtgatgacacaaacaagttatctggaaataaaatgaagggggaatgaaccaaaccactttaaggtagctacttttaacagttttagggggtcagttcaaaagtctttataactaaattctgaaatacagagtgccctgttttcaccttcaggggtctgacacccagtgttaggtttacagtgtgctgtgggccattcatctgggccccaatgagcttagaaaacaactaagtgaacagcagatcctcagccaggtgcctggccccctgttgacctcacctggggtctcattcactgtcccaccttccctggaccaggcttccccctccactgtccacttaccaaagagtcacaccatttcatctagaaaccctcatctccttcttctttttttctcttttccttctcctccttccagctcctaaaatagaaattaatgtagtcctggcccagcagatgcttcagggatctgcattctgttcctaaatgctcagatactcactaaagacaaatagaagtgttgggtccacagtggatgatccctcagtacatcttgaaataataccttgttaaagaaagaaggtcatatccctgctgaggggagccctgggagcgtgtaagtccatctctgggcagggaagctgaccagagatgcagctgttgacatgcagagagaatgagatgtctgaggacaccctctgccagctcgtgtctgagagaggatcccagggacgtgctggtactgagtttcccctctaagcagaagggaacacttcagattccaggaggacatcgaagatgtctaacggatccttttcctcaccaaagagatgtgttatttggtatttttaataacaccatctgccagtgagaggaaagctccgaattgcaatattgatcttgtcactttggggaacagtttgatatttgggattataaataacattttcatttgctctgttatcatgctcaggcagtgtttgatggctgagcccaagaatattattttcttatcaaatataaagatacgtacttttcctgaggtctgaactctgggttgtgaaataatattgacacatattaaagagtaagatgtattctgaaaccttaacaattcagaaggggtgtaaaatttttctccttaaaaatgaaatcgaggacaatatgaggtgataatagcaataactggctagcgtggattaagaggttaagtcagagtcggattagactgtctgatttaagtaacacgatagcctaacaaggaagcacagcagcactattgttcccatgattcagaccagcaaaccaagatagccactgccacggggctaggaagtagcagagctgggatttgaactcaagcacactggttccagagtccacgctgtgaatcattatactctgtctttatttgcacctacatgggaatggattctcttattattatgctatagataccttcaatatttctttctacatttaaaactattctctcttgatcctcatgaaaattatttgagatacacaggacaaatactactatcccagttttacaagttaaaaacccaaggcccagagacattaaacgattttcctcaatgccatattggaagttaacaacagatcgggcttcaaatataaatcacctcactcaaatacatgtatctctttgatttgagcaacacaaaattattaccattattgtcattattgaaagaaacagttgatccatttgaaagataagctacactgtttgtgcttctgggtggctgggatggtaaaggaaatgcatgtggaggcgtagccagcattttgctagcaagctccacaagaatgttttacctaagttcttaggggaaggggaaaatggtcagggccaattctttcatggtaccgagcttcagacactttctgtccaccatttgtactccctctgatttcccgtatggaattgaggtcttgcattttcaagaaaaatggcaaaacaactccaaaaacatgtctttctagtgtcgtagctcttagtagcttccttatacagttgacccttgaacaacacgggtttgaacggagcagttccacttatatgtggattttcttctgcctctgccacccctgaaacagcaagaccagcccttcctcttcctcctcctcatcctactcaacatgaagatgaggaggataaagatctttatggtgacccacttccacttaatgaataatattttctcttccttaggattttttaataacatttctttcctctagcagtcactttattgtaagatcactttattgtaagatcacagtatacatacacagaaaatgtgtgttcatcgactgtttatatcattggtaaggcttcctgtcagcagtaggctattactagttatgttgtggtgaatcaaaagttacacaagggctgggctgggctcaatggctcatgcctgtaatcccaacagtttgggaggccaaggcaggtggatcacttgaagtcaggagtttgagaccagcctggccaacatggtaaaatcctgtctctactaaaactacaaaaaaaaaaaaaaaagaaaaagaaaagccaggcatggtgtttcacacctgtaatcctagctactgaggtggctgaggcaggagaatcacttgaacccaggaggcggaggttgcagtaagccaagatcgtgccactgcactccagcctgggagacagagtaagatgctgtctttaaaaaaaaaaaaaaaaaaaaaaaaaaaaaaaaaaaaaaaaaaaaaagtgatacaaggattttcagctgctcggaggttcaaggttcaataccttaaacttttgcattgttcaagaactaattgtctatgaattttgtaaaattgttcagagttgtaattattatctttgttgtaggttttaaggaaaaggatcaactcttcgttattttcatctctgtatttagctaagtttatgtccaatggggtaattctaaccatattttaagatactgccagcgtagattgtctctgttaccaccggatgcctctggagaatgctgcatgcatcaaaatcaagcagtaaggatgaaaaaatctgctctttcctgaactgaccagccttccctgactgtgcacactgattttatctcaatacagtccacaggcttttgtctttctatgagcttttccttctataataagaataggaatagaaaatgaccactaagttctccatcttccatcccatgcctcagccaaggcaagaaagagtgaaataactgctaagctattataaataactatctcctgtaaaatcatgaacatagagtgtatgtcagagatgttggaatcctgcatccttaatgtttaatggtgtttcctacaaatgttccctgagtattcccagtttggtgatatagtccaagctgcagagggaaaggatgtaacctgatattcatattcagttttccacctgatttctttggggattcacctcatttcctcaagtcctgctaatgtgtacggtggtaattccagcattctctcctcggaatatcaacaatgacagtttcttaattgctctcagtggattttatgtaggatagacagtgaggtttgaccacttgattcatttgaaatgagcaatacttccaccttgacatgatatcatatacttggtattttcatgatttattggtggcctggaccaatatactttgggtcaaaaggtgtgatttaaggaattcaacctaagaatagtaggccagctcattctcagtcattatgtgatttgttggaatattgtgaagttccgttgataaataaattgatgaaaaccttttttcttaccatgtaaccacatactgctttgcaccaatgattgggcacaaatataaacatattgctgcacagtaggtaattcaatatcaatatgtgtgtgtgtgtgtgtgtgtgtgtgtgtgtgtgtatatatatatagagagagagagagacacttttatccatttaggaagacaaacatattcataactatgttttccattaaagtatgttttccattaaaatgtactaaataggagagtaccttcctgtgtttccctgttttatccaaattctcagtgtttttaaagatcccattctggcaggtcatggtgactcacacctggcgtggaggtgagcacctgtagtcctggctatttgggaggcggaggcaggagaatcgcttgaacccaggagaaggaggttgcagtgagttgtggtcactccactgcactgcagcctgagtaacaaagtgagaccctgtctcaaaacaaaacaaaaaaaagatccaattccatccccatctactccaaaatgcctccctatttattcttatattgattaatgtattcttcctcaaaattatattactttctgactcaatatcatacaaaccggcacttatcacatcttgaaatttcccgaagctaacacgtgtctaacctgtttcccatattatgttttaagtttaaaaagattgtctgccgaccgaaaaagtttatgtcaaaactacagaaaagagccatttcttccatttctctaaaacatagccctgtgtcatctctgcttttccacccacccctaccccaacactcatcctacttaccttcctctggcattcacagagggctgagtttctagtagatgttaatcaaattctttgcatgtgattgctcagtctcttttaacttgaaaaggggaaggcagtgtaatagaacacaggaaggagctgttcataggttcagaagtcactcttggattttcaatatttgtgtttcattccttagaaagtgctgtcagttccctctttgaggagctctctgaaacaacaaagggacctgtcatttgtgcatacccccgactggcacctttgaaatgttatccagtcttgctacctaccatttctgatttgtctgacgttgacatgtacacaccctggagcaggtctgttgacttcactcaggcttatggaatattgcatacatccaccgtactccataaataactaatagtgtgaagcagagatcagatcaactgacagactttgtagaatgtaatctctggtaacactgactttaagaggcaatgagtgtgtgtgtgtgtgtgtatgtgtgtgagtatatatatattcccataggctagcaaatgaaaactgacagtgaacttttcctctagctctgatagagtgactggcattgggcatttcctcctggcataaacaactctaaagctggtaaaatgtgcatgacaaatgttttaaggcattaaacaacaggcagcacagaactgtaattcttgagagaaaggaaacatgagaggtgaggctcagtttgccccagtgctctgcctgggaccgtttcctgcacatctccagcagaactgtggcctcactgacctgaggaggagattggagctgtggtctcagaagcagctgagatttggggagccaagtgcaagagcagaagctgaggacaagggtttccagaagtcttgatgaagactcattgctggtttttggctgaaggctgcccacaccatggcaggcagtacacagggcctagcagtggttgccttctgcagggctgggaatgaatgaaggcattattgctatgcaccaccaggagatgctggagctccagctcagccagaatggagagaactcattgagcatctcagtcaggcattcagttgaaacctcagaaagtccacaccatagcagtaaaagctataccctcaaataagggccacaccttagcccataactagaataagttcatgtccatgaaaggaaagacatgaagcctggtatgaccaaaaagatcagttggtaatttccctgctgccaaaacaaaactcagagcacttctaatttaaaaagagattatctagaatcatgaaaacattttgtctatagtatccagaataaaatttttttaaaaaattgctagagtttcaaagaaacatgaatataagacccatgatcaaggaaaacaacagtcaatagaaacaagccctgagattaaatgcctttgatgttgaaattttcagacaaggattttaaggcagttataaatatagccaaggaattaaaggaaaacatggtcataatgagtaaacagagggaaagttgcagtagagaaattataactgtaaaaaataaaattttagaactgaaaatatgtagtagatgggtataataatagttaagaatggcagaagaggccggggcacagtggctcgtgcctgtaatcccagcactttgggaggccaaggtgggcagatcacgaggtcaggagattgagaccatcctggctaacacactgaaaccccgtctctactaaaagtacaaaaaattagccgggcatggtggcgggtgcctgtagtcccagctactcaggaggctgaggcaggagaatgatgtgaacccaggaggccagagcttgcagtgagccgagatcacgccactgcactccagcctgggcgacagtgcaagactccatctcaaaaaaaaaagaaaagagtggcagaagaaatgctagccaaactgcaggcagatcaagagaattatttgacctgaaaagcagagattaaaaaaaaaatcaaacaaaccgtatctcagtgaactagcaggacagcatccatgtggtcaaaatacatgtaagttgcgtctcaacaggacagaggagagaaaaaaattgtaaaataataaaacttttctaatatttagtgaaaaaaattaaaatgcttattttaaaatttcaagaaaccccactggtataaaaacaaagagaaccactcctatgccccaagataaccaaattactgaaaatctaacccaaagagaaaactgtcaaagcagttagagagaaaagacacgttatatacaaggaaacagttctaattaatagtggatttcttgtaagaagatgcagaataatattttagagtgccaaaagaagaaaaaaatacaaatctattgaccctaaattttatataaagcaaaaatatcctctactgtgggtaaaataaagacattttcagataagtgaaaaacaataaaattaagagtcagcagacctatactgcaagacatattcaaaagaagctttcagaggaaagaaaatgaaaccagaaaatgataattacagtatgacatgaaggataccaaaaatagtaaatatgctaataattagaaaatctatgtgtgtttgtttcttaattttcttgaagacacctgactgtaaaatgtatgacaataacaacatagaggatacaagtaactggaattaaactgttataaatgttttaagtttatgtaaattgatataatattgactgtatataaactatgagtaggtaaggatgcacattgtaatccctagagtaacaaattaaaaaataatgcaaagaggtatatctaaaaacctaataagggaattgaaaatggaaggataaaattctttgattatccccagagaaattagaacaagaggaatagagaaatagagattaaataggatacacagaaatatatgagtataggaaacttaaaactaaacttttcaataatttcactagatgcaaattaattaaacatccccagtgaataatcagttttagatttaaaaattgaagacataactgtatatctaaagggactttttttttttttttttgagttagggtcttgctctatcacccaggctggagtacaatggcacaatcttggctcaccacaacctctgcctcccaggttcaagtgattctcctgcctcagcctcccgagtagctgggcttacaggcatgcaccaccatgcccagctaatttttgtatttttttggtagagatggggtttcaacatgttggccaggctggtcttgaactcctgacctcaagtgatcctcccgcctcggcctcccaaattgctgagattacaggtgtgagccactgcaccaggcctacaagggactcactttaaatacagagacacagataggttgaaaaggaaagaatagtaaaagataaaccataaaacagtaagcataaaaaagctatggctggccaggcatggtggctcaggtctgcaatcccagcacttttggaggccgaggtgggtggatcacctgaggtcaggagtttgagacaagcctggccaacatggtgaaaccctgtctctactaaaaatacaaaaattagccaggcatggtggcgggtggcctataatcccagctacttgggaggctgaggcaggagaattgtttgaacctgggaggtggaggttgcagtgagctgagattgtgccactgcactccaggcctgggcaacaagagtaagactgtctcaaaaaaaaaaaaaaaaagctatggctatgttaatatcagaaaatgtagacttcgagataaggaatgctgttagaggaaaagagagatatctgataataataaaatggttaacttattagaaagatataaacatctatgtatatagtagctgagctttgaaatacctgaagtaaaaaactgacagaactcaataaattcgcagatatttggatattctaacattctcactcagtaactgttagaacaattaggcataatttcagtaagtatatagaataaagaacatagtcattgtgacttaattgacatttacagattactccaataattgcagaatatatatttttaaagtgcaagtagaactcacattatgttgacacataatataacaagtattaaatcttaaagattatgtcctttaaccacaagaaaattaaattagaaatccaaaacaataagatatttagaaaaagcataacatgtttagaaaataagcagtactctcctaactcatgggtcaaagaaagtacaggggtaagttaatacatattttaagctaaactgtaataaaagaacaatatgtcaaggctttctggatacagctaaagtagtgcttgttgagaaattaaagctttcattgtttaaatagggaaaaaaaggataaaatcaattatttaaattttttcttcaagaagttggaaaaagaaatacaaaacctctagaaagtagagaagaaaatgtgaaagaaaaaataaaatagaaaactgacaaataatggtgacaacttacataaatgaagagattcgatattatcaagatatcagttctccagcaattgatttatgggattaatacaaggtcaacgaaaattccaacaaggtggtagaaattgacaagcagattctaaaatttgcataggaattaagtgatcctagaatagctgaaacagtcttgaaaaaaagaacaaatttcaataacttccacaacctattttcaagatttactatgaagttacagcaataaagtgtggcattagcataagaaaagacaaataatcaacggaactcatttctgaagagtccagaattagacatacacatatacaaccattgatttttgataaagtaggaaggcctagatgaaattatggggaaaaatgaactttaacctctacctcacaataattaattttagatggatcatatatctaaatataaaagctaaaactaggaagcatgtggaagaaaataatggaaaatgttacaacttttgtgctggtaaagacttctcaagtagaaccgaaaaagttcctaccataaaaaaattgatcaattggactttatcaagataaaaatttctgctcatcaaaagacattgctaaaatgaatcatcaagggccaggtgcagtggctcacgcctgtaatcccagcattttggggggccgaggtcagcggatcatttgaggtcaggagtttgagaccagcctggccaacatggtgataccccatctctactaaaaatacaaagatgagccaggagtggtggtgtgtgcctgtagtttcagctacatgggaggctgaggcaggagaatcccttaaacctgggaggtggaggttgcagtgagccaagattgcagtactgcactccagcctgggcgacagagtgagactcagtctcaaaaaagaaaaagaatcgtcaagtaacatattagaaaaattatattcaattccatttgtgtgacaaaggacttgtatctacaatatataaatattcctacaaatcaataatttataatggacaaaagacttgaacaggcactttaccaaagaagatatctaaatggtcaataagcacatgaaatggtgcctaaaattattactcaccaggaaatgccagctaaaaccatactgagggaacattttaaaacccactggaatggttataatcaaaaaggttgacagcaccaaatattggcagggatgtaaaacaacacaaacgctcatacattcttggtgggagagagctctacaacaagtacaactacttggataattgtttgaaagtttcttctaaagcccagtatatagtgcccgactgcagtctactgcactcttaggtatttacccaacagcaatgaaaacatgtccatgaaaagacttgtacaggaaagtttatagcagccctactcataataccttcaaactagaaagaagccaggtatctttcaaccagataataaataattgtgatctattcatacagtgaactgttattgtgttagtcggtttgggctgctatataacaaagtgccatagactgggtggcttataaacaaaagaaatgtatttctcaccatttcgtaggctggaagttcgagaccagggtgtcagcatggttgggttctgatgagggccctctaccaggttgtaggctgccttctcacggtgttctcacatggcagaaagagggcaagagagctctctggggcccctttgtaagtgcactcatcccattcacaaaggctccccctccttgatctaacagctttcaaagaccccacctccaaataccatcacaatgggggttaggactttaacctaggaattttgatggggcacaaactttcagaccattaaagtgaacaagaaagaaggctgcgcttctaatacatgtcacagcagggatgagtcttagacgtgaatttcacacctggcatgaaggaagccaggcaaaaaggacgtgctctgtaattcagtatgtaagaagccccagagcagggagagaagtcagaacagtgattattatgggagggtgggggtggaattgacttgtcaggggaaatcacatacattgggaaatgagaaaatgtcttctgtcttaattggaatatatacatttgagggtatgcaccaaatgatcatgtatgtttgtcaaaagtcattgaattaggctgggcgccgtggctcacacctgtaatcccagcactttgggaggccgaggcaggtggatcacttgacatcaggagtctgagagcaatctggccaagatggggaaatcccatctctactaaaaatacaaaagctagccggatgtggtggtgtgcacctgtaattccagctactcaggaggctgcagcaggagaatcgtttgaacccaggagacggaggttgcagtgagccgagattgcgccactgcactccagcctcagcaacagagggagactccgtctcaggaaaaaaaaaaaagaaaaggcattgaactgtacatttaaaatctgtgcatttcaatgtatataaattttacttcaaggaaagaaaaaggggacatgtcttggcatgtgcctcctttcttaagcctattaattataaaactgggttacccagatcctagaatatggctatgaatagggtagctgtaagagccatagataagaatctggggacttacgggtgttgaaaactcacggtggggctgacaatgattataatctgcttttttgttaccatttcagattatgacaaagcactggtgttcatcaggaaactaatgggagtaaagggtaaatagcttagtcaaaaatgcagctctctctttcaacatattagcaggaggccattttctggttttgtgcgtcaagcacaaagacaagcatcctatttgtttttagaaatcacatctaactttctttaggaaaggaactttaattttatagcgaatgaaaaatatcaattaacctattaattaacccggagaaactattagcctgggagataataaaattgcttttgaaaagattacctgacaactgcacaaataattactcttgcaaacatccggtgttctgcctttctctctaagatacttgagagagtttaaatatcaaagaatcctgattatttcatgagtattttcttcagctgttataaaaatcatgcttcagtgtttcagggattttgttttgtgcttgtcttggcagtggggaggaggggagcttttgtgtgattccaggtaaaagtatgctactcacagccttttgtaggtcatggcttcttgagaatgtgtacaatgccacggagcctgtccccagatgcatttccatgtgactatacacatatgcacacaatcttgcatatgatttcagaagcttggtgggctgctagaattttgtctcagatcctctagagtctagatgatggaggctggatgtaagggaggagaccacccttcatactgtcttatgcccaatttctgcctccaaagaaagaagaagtaaaaactaaaaggcagaaatgaaatccacaggcagacagcctggtaccacacccggggcctggtagttaaaaatcaacccctgacctaatcggttatgttatctatagattacagacattgtgaaaatgcactgtgaaaatccctgtcctgttctgttccgttctaattaccggtgcatgcagcccccagtcacataccccctgcttgctcaattgatcacgaccctctcaagcggactcccttagagttgtgagcccttaaaagggacaggaattgctcactcgggagcttggtttttgagacgtgagtcttgctgatgctcccagccgaataaagcccttccttcttcaactcggtgtctgaggggttttgtctgtggctcgtcctgctacagatgggcagccttggttctcatttttcatgccatctcctctaatggaaacaggaatgatctccccatgtcaacacctgcagtgtgggcctgcatttgggagggcgtgtgggtgcgtgcgctggggctggctactggtgtgcattgcccagagagtttatctcagaagtctttgacaaaggcacggttggcttcattttctgtctgtgaattcaagtaggagacaaatggatttccttactttttctgatcctgtgtaggaactgtagaaaaatgggtgtttctccctagttagaaagaaatgcttttcccaaagatgaattcagacagctttatttaatggaaaaaaatgtcttgcctgtttctaaatgcattcttccctggtggcttatacctggcaaagagaaaaattagtctcttgactgaatgaagtccccgtcaagacgaaggaaaagagagaagtgagaaaagaggctagaagagccaggattgaaggcatcgtgctgggggtggggtgcgtgctgagggtaatcgttgcctggaggcacataggctagtccatcagatccaaaattccaaagcttggctgtgtaaagaacaacatctaggagtattgagaagcaatgtgggcagtgctgagattcaaaaggggcgtccctagtcccaaagacgagccccacccaagtgaatggacttcccgaaattatggtacctgtctgagcctcagtttctccatttgtggatgggaataatcacacaaagtattttgcagagcaaatgagaaaatgtttataagagtctggctgactgcgggaatgctgttatttttgagtttctcttcccttaacgatcaagaataattagagacttatagcagcctgggagaaagttatcaaagaaaggtgtactgtatctgcccaaattaacattaggatgtttcacgggagctacttatttcagaggaagagctacagatggtttggaagatgatgagctttggtgaatgctatgctctgagaatgatggaaaaacagatatgggagaaactagcaaagccgtgaagccattaaggaactgaccacctaaaagacagagtcaacaaggctgtgcaggtctcctagggagataagatggcatattagtcagggttctctagagggacagaactaataggatatatgcatatataaaagggagttaattaaggagaactgactcacaccatcacaagataaagtcccacggtgggccatctgcaagttgaggagcaaggaagccagtagtggctcagttcgagtcccaaaacctcaaaagtagggaaaccgacagtgcagccttcagtctgtggccgaaggcccaagagccactggtgtaagtctaagagttcaaaagccaaagaacttggagtctgatgtttgaggacaggaagcatccagcatgggagaaagatgaaggccggaagtctcagcaagtcggcttctcccaccttctcctgcctgccttactgccatgctggcagttgattacatccaatggtgcccacccacattgagggtgggtctacctctcccagtccactgactcaaatgttaatctcctttggcagcaccctcacagacacaccagaaacaatactttgcatccttcattccagtcaagctgacagttaatattaatcatttacagatggaaatagtgtggttcaaataagaacaagagcaccttgtgaaataacatatgtagaagccaaggcttgcaatgtacagtctagcagtggcctttcatggtagagagactcattcttgcataaaaatgaagatattcaattaacacatcctattggttgtattctataacagggtgagcacatttatttacttcagctaaattgaaaatcatggcctcacaatgtcacgtgtgtgtgtgtgtgtgtgtgtgcgcgcatgcgcacggtggtggtggttgtgatgaaatggaggaagaatatttgagataaagctaatctttgataaaattcctcctgttcagtggtgaaccaggattggagacagagaccaggggagctgccttcccaggcaaggagggcatttggtcactcaccttgtttagaactgctggctatgatacgaacacaaagcagactgacccttagtcagatctattattgttttaaattctctatagataatgtactgtcttatttctcacccctgggcagactgatcccaccaccaaccctgttctacctccaccccacactgcctctgggaatagcatatgaacaaatgtcattgttaattcctgatcagttgtggctgtgttatcaaagcaggagaatcattaggatgtatggattatggcagcttaaaaaaacaaaaactacatgagagacttagatttatgcttgcagaatgtccaaatgagttggaaaagtaagactaacaaatctagaataaaagtgaattgtctttgccaatttcactgccccatgggcagagtcaacagcaactactgtcaaaattgttcttgagatccatctgtccctagacataactataaaaaccttaactcatgggaagagtctacgtggcagctcctttgaaagctttccttgctgtttaagagaagtctagtctgccagaataaaaataaaaatttaaaaatctctactaagacaaattagaagataatgcaaggaatattgggtaaacatggaaagaagggctgcctgtaataagcagtaaaataatcttaaacattctgtgcagagtaaacgcatgtatatacaattaattccaaggccaaagggagtgagtgacatagagcgatcacatcattgtctgaggaaccattctctgccaagaaaaaaggcaacagtctcatattcttctctagattagttgactgtgaaaagaaaagagggcaacaagtcagcttcccttagagaggttgttggtgagtgggacatgtgttaatgagacacttcacaccttccctggtaggtacctggagcaggctgaaataagcaaaagtgaatgcaggtgatacaggtgtggggggtgaggggacagtcttccctacctgcaggggaaagcctgtcaagaaagcccttgcagcaagaaggtactcaaattaaataatgcttgatacatactacctacacactaaccttatggattagtatttttaaaagtctcacctttgcatcctgtttgtgagttagaaatgacttgactagacgtgatttcacatatcacgatttttaaaaatatttgcaattttctaagaatatgtatatgactaaacttatatggtataaaccatactggtaaacatgatgatgatgatgaagataatgatgattgatgatgacaatgatgataatgataatgtgctctctagaaaaaggaacaatattccagatattttaacatactgctactgaattagtccattctcacactgtgataactacctgagactggataatttatgaagaaaagaggtttaattgagtcacagatccacaggcttaacaggaagcatggccagggggccttaggaaacacaattatggtgggaggtaaaggggaagcaactgtgtcttcacatggtggcaggtgagagggagagcgagagagagcaagcgcaaagcaggaggtgctgcaaactttaaagcaaccaggtctcatgaaaactcactatcacaagaacggcaagaaggaagtctgtcttgatgattcagtcacctcccgccgggcccctcttctaacgcatagggattacaatttgatgaaatttgggtggggacacacagccaaactgtatcaaccacatttatttatcacagcagctattattatccctgttctatatagatgaagaaatgggggtttaacaaattgcccaagatgatagagctttgcccaatctatccatgtaccatcaaggccatagctttgcccttattttgcttgaagttgaaaatttcttttatattgttgtttgattttgttgtattacaaagccaaatctaaagaatttcactgtaataatatgcatagtaggtgtaattagaggtaggcttactttgtttatttatagatttagtttgcaatttaaaatccatgaagtgatagcatgtgtcatagcccatcatgaatttcgaatgaaaacactgtggctgtactgagcttctgagaaaaatccaagcgggtaagcaggagttctgagatggagatgcacaatcttaattacattagctgcctccttgggctattttgtgtatgtagtggggtgggcagtgggcttggttcttaatgtaatgagtgatttcaccaaggagggagacagggcttgacttgatgtgtatgggtagtaagtggattactagaagacttaagaacagggaggttagaggaaattgtcacattttcactgggttaggaattttaaaacaaaaatacgagcttcaatgagagaaggaacatacatggcctattttaatgatcatgagagcaagagactgtctgaagtaaggttcaattgcaagattcaaaggtaggacaatgagcatgttgaaagctaaggagaggaataagtgtaggaggaatacattattagggaaaaggaaacgcaaattgtatttcctttgcaatttgcaaaggaaaatttgcaaattttccttttgcaaaactaaagagaattgcaaaacgaaagaaaaggagagtgatgaagagaaccacatgggcaaaaaaataaagatgtagacaattctggatgatgttaacaaatgaataaaggcatgtgccagcagtttgcttagggcagctagtctattcagacagagagttacagggtccgtccgaggggtggaggcacaggcggctgtggtggaggggtgctggggctgaggtccagtgagctgcctgcctctgtgtcaagaaagaagaactgaaggtcacattctggaaacagaaatccactttcctaggggcagtgtgaaatgttaaaaggttttatgttatgccagagaggatagttagacaattagagttatctgaaggttgacaaggcagcaggcttagatgaattacactccagcagtgtggagaggaagcgccagtgaaatgtgaaatttggagaggctgagccactcccagcactgggggaaaggaggtggctctttgaattctgcggtgcgggaatggcagagcacacctggaagccaggagggagcaggtgttacccttgaaccaggcagacgtgggggaggcccaggcgtctcatctctcccctcctcctgccctgtgggaagagcatagtccccctctgcctttttctttccttttgtcttcagtccgccctccctgactagtacatggtcggtcaatcctgtcatagaacagaaactagatgtttccagaatttttatgccacagcgcttgaatgttctattgtttcacaatgctttgacacttagaagacaatactacatagtagacacttaaaataataggaaaaattgtctgtcaaataaatgacttagaagacctggttactatgtccaataaatacttggtgttttattttactcacccctcttaacttctccttgtttcaacacctataaaataagaagagtaatatctgcgctctttaccagttttcctgaagaccacatgagataaatatgtgaaaacacactatgaaaagcacaaaatgctttataacctatagcattatttttgtaagaatgaagcaaaactgtaattgtgtctgaaatctaagaatggatagagggaagatatattccactgtagactcgaacatgatttgattaaagtctgactataagaggagaaaccacttcctgatgaattatgagacccaatttaaggaataaattattggattggcttttaaaaaagtccagtagtggccgtaatttatcttgattagtggaaaggtttcataaactacagtgtgcaaaatattgatccatttagtaagtacaccatgcaggggcccctgcagaaggcaggcacctccagctctgcagagggcagcacagtggcccactgccttttatcacagctgtggaaccaaatggaaactggacgccgtcacggaaaacgatcagtctgcatgacgggcgcatggaaaggaagcctgacatttgaaaacacgtttcttccaaatatctttaaagatttctgaaccagagctcacccacctatctgtagcctccaaattatgaacagaatcatgacagaatttgggtttgtttcccagtggctctgccttcttttgttcttaaatattttttccaaactctcagatcataaccaaataacaaaggaagcagctgtgatgctcctacactgtggtaagtcccctttgagaatcgtcattgtggaaaggagagaaacttagattcttgattctcagtaggtcgttcttgatgaacacttgctaaccccaaggcattcatttactggagcaaggttttgtgcatttcagatgtcagcctgagattctggtaagatgttaggaagtgctccagctgggaattgccaccatagttccttctcagcctcactttagagaggtcaagtgcatctagaaaatgccaggctttagagtgacagcatgaaatacccccttgggttcttttttctttttctttttcttcttcttctttttttttttttttggagacagtgtgtcactctgttgcctgggttggaaagcagtggtgtgatcatagctcactgcagcctcaatctcctggactcaaacgatcctcccacctcagcctcctgagtagcatgtgccactatgcccagttaatttttaaaaacatttttttgtagagatgagttcttgctatgttgcccaggctggtctcgtgctcctgcccaaaagggatcttcctgcttgggttctttagcagaattccagaggctattcctacctgttgtaatgaaacttctcgatttgctctcctctccaaccacaccctccccatcagcatcttctcatctgccctctggggatgtggattcccttcggcctatgaaggcaggtctcccatttaggatattcaaaagcggtctggtgcgggtggctcatacctgtaatcccagcactttgggaggctgaggcaggtggatcacctgaggtcaggagttcaagaccagcctggctaacatggcaaaactccatctctactaaaaaatacaaaaaaattagtggttgtggtggcatgtacctgtaatcccagctacttggtaggctgaggcagaagaattttctgaacctgggaggcagagattgcagtgagccaagatggcgccactgcactccagcctgggcaacaagagtgaaaactccatttcaaaaataaacaaataaataaataataaacagaatatgcaaattcaactccaaacccaaatgaggaaggccatcaaataagatagaaggtaatggttcccactatttgagtaagacagccacatggggacaaatggcttgtgcaatttagtggagtaaatggcacggccacatgaccttgtttggcttctgttggttagcagagatccttggcatcagccagatccatttgttttcttgaatcttagcttttcctctcctttgtccccaaatatcaaagggcaaaccacttgacatcatttctagctgtcatttcccaatgcagtagttttaaagcctgaaaagccaaaggcaccactagaaattacatatattgtggggcaacacgtggaacttaaagaaagtgagcatgaggaggagaggagagatgaggcgaggcgaggggaggggaggcgaggggaggggaggggaggagaggatgaattgctgccaggtgctgccccacttttcatacctatccaagtgactcttccagattctaagtacattcagattgtgttttagtgaaatgcagtaaaacaaacagatgttaaattgctttcatacatatcttgttttatccccataacaattcagtttctggctttatcatacctgtttgagagatgaaaaaacaagactcagtgagatttatgctccccaccaaaaatcacagcaaattcaccacagaacctgaacagtaactgagatcccgtggaaggagagcagaccagggaggctgacgttgttataggagtgtgtgcattttacctattagttcaaggggttttgttggtgttttatcatgctccacaaccaatagcaaaagcaacaaataaatggtataggacagtgcaaaggaataggatcatacccaagtgcgttttaacaaaataagtaaacaatcagtaaaatgtatctgggagtgctggctccctcagggcccctggaacaggggtgcatagttaagaaatatacagagttctgctctaagaaaacgtgtattccttaaaaaccaccacattatacaaaatcacaccaataaaaacacaacagtaatgagagaaatggggttatggacacaacatttaaatatgttgtcagtgaaaaataaaaggaacatagtaaaaatcggtagcatagtttcacacaagttatatggttaagaaatacattgaaactacaagatatatggcacttcaccttgaaaaaagccccagagttcactcggaggagtaagagctgaaaaggctatagttgtgagtgtttgggaagaggtagaagcaaaggtgttgaaatcggacggaagtaacaccagacatggatgcgtgtggcctgtcacacgcggagaacccaggcagtggcagcttgatggtgtgcagccatgtgttttatgaatttctacagactcaattcctgggctgcaagcagtttttctgcattcacttagtgcttctcccagaccaaatcacacatatgcgaacaggaaattaacctgatgctcaaattgttctctaatctatcaattacattgaaacaaagtcacattttcaaagcaagcattttaacagaagtgactgcacctaggtcctccctctacggagcttacagtctccttcagaataaaatatggacaaataggaaatactggattcgtaagtgccaaactaatatgcaggtgttttggaaagggaggggccgctggggcagtcaaagaagtttgttgcaagaggcaattccggaagaaatgacctaagcaaagtcagagaagtggaggtaattgtgatgggagaaaagagaggaagaggtagaggacagagaggacagctgctcaggggtgaatgagaaacaggtttgagcagaagctgggctggctgtgataaatactgaggaatgtcactggaatgtcactgcaaaggaggtgttttttaatgtttgggtgtaaatcaagtctgtagcacagactgagggaatgaatattttacagaattgctgtcatcgttctgtatcttacagcccattctgttcatttctcattcaataatatttattgagtttctgttgtatgccaaacgcgttcacaactgtggattcagctgtgaacacaacgggtgaagcatctaccgtaaggagtggacatcctagcagagcaggcacgtggctgctggttaaggagacgggcacccagtgagctcaaaaagcagccagggctgcggcatgaggcagaatcaggagtcagggaaggatgagccgtggaggaagatggctgtctcagagagggtggccagagaggtcctctctagagaattgacatgtgaatcccgaggtgcccaaaaggagtgggagcaggtctcaaaaagttggtcccaggcaggggaagcaatggatggaaaaatctgacatgtggagaggcagccacaagtctgtggggtgggagcggtaggagaggatgtgggctggagtccatgggtaggagttggggctttatcctcagttccgtggaaagctgccaggtcatgttgagcaggagtgtgttgtgatcggattcactttttaaaaaattattttatttccataggttattggggaacaggtagtggttggttacacaagtaagttctttagtggttattcgtgggattttggtgcacctatcgcccaagcagtatacactgcactcaatttatagtcttttattcctcacccctttccactctttcctcctgagtccccaaagtccgttgtgccattgtgtcattcttatgcctttgcatcctcatagcttagctcccatttatgagtgagaacatatgatggttagttttccattcctgagttacttcatctagaataatagtctccaatctcacctaggttgctacaaatgccattaattcattccttttttatggctgagtagtattccttcgtatatatatataatacatatatatgtataatatatattatatatattatgtatatataaaatacatatatatgtataatatatatattatatatattcttgcaattgtgaattgtgctgctataaacatgtgtgtgcaggtatctttttcatataattacttattttcttcttggtaaatacctagtagtgggattgctagatcaaatggtagttcttttggtgtattttgttgtttgtttgtttgtttagatggagtctcactctgttgcccaggctggagtgcaatggtgtgatctcagctcaccgtaatctccgcctcctgggttcaagtgattctcctgcctcagcctcccaagtagttggaactgcaggcacatgccaccacgcctgggtaatttttgtatttttagtagagacagggtttcaccgtattggccaggctggtcttgaactcctgaccttgtgttccgcctgcctcagcctcccaaagtgctgggattacaggcatgagctgccacgcccagccaattcttttagttttttaaggaatctccacactgttttccatagtggttgcactagtttacattttcaccagcagtgtagaagtattcccagttcactgcatgcacgccaacatttatttgctgggataattggcaagctacatgtaggagaacgaaactggatcctcatctctcaccttatacagaaatcaattcaagatggatcaaggacttaagtctaagacctgaaactataaaaattctagaagataacatcataaaaacccttctagacattggcttaggcaagaatttcatgactaagaacccaaaagtaagtgcaataaaaacaaagattaatagctgggacttaattaaactaaagagcttttgcggggcaaaaggtaaggtcagcagaataaacagaaaacccacagagtgggggaaaatcttcacaatctatacatctgacagaggactaatatccagactctacaatgaactcaaacaaattagcaagaaaaaaacaaacaatcccatcgaaaagtgagctaaggacatgaatagacaattcccaaaagaagatatacaaatggccaacaaacatatgaaaaaatgctcaacatcattaatgatcagggaaatgcaaatcaaaactacaatgagataccatcttactcctgcaagaatgattcacattttttaaaagataattttgcttatacttggagaagctctaggggaaaaaactggaaacacaaagaggaggtatgggagagttgatggtggcttggacctgggtggtggatgtaagcagggaaggaaggaaggaagggagggagagagggagagagggagagagggaggaaggagaaagaagagagctggattcagtgttttgaagttaaagcccacagggtgcactaatagactgctcgtgaaatatgaaggaaagtgaaaattgaggataacttcagctctgcccccttccccagaactgagtagatggagatctaatttactgcgatgtggatgactgggagggcggagtgttgtgtggactccccaccccagattcatatgttgaagagctaattggttgtgaggacctcagaatgtgactgtctctgcaaatcgggcctttaaagaggtaattaggttaaaatgaggccatagaggtggaacttactctaatatgactggtgtccttatgagaagagaacatttggacccacagtgagacaccaggaatgcactgccacagagaaaagatcatgtgaggacacagtgagaaggtgccgtctgcaagccagggagagaggcctcagaggaatccagcccagccggctccttgatctcgggctttcggcctccagaactgtgagaaaataaactcctgttacttaagccactaagtttgtggaaagagagaactcaagggggctttattttaaatatgttagaaagtgtcaaatgaagttcaaaaaaaaaaaaaaaaagactagagactctaggttaagcttacataagagacccaaggacagcaaatcattttgttggggataaaagtgatatttgtaggcaataatgcagcttctctgattttgtactaaatacgttttagtaatttttttgtggcccagctgaggatagcttctcgagatacccttatggtttaactgtatttttcacgcactgttactggctaaggtcagtggatcaaagagacacagtagtctatgcacgtttccgatttattaggttacgacagtggggaaactttctccttagtctagtccatgaatctgctcaccaatgaaaaggaaatatagctaggaattatagcgttactgactccgtaatacttcaataaaatctgttcccagtttgagaaggagtcgggcaaacacaggaacttgcttaaggaaaataaccatgatatagataaccaacagaaagtctagagtaagaaacctaccccactccctttctagcagtgattgcctattacaggagaaaacagattggaagaacaaaggggaaagactcaacagaaactgtaatgtgacatagcttagtctcctgaaaggagcaaagaaaatcagctcaggagtaaatcaggatctctcttctcttgccaggacaaattcttcacttttaagatcaagattagggagctgattagaacaggttagcttctgtttatatatgagcagtttttaattccatagccattttagaagaaaaatctgagtaatcatcgcctcaatgacagaagctagatcaacctcccacaagctgcagctttagaatattggatggaaggaaattgatcctgagatgtggaatcccacaatattttcactaacaggtttccatgagaagtgggtgcttcattcattcttgtctacacacctatttctgcacttcctcctacaatatctcttttgagccagcctcagaccaaacacgactgcattccaaacagtcctctgttatgttctttttattattattattattattatttttgagacaaagtctcactctgtcacccaggctggagtgcaatggcacgatctcggctccctgcaagctctgcaacctaccaggttcaagtgattctcctgcctcagcctcctgagtagctgggattacaggtgcccactaccacacacggctaatttttgtatttttagtagatatgaggtttcgccatgtttgccaggctggtcttgaactcccgacctcaggtaatccacctgcctcagtctcccaaagtgctgaaattataggcgtgagccactgcacccaaccttgttatgttcttttcttggaggtctgtgggaactggtatgaaggtggtacactataaagaaaataacttacatggccaactagagttctgaaaaaccctcttctttaacacaattaaagctcattaaggttatgttgtgctgcaaagtggccttttcaaagagtgtgagaggtgcattttattcacatatatttgcactgagttcaagtatccctaattctcattatgtgtaatgcatttactgtgaaaagacatagaatattgaaaccacaacatgacatgcatacaattcataacaaagctttcaagctatgaaatatttcatggtaggacagagaagcacactccgagttctttgtagtagagttatttggtgtcacataacgattaagaacaatggctccagtcacaaaggcttgagtttaatccttgctcaacttttaattggctgttactttggacaattactctctcttaagcctatttccacttgaaaaaaatgggtaataacaatgtctgtcttgtaggattactgtaaagatgaaaattgtattatcaaaagctgagtatagtgcttggtatagagtgaagagggcccgcattggtatctgtgatgatgatggtggtgatggtgatgatgatgttaatgatgttaatgatgatagtgataatgatggtgatcctgatgatggtgttgatgatgatggtgataatggtgatgataatgatagtgatagtgacaatggtgttaatgatgttaatgatgatagtgataatgatgatgatcctgatgatggtgttgatgctggtgataatggtgttgataatgatagtgatagtgatgatggtgttaatgatgatagtgataatgatggtgatcctgatgatggtgataatggtgatgataatgatagtgatagtgatgatggtgttaatgatgttaatgatgatagtgataatgatggtgatcctgatgatggtgttgatgatgatggtgataatggtgatgataatgatagtgatagtgatgatggtgttaatggtgatggtgataatgatggtgatcatgatggtgttaatggtgatgatgatggtgatgatgatggtgatgataatgatagtgatagtgatgatggtgttaatggtgatggtgataatgatggtgatggtgataatgatggtgatgataatgatagtgatagtgatgatggtgttaatggtgatgatgataatgatggtgacagtgatgatgttgatggtgttaatggcgatgatgatgatggtcataatgatgatgatggtgatgcttctgatgctgataatgttaaactgaaccaagtctctctgaaatgaaatgtggtgcagccttcttagatcattgggcaaaaagaaggcctctcaggacatgtttctgctgtagcttgtgccactcaagtccttgggatgctttgtaataagaaatgaaagttagctgaatgtattttacagaaatgcaccgtttaatactcccttacataatgcaggatcaggagatatagaagtagacaatcatgttgtaacttttaataaattgttcaatcatagtattcaatgctgctgcaccattgattgtattagcaagcatcaaaaaaatccttaaatgataatgtagccgacttacacaaaataaacttaagattactgttttggtcaaagaattttcttgggtcagtagagggagatgaggaaaagaaaaatattttattatattgtagtatattaaataggttttattgtatttctttttaaaaaaatatacaagtgagtattctctcaaaccttagactttttcaccctggcctttcattgttacttgactggctgttactttggtcctatttttaactagcaaaagatcagacaaaataaagggaagaaaagacaattatctaaaaatgcaacatgtacaactgcacagtctagaaataacttgggtgtccacatgtgaggtaagcatctggaactagcaaaccatggtgagacattgtagactcatccccctcccattatggacttgacctcccatcccatgctcctggagatctggtctatgatgagatttctctcatatctctatgagagatactgttgtcgtttccttctgagtatctataggtgattaactaaaccgatcagactgggaactcctccagtgctacactgtgtacactggttgaataaatgaatgaacatataaaagaacaaatgaaaccatatcaggggtgtcctcaatttggggagatgcttgaaatcaatctgtcttatgaaggaactaggaagggttacagtcttattcaccaagatctggcgcaggctttgaaagaagggacacctgacctcaggtgatccgccagccttggcctcccaaagtgaccccatctctactaaaaatacaaaaattagctgggtgtggtggtgcacacctgtaatcccagctactcgggaagctgaggcatgagaatcacttgaacctgggaggcagaggttgcagtgagtggagattaagccattgcactccagcctgggtgacagagcgagattctgtcccaaataaaggacaaagaagaatatttgttcattctgtacacttggccagagatgtttttgactgaaattcattggttaactaacagtgcttactgggttttatcacataagttcatataaatcaatcaatatgattacatatctgttcaatgaaatgattccaccagaggttctcaaagtgtatctgaggaccctgggggtacccagcacctttcttaggacatctagaaagtcaaaactattttcataatgatatcaagatgttatttgccttttgtactttcattctctcatgagtatgaaaaattaatcaatttggtttcagagtgcacattacaactaaccttgtcaggttttgatatagtatcaaataaaaatattcgcagttatctgataaagcaattaaaacatcctccttttccaactacatatttttgtgagactagatttcttttatatacttaaaccaagagtaatatattgcaacaaattgaaagcaaaagcagatgttggaatctggctgttttctattgttttccttcttctattaaagtcaaggttactaagatttgtagaaatctaaaacaatgccactctgctcaccaaatttttttgaaaataattttgcataaaatgtgctgattatagtaagatataatagattttcattttgaatacttaaatattcaacattttttcattttattattgtaaatatacaataattcacaataatatattacaatatataatatatatttacaataaaattatatatttactgtaacaaattatatatatatttatcccttatatatattttatatatatcccttatacacatatacatatacatgcacatacatatataatgtgtgtatatatttatctcttataaacacatacacatgtgtacacacacacatatatgcacacatacttatatatgcgtgtacatatttatcccttataaacacatatacacacatgtacacacacatatgtgcacatacatatatatgtgcatgtatatatcccttacatatacacacatatacatgcacacatatatgcacacatacatatatatgtgtgtgtatatatttatcccttataaacacatatacacacgtatatgcacacatacatatatatgtgtgtgtatatatttatcccttataaacacatatacacacgtatatgcacacatacatatatatgtgtgtgtatatatttatcccttataaacacatatacacacgtatatgcacacatacatatatatgtgtgtgtatatatttatcccttataaacacatatacacacgtatatgcacacatacatatttatgtgtgtgtatatatttatcccttataaacacatatacacacgtatatgcgcacatacatatttatgtgcatgtatatatttatcccttacgaacaaaagctctttggggtcctcaatagcttctaaaggtgcaaagggtttctgagaccaacatgtctgaaagccactgaattaccttaacagctcctaggtctgaaagtttatggttctaaaaaatgcccagcacttgctgtttctatgaggaataaaagtgattgtctcaccatcaacactgtctacaacactgttagggagacaaagcttatctacatcaacatgatggattagctacttttcttagttctttctagctcccacaacaaaataccgtaaactgggtggcttataaacaagagaaatgtattgctcacggttctggaacttggaagtccaagatcaaagtggaaacagattcagcatctggtgagggcccgttcctcattgacagtcatcttgctgtattctcatatggtggatgggactagaggtctccctctgggatttcctttataagggcattaatcctattcaggaggtaacattcatgacctaaccccttccggaggccttgcctcctaacaccatcacattgaaggttaggattctgacatagggattttggatggatgcatgcattcagaccacagtgacagcctacaatcaagttctaaattgtgtagttcaaactaggagaactgtgaggagatggttttggggaaagtgacttctgcatttgcctcaatgattttccctgcgatgacacgtggcctgctctgaacagtgtttgttccacaaaatgctgctgtcctttattcagaaactttctattgaaaccaatttttatctcaataacctgatttttaatctcacaaaactggacctggtgactttgaattactatattagaaccttgtaaattgccttgtttactgattgttttaacacaagatcctgtcatctcactagactatgtaaatttgcagataaaaatgcccatcttagattggtcagcctgggggtgaaaatggactcaaccacttctatctattgattaaaggactctgagtaagtctcctaagtatatgtttttttttcaatctgtaatatcaggatgttagctgtcatttttaagcccctgtgatatcccatgtgatccaaaagacactttgtataattcatcaattctcaaaacaacatgctgagataacgtaattttcattctctataaatggggaaaccgaagatcaaagaattgaatcatggctaaaaccacacaactggtaagtggaaaggagttccacttaaattgaacttataactttgatctaagctgtctgattctaaagctagtgattattttcctattattttgatggtcagctcttaagagttcttgcaatagttgaataaagtgaagcctgtgatagcctagtgcgatgtcaggtacgtagtcagtggtcactcagccttggttccccttgtcctgcccttctcctgggccacagtgctttgtagagctgtattgtaccatcccagtaggtttagccacacagagcccatgagaacaagctttgcacttagatatgctgtccatgtatttgacaattgatttgctgtcctgactttgctattacctatcctcctgatcatggacaagttcctccgcttctctgggctttggctttcttttctgtaaaaggatgaatttggacaagattaccatcagatctatagattttctaccttatagatctgtactattgctgagatttttgtgacaagcttaggagttccccaaaataatgaaactgtgctatttgaacattttctctgaatctcagaggtacaaatttggaaatctacattgtcattaaggaaatgtgatgtataagaaaaacagtaaagtatagctgccgtataccgtacttcttaggtataaaattcatgctataaaatgactttcttcatctggtgtcaaaccctaaataatgggaaataatgcaaaggaaatatgtttcctgatagtcaatagaaggaatgacggacccagcagccatgtgagggtatatttaaactaagaccttcatttcatgcttctcatgattctaattctcattttcccatcgagttaaagggggaggattgagtttaacatgtgggaagagtaagatgccttggttcttccattgttagttttccatattcaccatgttgtataatcattaagcgtatttaatcgtggttattgagttaaaaatgaagtgttaccacccggttttgcagcatgtgccgtaattgttaatctggttatgccaggttgctatgcataaacaatgtctcacatcaatttagaaaatatgatcattactgtttatgaactgataatatagaaaaaaccatttagaatggatagaaggaaaatatcatttttctaaagaaaagcaaaagaaaacatgtcgttggcagagtaacaacatgaatcatagaatctagaagctcgtaagggtctgagaaaccatgggctccagctcaccaagtaccagaatgtgaagtgatgtgtccaggtgccatgtcccccagaggatgctcaggtctaaggctgaaatggccaatctgttcagaagcacatgggtctcctttcctaataaaggaagtagctaagatccacccttaaggcggcaaagtgtgtactaaggcatcaaaaggacaagtcaggtagtgagtaggtcacttattaccagactcaataccagtagctcctgcagaacaggggatgacttttcctctgaaaacaagagtacaagtgcctggtctctgggtgtgcctatggggaaattctgccctggttctggggctcagtctgattccaaagcacacagtcctaagaatggggctttccacgcctcagcccctgtgtcttcccccttcacctcctacaacactgccccagtccgtgtgggtcaactctcctttttctcaaaagccttcacttctaaaagcaaggttgtttattaagttaagtgacaaagagatactgcaacaataataagctgtgatcaaagactgggttgatgttccacatcacaagcactttcattggaagtttctaggattccaggatgtctgtttctgtgaatcccactcagaagactgtgtcttcattaatcagagagaagacaatgcaaaattttaagctctggtaatagtctatgtaaactgactattgtccatttattttgtctctactgagtttaaagattcagtgataccccatttatgtgtcgatccaatcagacaggtaccagaggtgtctctctctggggtagcaaactcagaggggacaaaaatgacagctctactattggttgtggttgcgaacacatatattgttgcaaagaggaagagcctattgaaatcagacgtgggcaggtgttgagttctactgtgatttgctattttccatcatacagagcaaggacaaccagaactgcaaagacagaggccagcagtggtaatgaggactgaagagaagtcccagcatggacaggaggcccttatcatttttaaacagcacaattccctccatcttacctttggcactggagataaatgaaataggctgttctgtttgaaaagagtgtacctgctcagtgggaccagcaagcaccatgtggccatactgtgacagtcatcaaaagaaagagtgcaccttcctttgcagtgataagggggtcacagagaaagcctgggggtcaaagctagatacaaggcatcaggctgccactctcatccagggacacaaacattcttgtctccaatattggatctgaaagtaaaatcaacatattctgaaggaaaaggatccagtgaaggaggacagtattattcagggaggccttgctatacctttatctccggggtttcctgccttacaggaagatgttgccttatagaaagatttatgaatgagatgctttgatgaaagtctgtaaccaaaactcttagctatgtggatggataactatagccagcttcctggtttcaaggaaaaagttctcaaaactctctctacattttgcatcctgaaataatcaatgtatctacctccctggatagacaattagcttcttgagaacaagtaccctgaattgttcactttcaattccctggctgccagcacagtgccttgaactgaactgagcttctacctaagcatctgtatcttctgctaaaagagacctgcctgctccatccatttttaacaggactctttcctaatatttgcttttaattaaatggaatattcatcaaagtgaaaaacatgcttcacttagtacattacctcagactacagagaacacacctctgttacttcttatggtccttttgggacagctgtggatttagtttcatagactttattagcataattgaaaaagacaatccgaggggaagcattttgtgcaccgcctggatggaaattatatgaaggtggcattaccagtactgtacttgctactaaaatttcacctaaagactcattgcaaagcacttgggcaaattttccttttctcacttggaattcaattttgaaaattgggggatgtcaagaatttcactgaatgaggttcatttttaaaatcccattatgagagggcagtgtagggggactccattagccccaggagtgttgaggggaaacgtaaatgagtgaggccattaaagtccttagaccacgggggcctcaatagagcctgagatggctgctgaggaggtggagacatggtcatgataaggactgactcccagcccagaggatgatgagctggtgcgtgttctcatgctgtgtcaaacctccttgcatatcaatcttctgttcaccctcacagccaatcctgaaatccatcctgtctccacatctgtggagtttcctgttgcatggagctcctcacaaaagtctactttccaagacagctttccccaacccagaatgacagtgggattcacacattatcaagaaaagtcacccatttcattttgttcccactggagtctcttttatcacttccctcacaaatgattctggggatatttaaactaattttctagtgtagaagaatttaatggatgtgtggacaccatgaatacagctgctgctcagtgcctgtacttgcttttgtccccaggaattgatttgagtgcaatcaatttgcaattcccaataatgtagagagctgcctctttgtctcagcatctgtcctgctaactgtgaggcccgacactatggtgaaggaggcagaataggaaaggaagagcttctggcatgagagacagaaaaagcttcagatggaggatcaggaccacaggcacacatcccctaaagatcatggaaataatgacaaaatacaacctgcgttacagccagctcccctagcaaggtgtttattctgtgcaacaagacacgcttactctcaccattaggatcatcattagctttaaaattgtcaagtgacaattacccatatattgcggtgatacactttttatactgaagcaaaatacagtcttatggatgggttattttctgtgtaacaatgcacatcattctgcaagatgaccaaacaggagagaaaacaattcacgttctgtagattacttgattgtgccccattttgttaatgggcagtatattttaaactacaatttcaaagtcaaatgtctgcattggttgtttctttaagtgtaaagagatcagaaaaaaagggtttattccttagaatgagtttccctgagatgtagcgaggacattatagtcagactggcacaagcaaagaaacagttacagcagcaccaacaattaggagaaaaattggactccaagtgaaacaatgctaggcgtctcactataaatgctatcaacactttgtgtgagacaggtgcagagtgtgaaagcaatcattcgtacagataatcactgtatcaaatgcgtgtccctgcctggactgcacctgccacaccttttcataaagccaggaagccagacaacagtgtcttgttgagggttggctgtaccatatgggaactgtgagccctgcaccagcatcaggtggtgcttctgttatttgctctctcactgatttagaggagtcctgagaaattgaggtcctcaacagaaaacacatgggtcagtgttaattcatctccagtgacctttgctgctgtggaattctgtagtcctgtctctgttccttcttttatccaaggcttctcattgcaaaatggaaaccgtattgtcaggttctaagttctgagcagcattttgattgggattctatagttcctcagtcatatcactattcttatcatggtgataccaatacaattattacaaatgcaaatacaacccccagttttcctgcaatagaatatgtgagccatttcacactggagttgatctacataaagtcagctgattctaagagctcagatccatacacccgcccctgcctgtcaacatggccactgaccacgctaacacgctgacgaggtgagtccttcacctcttggcaaccagaagtgttagaccttgaattttagcatttgctgaatggagatgcttccatgcactttagaagatttgattcttctgcaagaagaattctcctgttaaatatgcaaaatacgttttttttcttgttctttggcactagttaccaaaatctgcaagtctgtctatttttaatgtaccttcttttaaaagcactgcagtgcctatgtgtatattaggctctaaacctggctctgggaggtcatgagtataattttagacctagcaagttctgaagtcactgtttctcttgtatttcacaatgaaatgtcaggaataattttttgaaaatgaagtggaaccttcttttaaatacgagcccttcatctccatcactcctcccaggctctgtcataatcacaggccgggagctacatttctggctgatgggatccttgtgcagttggcacaggctctgcccccatgcctctggaccctcagctgtccttgcacacctgctgcaggtgcactgtcatgctcagggcagcacctgtgtcctttcattggcacttccggcacgctgccagagctcttactgcccgcctggcctggtggctggaaatgcctggggattttgcccctttgggcagcctcagccaaggactgccagatgtggggaaatatattccagcctcctttccccagcagcagctctgaaggatggcctacctgctcctagagtcctctgcagggctgaggcacagttctacctgtgtgacctccttccctctgtgtcccctccccatgggtttcccttgaaacacatcttataaaatcacttacctagaatacacatttaagcctccttctcataacccaacaccttggcccaaagagcggaacaaagagccggaaccctggggagttgtagcctatggacaccaggtctcggggcctctcctttaaggatatctcttttttccaaacagagtttaaagatgtccttgttccaaattgagaagacaaaaagcaaactatgttgcaggttttccaaatgatttcagaccagatttacaatggcttgctctttaaaaattgaagaaattcacccctggtatgccaggagcctgggagtctgcaccaggattgtcccctgcagatgtgaggacagtttaatcagctccctcctcagtgctccatactctgtgagacgttgtggggaaggcagcatttaaatctacaaataaaagtactggatccctcaagaggaggagagagtggtacaaccttaatggccttaaaggccaagaacttaatggccaagaagccagacatggagatatccatggccattctcaccccactctttccttcccactgcaccagcccctccggctccaaatcaaatagctctgaattcagaatgcaatttgaaaacttgggaatcaaggctcttctctgtggatcttgtatttgagatagtaagaccttgccagtgccttgaagttatctatttaacctagcatagccgtcactttggaagagtgaggccagcactccaggctacgctgtgcatgagaatgaggacaattttgctaaaacaatacaatgcttctttactgagggtgggtctattttgttttaagcttatggatattatcttacaaatacctgttaaaaccccatgcgtagttaataatcccattttagaaaaaaagccactttgacattgaattgctaactgatttttcccaaggtcaccccagtaaaagtgtcagattctgaaatcagattctgtgctacttgatgttaatgccccgtaggcctctcaatcataaaatgccttagagtcacagtgggtgtgacatacgtgaagttgaggaaagaacatttcccttttgacagccagaatagaatcgtttagcaaatggcattgataaggtcaataattcaaatgggaaattagagtattattctgacctcacaatagaattgattaggaaatggcaatgataaggtcaagaatgcaaatgggaaattaagagtgttattctgacctctagggtagagaatgggacctctgctcagctttaagtgaggagcaagacagaatagtgatggtgagccctggagatgcagtcagttcttgctgttcacagtagtcatgctctataaggttgccacaaaggcagaattaactaatactgagctgttgctcctagtggaaatgtaaggttaggttccttcaagcctcgggtcacaacattttcatccacagatccacacataagtttcttaagtgagcatttctgtttaaaaacattgtattacatatatagtcttcattcattaacactgatttcatggccaacggtactataacacatgcctgcatgaagcttttccaacacacatattcttctccataaggcacatcacggtattcttgtgcttgggaaccctacacagcacttcagcacgcacttgggggccattttaaacagcaaaatcaccaacaaaaaatacaaaaatgtggaactaaatagaccatgaagaggacacttgtttatagtatgagctaaagcaagaaggcagagtgccgtcatgttcagacccagctaggaacatgtgtgtcaggcaactcacttttttttccactgtgtacatgactgcaaaagacctggaaagcaccatgagtattgatttgcaagttacacataaattttaggagtaggtcgatctgcaaatattgcatccatgaataataaggatcacctctgttagcattagcacattgcccattgacaaatctactggattcatctgagctagtaaaaacaacaacaacaaaaaaaacaattgtcaatcagaccaaaggtaatctccattcgtacacaaatagaaggaacaattagcttgggaagatctgcctgtttatttaattaaaaataaattttaaaagatggaaggctgggcatggaggctcacgcctgtaatcccagcactttgggaggctgaggtgggcagatcacttcaggtcaggagttcgagaccagcctggccaacatggtgaaaccccatctctactaaaaatacaaaagattagccaggcatggtggctcatgcctgcaatcccagctacttgggaggctgaggcaggagaattgcttgagcctgggaggcagaggttgcagtgagccaggatcacagcactgtgctctaacttgggccatagggtgagattctgtctccaaaaataaaaaactaaaagaaggagaagaggaaagtagtcttctctctcttgctccagcagttctgaatcacctttgtgtagtttcttgatgttcttgcttttcctgtgcaaatgggtagtgaccttaacagtgcatactgtgctgaaactctccccagtgagagttcttccacatattctgagccatgctgaataatcaggcaggtgcacggctttgcccacactcaagtgaggaaggaccatgggactcttcccgtcatgcgggcgacagatgtggttcagccactgcaaaataaaaagccaggccctctgtataacgaaattcagtgaccactttgtttcattaagaggcagtctgttctgtggacctgggagggagagacagggagcgtttttcaccaacaacttacaactccacagtaagttgagaggagtcccgactccatgctgtatgaagtccagcactgacacaccatggccagcgaccaacttgctaagtcaaaaaaatctaactcagaaccctttgactgaggaacagttttcacactccagaaaattctaaatgactttcatttgctgttggttcacatgccctcgtggaagactttgcttgctgctttgttttcataagcagcttgaaggaaactcaggcaggaactatggaactccagctgctgctgtaactgcatcttgacgatgcaaaatgacgatggaaatatagaagcatgtacatcatatctatcatgaattgagcatgtgggtctgttccctcgaatgaaaaatacatgcaaataaaaatatttggctataggtggtgcaacttttaacagttgttctagaacttacacatccaaatatgtgttttcactttgcacagggtggcctatggagttttatgcttgctctagtaatgttgtagtggaaaacattttggaagtattttaatgtattaaccacattgtttaatatctttaacctcattaaatcacagtcctttaaggaatgatatgtgtgcactcttgtatgtgtatgagtgtatgtatgtgtgtgtgcagttgcatgtgtgggagtggggatgcacgtgtgtgtttggtgtgtgtatatgagcatgtgtgagtatgtgtgtatatgtgtgtgcaattgcatgtgtatgtatgtgtatgtatgtgtgtttgttgtgtggtatgtatatgggcatgtgtgtgtatatatgtgtgtgtgcagttgatgtgtttgggggatacctgtgcttgttgtgtggtatgtgtatgtatgggcatgtgtgtgtatatatgtgtgtgtgcagctgatgtgtgtgtggggatgcatgtgtgtgcattgtgtatatgtgtctgggcatgtgtgtgtatctatgtgtgtgtgcagtttggggatgcatgtgtggtgtgcatatgtatatggacatgtgtgagtatgtgagtatatggtgtatgcataattgtgtgcatatatgtgtgtgtggcatgcatgtgaggcacgtgggggtttgtgtgtgtatgaagaacaaatcatttggaaacaagtatggtgaatccatctaggtagtttggtgtagggttaaaaaatgattataaattttgtgattgattttcttattggtccaaagactgattctggccagtatattctaggactacccttggtggtggtatcatggggataaaaatgtggctttctgagacaacgccttggaagcgtgtcacttgctggaacataggcatctcagtacagcaatatgtagagtagcacgccatgcctgtgggcctttcaaaagtcctcatgtgaacgtgagcctttcttcctgtggtactgatgatcattacgttcacgttgcaaagtctcattagtttgatttttgaacccagttgttggaaaagggtgttgatgtgtcccccagaaatggggaaggtgctgaatggaaacctaacttaatcgtactgtggattgaatgcgttgcctttttaaagaatgtcttggcagttcccgtgattttgtctaactctctggctattttttcctctctggatttagctctaaatcaaaaacccacacacaattactgcacaggggatgacccttctcagaaaaattccaaaacctctggagtagattgggtttttttacccattgagataaagaaggatattacaccatagttttgaattacaatgctgatatcctattcagggcttattaggatataacttgaagtaaatgttgagagtaatcagcaggacattttgaaagaaaagttacagttaacctagatgacagttaaacaattgtttatccccgataactgcattcagatgggccaatagcagaagtcactctgaaattcatgaaagtgtaactaacaggactgtcactactgcaagcagcatatttaatgtttttactgtttttttataaaaaaaggtttctattacagtgttcttgagtattggactaaaatgcaaacgtcacttgtaaatctattcctttgggcttcatgaagatttgaggtaggtgctcaggaagtgaatctccccaagaaactcctctcttagaatacactctgaccccaagcctgttggtagcaagactgcaggagcacatggctttgcaggcagcagaccttggctcatacccaaactccccactcactgaacctgcagcctcccccttccatcttcgacttctttatttggggaacagccacaataatgctggtggctgtagggactggggacaacatatccagcgcagagcttggttttattagagctatttaataaatgatggtcacaaatatgactattaataattagctattaattcaatttacacttggatttaattaataatagtaataagtgggtttattgtcactctaataagaacatatttgcaggctaaaacatcactcccaggaaaatcaccgtgttgacatatttatcttttcttaacattttcttctaccaataacgcagtgtaagaatcaaccttaatagatcactcactttgtgccaagctctgttctaagcactctgaaaatattaacatatgcaattatcgtagccatcccacgaggtaaccattgttatcccatttttccacgtgaggacactgtggtaggttaagacacttgatgaaagctggtaagtggtagagatatataactgttaagtaacaagaacacaattttatttcttattttatttatttatttatttatttatttatttatttatttattttttggagacagagtcttgctctgtcacccaggctggcacacagtggcacaatcttggctcactgcaacctccgcctcccaggttcaagcaattctcctgcctcagcttcccaaggagctgggattacaggcgtgcaccaccacggccagctaattttagtatttttagtagagacggggtttcactatgttggccaggcggctcttaaactcctgacctcaagtgatccgcccgcttcgacctcccctaatgccaggattacaggcataagccgctgcgcccagcctaagaacacaattttaaatgccaggattcatacctctaaataaaatgggtgcatcctctacaaggcccaggatgtggtgggctctccctgggctgtgactgtgtcttccttgaattgtcttcagaatcattgataagtcccacgcctctgtttcctatctccattgtcacagctgatttatgaacacaaacagtattgcaaaacttaacaccaccactgtttgttgtaaatttacataccttgtgactcatttttaaaaaatcaaatatagcaacaaagtacaaagatttaccaccactgactatgtaagagaaggcactaggagatcttaggatattatgctaagtggtatttcaaaggcattttgtatcttagtataagatctctggtgtgcaattttgtgtgatttgaatagggcctactttgcaaggggccacgcagacggatttcagcatcagaattgatttataccagtagcctcttctttatggtcataccacatatttagaatttgaactttctctgatgcagtagactgcatcttgctacctgagaaagatacaaaccaccctcatcttggcctgaaaagagcctctcccagatgctcagcatccagtacagggaagaagatgatatggtatggggggtttggagccaaaaattgatttgagacatgggtctttgtgactctagcttagtgacttaacctttcaacacctctgtttcctcccctgtccaatggggagattgacctcacctgagagagtgtcctgagaaccaagtgtaatgatgtgtgttgaggggtggggacagggctggcacagtgcctggcatgttctaaccatctataattttattcttttttcccctccctattccattctctctgtggccccatagagaagactccaatctgtggttttcattgatggtggcagctttagccaggcagtggtttccctgttgtacaattcaatagcctgcatgcagggacatgcttctcaggtggcctctggatacacgtgtcctttgtggcctacagaagactttcttacacagtgcactgttaactgagcagaggcagccgtacctggggtgctgattagcactgtgcaatgtactgattggtactgtgtaatttttaggacctccttttgttccctacgccccttgggagagtgtggcacactggaagaaagacacgctgtatcctgggcacaggtcttctgttagactcaatggtgggaaggggatgggatgcagcccagggcctccctgcccatggcattttctcaggagctgtctcctttgagttgctatcaaatcgcatatgttgcatgcttacttgaaaggaatttgcacagagtggtttgtttatactagttaggcatcaaaaagaccattgttctcccagactttcagtataacaaacaaatttaaaaaaagtatgtatatttgggtagataaatatagggttgattcctaaagggtttagaaataaccacaaataggcccatttataacaagaggttgaaggagagattgccactctttggagccacatctgaatgccagaagttcccttgacatcctgctcagtccaagggtcacaacatgtctgatgcctagctctggactcaagggcatcagacatcagaacacgtctctctctggactcagggacaatacccatacatatctgtggaatcaggataccttacctcctatctccagttcctaccccactgtgaagctcagagtgatattgagtgagccctttctgaatcgggaccagtctcatctcagcttattacccgtgggccccagtaatgcaatctgttcaccttctgaacactgggatccccgttgtcttgtcctaggtcactcatttgagagacagaagcgagtagaggctgtaagcatgaactctgcagccacagggttgctttgaatcctggacttgacacagctgtgtaaacttgagcaagttattgcaactctgtgtgcctcagtttacctatctgtaaagtgaggatacaaatgatctacttcatagggctattttaaaaatagttaatatgtaagtaactattagaatgcctagaacacggtacttgttagtaagagttattcattgtcatcatcatagtcattatcatcatcatcatcaagaatttgatgagtacctgtaaaggctaagcaatatccgaggctcatggggtacacagcaataaactaggcagggctctgttctttgagaaacttactctttatttgagacaaacaataaagagagctcttttagcacaaggcactgtaggaattccagtaacaaggagtcgtcctatgtagacagaacttgtgcatcgttgatgatctcgacgatcttgctaaattgaagcttggatgggcaagtaagactcagactttactccaagcaattccaagcatatgaaagcacgatgggcagatattagcctgccatccatacacagtattggatatcgcactctctgtgggacatttgctccttattctgacatcataagaacagaaaaccagtgcttctggacacgaatcatttcagggctctttgcagatgcatagcatgaaagcagctgtttcagaattcaaaaattatacatcatgccgtatatggcttttcgctttacaagttgctttcaaacattgcctcatgttggcctcatgacatccatgttagataagcgtggtgagaattacttccctgtttgataaacggggaagctgagtcagggggagctgcctcatcatggtcactaaagagaggcgagtgagacctggaaccccactgggtcttctgtcttctgggtgagctcttggttgaggggactgtgagatgcctgtgtaggtgagtctttgctgatttatagactcaatggactaattgttgctggatgctaccagaactatgaaacaatctgcaggacgaaaaagcagatgagtcatgcaaattttaacaaattagttatgtttctgaaattaaaagtaggtaaagaacacaaaagaattggaaacaaggactcagatacttatatgcctatgttctttgcagcattaacaataaccaaaagggggaaacaacccaagtgtctatcaactgatggatggatcaataaaatgtggtatatccgtacaatggaatattattcagccttaaaaagaaatgaagttctgatacatgttacaacatggatcaatcttgaaaacactatgccagagactgggcgcgttggcttacgcccgtaatcccagcactttgggaggccgagacaggctgatcacttgaggtcaggagttcaagaccagcctgaccaagatggtgaaaccctgtctctactaaaaatacaaaaattagccgggcgtggtggtgtgcacctgtaaccccagctacttgggaggccaaggcaggagaattgcttgaacacaggaggtggaggttgcagtgagcaaagactgggccactgcactccagcctgggtgacagagcgagacttcatctcaaaacaaaacaaaacaaaacaaaaacattatgccaaatgacataaactgaacaaaaaggacaaatactgtatgaatccatttatgtgaaacatctaggttagctaacctcatagagacagaaaatagattagaggttaccagaggccagagggaggagaaatagacatgtattgcttaatgactacaaaattgctgtttggtgtgaggaaaagttttgaatatagatgttggcaatggttgcacaatattgtgaatgcatttattgccactgaattaaacactgaattaaaactgcttttatattttaattatacactgaaataaaactgcttttaactagtttattttaattatacactgaattaaaactgctttttactagttttatcatatatcatactagtttgttgttgttgttgttgttttgagatggagttttgctcttgtcacccaggctggagtgcagtggcgcagtcttggctcattgcaacctccacctcccaggttcaagcgattctcctgcctcagcctcccaagtagcttggataacaggcacccgccaccacacttggctaatgtttgcattattagtagagacggggtttcaccgtgttggccaggctggtctcaaactcctgacttcaggtgatctgcccaccttggcctcacaaaaagctaggattacgggcatgagccactgctcccaccctcctactagttttattatatcattttaggttattataaaatcacagccatagtaacttcctgtgaggaaacggtttaaaaatatgagagcaggccacatggccacctaaggaaatttatacattttgagaagcgtgaaagcttattctatttccctgagaaaaggtattgatatcacaatgcagaggtgatcttattttaatttcagcactattactgctgtgcatttattacaatcaggcagagtactgatgtgtttcgaatacgggaaagacagaatctgaaaagagatagcaatttaactttctgcaggaaaactccggcgtgtttttcattctgacaacttgactggtgataagaaagatgaggtactacttttgtaaacttgttatccttacactctcaagaaccatttgtcatccatttttccctgtcatactgaaatatacctctaagaaaatatcggtaatttctcagtattttaaaaacatagattctcttgatcagtctactaaatatttcatagtttgtgtgttgttcattagaaaagaagagattccattttcccaaactgtggaactgagcagcgcactgagattttaaggagtgggatgtgggtaccctgagaagggacatggttttgtccagagctgaggaaaagaaaaattgaccccgagatcccagcttagccaacagccctgggcaatttcatcagcttcctatatctcggtgtagccacgagcaagatcattttgtggcactgaactcacggtctgcaactcatgtgcattcaggacagacattgaggcttagggtcaggctgtaggtggcaccagccatcatgggacattcagaccagagaatgcagcaaccaagagcttgcttaggtaggcaagcaggagcgtttgtccactccatagccagccttcatctatcaggggacttgaaatgttcattgcacattcccctgtaggcaagagtatttattgagaagacctgaattttaatgcaaagctttccaaatggttgtttgtagccagttgacctttgagtccagacatcaggtggctccattcctctccagggccatggagcttcactgtgaccttgggggactgtccagccctctccatagtgttgagggagcagctccagctcttctcccctcactcttcctggcctccctggggccagtatcccattgttaacaccagcaccagtcccatgcctatgatttcttcttttttttttttttttcttttgagacagtctcactctgtcacccaggctgaagtgcagtggagctatcttggctcattgcgacctccacctcctgggttcaaggaattctgcctcagcctcccgagtagctggaatcacaagcatgcactaccatgcccggctaatttttgtatgtttagtagagacaggggttcaccatgttggccagactggtcctaaactcctgacctcaagtgacccacccacctcggccttaaactgctgggattacaggtgtgagccaccgtgcctggcctatgcctgtgattgctttacttcagaaaagaaagcatgcagtgtctgacttctgagcaaagctgtggctcccaacaggaagacatcttacaaacgcaggagagatgcaagctcacttagaaggggaaacgtgcttagttaatgccagggttcacatgtgaccatgtttaaaatgaccacagagggaaggagaacaaaaaagcaaactttgctgacactcaaatgttttctgtttctaagtggatgaccctgcctttctagatacaacgggtttcattcttcatgctgggcaggttgccggggtttggacaaatcctgctcagtgcaaagcatctcccaaggtaacagtccctgctggctgctttaggtaaatgtcagcttgttatgctgctggacagatcccacgtgggccctgttctctgtcattgccatctattctccaagaattctgtctcaatgagaagaaaaacagatcaacaggggagctgaggaatagatgggagctgcgagctgcagagggccaggactcggtgtgttccccacagcggccatctgcttggcttgtggagacgaccagctcggccacacttctgagattaggactccctgatgggccagcagaaggggctcttgtcaaatcccactttccctgattaaaccggaacaggaatgtctggcagagtagaaaatccagggaggagaggtgaggcctgcatcctggagggaaggttgtcctgagatgttcctgccatttttgtccccaaaagcgggatgatactagaggcgatggggcaggatccatcctgaatgtgtccggagagttttggaagatttgaccatcactgcaatagtctttcttctacagaaaataagtccggtaaaaatggggcaaaagttactcccacccagaggaatgagacatatgtgtccccctaccgaggggtgccccagagagtgggcacctagaagatctggttgttccccgcagtcacatacctccctgaattgaagtccttagagccacagaaaacttcctctggttttcttactagttactgttggagagagggtcattcctgattcctcctccagtgcagcctggcaggggagcctgctgagctctgctgtgtgaactttctgcccagagacaaggacagggatgagaggaggcagcaggtgagcagaagacaagacactggaagataagacctgtgcatcaggaccgagggaatatatgtgggagagacagagtccactgagatgcctcagctacccagggttcccactgtaaggaagccaccagtgtccagaggactccaggaaaaactcggatcccactttctgctactgaccagctgtgtgacctcagaccaggagtgcaatctctctgcacatctgacatctgtgtcaattcttccttaggagaggagagacgatttatgccttacccacttcttaaggcagtgttgaacaatgtcatcatgtgtaaaagcattttttaaaataagctgttgtctgcatggaggccatgattcatataaagcaatttgatttatacaatgaatctctccaagttttgctccttgcaaggttctgtgtcaataaatgttcaaacccatatttattgagcacctactataaataatcaggcgctgttttaagcacttctgatatgctggtaaaaaaaaacagatgcaaatacctgcctttgttacgctgacattctagaggacatttaaagagatctagttccatgtggatagagcaaaatgaaagggaaagttatactttagcacaaatgtcaatttcagaatggtttatttttaaaatgccagactctgccatcctgagattgactaactattgtctcaccatctctttgtcctggttaagttcagagaatacaatgtgcccagagtgcagccctgtttgaaaaggacggcttgcagagttgcagcaaaagtcatttctgggcagacgataatactaaacggaagctgatgaaagaaagagaaaaaaataccatgagagaagggggatgctggtgaaggtaaaatgttagtggagaggtagatttcaaatagaatcgcctaggttgaaaataaaaagcagtcatcaactatgatggaaaaatatttccgagacttgataagtcatccggaccctggctgctcactcccagggttgcgtgggatcctttgcaggatgagcagaggctgtcagtgtgggatgcgtaacacagcaggcacagggtaactgatctaattatgaagagcccttcccatctgatcctgactttgacctatggcttgtgaggccccagcaacattgaatccagggtgaaagtcagaaggactaggacccactcagctagttcaatcctctcatgccttcagtggctggagatatttagggagcacatcctatatgctaagccctaaataaggtgtcaggaatatagcagtgaactaggatggcaggtcccttccccaatgaaacccagtgtgggacaaaatgtgatcctggaaggtgagggtgattctgcaactcataaataaactgcgtgtgccagtagcaggccttgtggtaacacctaggcaggaccaccttctctgcacaacttcagagagcataacttaatttttacacattgaattttgatgtatttatttgtcattgcctaacatcccaaccccagcgtctgatggggatggcagtcctggcgttatgccatgggtagggtactgaggctagattccctgaatcctgaccgagtctcatcccatgagccagggtgatgaggctaatcaaacaaggaaccaaggagcccataggttgaaatacaaggtttggaagaaaatgtgatgcttgctggaatgaccagatgggcgaggatgttgaaaaataaatgaggtgtgatcattgcaattcattcccatcattacgaaatcatttattattaagttacacatggacacactgcagtgccaaggaaaagtacaaatgaaaggtaaaaacaagggacaaatgttgctcatgttgccagtaccttgttttgagtctggaagagaattatttatgttgctgcagccaaacgtctctaaagaaaatgatcaaattgtaattggtcaacatgttctctcaatgataccttgatacatcattttaattttaagtttttattcatctctaatgttttacttcaggcacttcttatttctttcttggaccattccaaaaatgtcctaaactggtatctcggccccagtccatcttctacgctctgaaaaaatacctttggttttatttttgcagagtcgattttttcccttcgtggatgggctccttggcaatctgagccttcgccctgctccctgccacccccctgccttgcactccaggcatgcacattcatgaaaattcctcaaaatcttagggaggctgaggcaggagaatcccttggacccgggaggtggaggttgcagtgagccgagattgcaccattgaacgcactgtagcctgtgtgacaagagcaaaactctgtctccaaaaaaaaaaaaaaaattccctcttgctcatgactcatttgtatgtgatgttccacttggcagccattttcctctagtccactggcccctggtgttcccgcggggcttcttacatgagccattctagaatcgcaggtcccttgctcttcctctgcacatgcctgtgtttatctggagagagtctgtttgtttccctgtttgccttcttaccagacttggagcccttcaaagccaagggctgtcccatatggatagaccttccccagtgtctaaataggaactgggatatgatagatgttcaataaaaattaaacaagagacaaaacaaaagtagggaccaatctggaatccagtaaccatctctcatttcaggagaagtggaaactctcaggaagttgaaaatactgggcttcagaacctgacctagtttgcagccaccgctcccctccaaaaacaatcccataagaattccttctgacccctgagatgagagggtcactgaggtggatcctggccttggaaatccctgttaggacctattgggaccttttacttgcccatcaccaccaccctaacattacattagaaaccaacttgggcttgaaatggaggcctctgagtttgcatgaaccccaaaatgcaggctcagattggtttcattgcaaaaagggaagttgcattccagttatctctgaataaaacttgtgatggtaaggacacagcccctacccctagaagtgaaaactggcaagtctccaggaaccaagaccactccaaggtccagttcttgcatcagcgaggccttgcttccttcttgcttcttaacaactggattccatgctcactcacggcttctcctctctctacctctggaatgtgcattgctgtcagagctgctttgtaatggctgcgtcctcatagcctagactctctctcctgagctttgaagcttcagtctgccctgctagccactaacagactcctgaatttctaagttcaggttcctacaatggaaaataagattgacctgactcatttcttcatgtggaatttttggctacagattggctgttgtttggtcaggccacaaaccccggtccaattgaccatgttttaccatattctcatcttgtccttagaaggttgcacagaggtgagttactgaccagaatgaacctaggcatggacatttaggaatttcctattaaacataaacacttcagagaagaaaagcatattccatcttaatacctcagaataaaggagcgtatcagcttcattccttttcagaggtacagcaggaatctatacacatcagggggccagttaatctgaaggatgagggggacgtctgaaagcagatgaggagaggaaaggaagaaggtagccctgaacctctgaactatgttcctggatctcgtcaatttagtccttactctctgtcaagttgatccattgacagattctcaaaaccaggtcaatatagagatatggcactcttacgtcttgtgtcagctgtatctgttatcaatagttttatgaatggcaccaccgacaaaggataaaaacctaactgcgattaggcaaggaaaatatatatataccagattttctggtcccccacaagtttcaccctagtgactgttctctgtcatcccacgcagggtgggctttgagaactcatcaatcctcttgtgagtttcagtcttgcatcttttctgggatctggctcaaacgtggctaatttcccagcatactatgttcagtacaagggcaatctgtcagcattcgtctgagcatgtttgtaaagacacataattcactatgaaaccaattcatttcagatgtgctttttcccattgcaccaaagccccgggttgatttggcagtttggtatattatacaaataaatatgtcgaaaatgggaagttaacaactgttggaacctgaggtttctgaaggacttggctctggtgtcaacttcagaaggtcatctggagaagctaagggatctgaacattcttaaaaggaagagaaatgctttagaataaaaggaatcctgtgtccacaggcaggcagagtctcgtttttgatttcctagggaacttagcacagtggagttccaatagctcataggaaatcgcgtttcacaaaagttacacaaaacaatacctttctgaggagtttatgttctaataggaaatacctaaaatatatttatccactttttaaattttattctaccttctctcttttaacactgatttacataataagggacagattaaattaatttcataatagaaatcttgggctttaaaaattatcttagaaaggtaattgtcttcatttggtgttttatgttccctaagtagttatctttgctgtttcttgtgggggttgctggcaattctgacttcccattccatatctcatttattacttcatttaggaaatactctttttttaatttgataggctgaggtctatttcctaatgactttcacctagttttaattttcagcaaaagaaacacttaagatataagtcataggtaatacttaggcctgtctgatgaatgacggaatctagcttccgctggtatttcatctttgacttctaacatgtaagaagccttcactttagtggtcatctctcctcctttttcgtccttgctcctttcagaagtgttcatctgtagcgtaggattcagtgatccccaagtgttttaagctgcagagctctttgttccgatgcttgtaattcacataaaggagataaaagtggagctgtgtgggctgaaggatgagaaggggagaggggggaaatggagccccaagttctagacaagcctccccccatcaactccttcatcctggcagcctaggaaaggttactctagcacaatttggaaacatctggctgagtcattttggcccacattttctttctgctgaattcatttgcattctcccagggcgacatacataaatgttttctagttcatgttgacatctttcagttattcatgaactgtgaccctactaccctgtgaggttctatgagaagctctgtgtgttgcaattctgtctgcattgctttgcagatgatgagttgcctaaaatgaatgaactggttctgacctatctaagtgtatcacatggagatgctcttgtctcttgatttcagtctaggtgacactcaggttttccaaaagttctctccctgatacacacattatttcattgtttcctgtgtgctaagcgcacacaggatgcaaagatgaataagaccttcccttacggagccctcagcctagccatgacgagagccagttatggagtccctactagatgtccattgctttacatagtttctatctcattaactttggtgcacatagccagtaagcgaaaggacccgggatttgcaaacaagaaattattctgacttcaacgctcattcctttcactgatgggcaaccctttatcttacctggtccctgccacggagaaactcacaggcagggccgggcagagaagtggtcagtgatgctctaaggtaacaagcacttcccataagcctggggtaggaggtgacatttgcacggggcactaaaggatgattaggagctcatcaggtggaaggagttgggagtggggctggagctggtgtctttgctaatgccttctaggggaagatgccaagtgttttagatttccattgcttatacttatctccagtttttagtggcctacttgaatgtcatttatattgtcatttacaccactccccaaggccaaatcatatctgtgttgcaaagttggccaacagggattgtatgaactgagccttctctggagattttctgcatgggtctgttagttcatgtatttcatgttgagaataaagtatgggcacgtgaaggtttgggggatattttacataagacattctcctatgtaggcatgaaaatctttcctgactccaatcctgttgctaaacagcgaggtctagcccagaaggcatggaggggagcagagtttctgggaaacaagaagaggacttggagccccagacaggggacaactccagagggtttcttggggatacctttccctacaggccactgaagacagcacggcagtggaaacatctgcatcacccaccctggtgtgtgttcccccgacaatctgtgggcttgttccacagctggcaccaaattctggctgagcagacagccccagaaatgtcacctggagccgttaaaaaaacataaacaaggcatctgtcacgctgccgtcgccaaggtcatctggtggcaggaggtgaccgaggaggagcatggtggtgccgtgccatcgagggccaacctgtgggcagacctgcctgtgccggcgctcccttgctctgcagatgcattcaaggatgtgaagttgtgcaggggccagacgtgagaagcaaaacaacctgaatgaaatccagccactttggagtgaaacatgagcattttaaaacatgattttcaaactgtcgcagggttagtattgcatctggtctcctctcatgattgcctggaggccaccagcccaaagctggagtgagacatgagctggagggtaacctgaacaccgaatttagggagtgtgttgttcatacaaatcactcagactgagagttagagatgggatttacacccaagctatccatcaaaccactatctgtgtgaccttcgacaacttatccatttcctctaagccccaattttcatatctgtaaattccctcctaggatccttgtgaaggttagataagatagtatgtgtaataatgcagggctgcagagggccctcagtacattttattttggctttctctgccctcacttacaggtgagggaacagatttagagacggggagttcatagcataccagcatcaatgatcctagcaagaactgtcgtactttcttcctccttccttcacttcctttttccttatttccctcataatccactccccttcccctccctaccctcagtgcacatgatattatgtttgatgggtagcttttggtttgtatataattttggcaaaacacattctttgtagaaatgtattctttaatttgttaaatggtttgagtttatacatggatgccttatgtgttttgtgcgtatttacatttatatttagattcctcttttttcttaagtactgtgtctatgttccctccctgttgctctgtgtacacataatcgattgcttattgctctgtgtatgcataaacagttgcttcttttttttttttttttttgagacagagtctctctctgtcacccaggctggagtgcagtggtgctatctcggctcactgcaagctctacctcccaggttcacgccattctcctgcctcagcctcccgagcagctgagactacaggcacctgccaccatgctggctaattttttgtattttttagtaaagacggggtttcaccatgttagccaggatggtctcaatctcgtgaccttgtgatccgcctgcctcggcctcgcaaagtgctgggatgacaggcgtgagccaccgcgcccggctgccgttgcttctaattgctgcttagccttgcatggttgcatccagtctgttccacaaggatggacacccaggttgcctccacactatccccatagtccatcttcttgtaattcttaagataggaccaaaagacatttatttacaagtttccctcttctattagacggtgagacagtgagagaagatttcctgactttatatacaaagcagctagcacatagcagtttctcagtaaacacaaagccattggcttcccaggcagctggacacatgggctcaggcccagcctcctgtgtccttggttcccaggaaaagtgacagccttaacggcagcactgtgattaccgttatcttgtcatgaaggtttatgacgagtaagggaagtgccttttaggaagagaaaagatgaaaagccttcccatgtgacgtatactagaattccctgaaacctgaaggccccacatgatgcacctgtttattcaaacacatacatttgagtactaactgtaagtgatagtgggtatggatttggtgaactctttgaatgctttcagcatttccccaatctgtaggagattctagttccttagaattggatactgagccctgtttgatgaaacttgctgtggcatttggagaggatgcagctagggttcacacatttaaccatggatggatctgtcagtcagtctcagttcatggtagacaagaaaggagatacatgctgacaagccgtgtaggaagtgtactgccttaagcagtgtaaacatctttattcctgaaaggcatatctgctaggttgattgtgaaatgtattctgtttttttttttttgttttgtttttctatttggagggtgagggatagcctactttaatatcagaagattttttttttattgaattgtggtactgagtgaaatgacctacctttacttgacctgcaacagagttgctgtagaccaggggtgggcaaattctttctgcaagaaccaggtaataagtattttacactttacggctacatggcctttgtcaaacctgtcacctctcctgttgtggtacataggcagccattagacagtctataagtaaatgggcttagctgcattccaataaaactttattcacaaaataagaagggggccaggtttggcccatgagccctggttttcctacccttgtttagatgctcatgcacttgctacacctggaaatcaacataaatatagtaggtccaataaggcaaaccagctactgtttcttgccagtattctctgctctctcttcaggacactctgaacacaatggataggagtaatatgaacagaaaacagaagaaggacttggactgtatcaattttggcttggttgtgcacgccagaaaacctaaaataacagtgcccagtacacagcagaagtttatttctctttcttgtaaatacagtttggagacaagcagtccagggatagcatggctcctcttctcacaaaagcctctgctccttctattatgttttctcccacgaagggtttggtctcatggttccagattgtagcaagcattccagataggcagatgggaaaaggcgggaaggagagggagagtaaatgaagagcgtgcacgctgacagatgctgcgacgagcttttccagttgctgcctgtcatggttagttttaggtgtcagcttggctaggccacggtacccagcttcttctcaaacaccaggcgacatgttgctgtggagttttgttttgaagatgtgattgataattcagttagcggacatggagtagagcaggtccccctctaccatgtgggtgggcctcgtccgattagttgaaggctttaggagaaaataatgaggtctcccagggaggaaaggattctgcctccagacagccttcaggcttgagccaccatcccaactcttccccgggtttccagccagctgccctgccctgcagacttcacatctgccagcccccacaatccaccatccttaaaaatctgtctctctctctccacacacacacatacacacactattggttgtgcatctctggagacccctgctgcgtgtgcagcctattcatctagaaggctccggggcagtgggggatctactccttatccacagcattctaatattctggagacacaagagaagggacatggaagggcaggcagacattaaactacccagaagcgatgtgtgcctgtgctcttattgcacctccacattcttatttttcttactaataaagaatttaaaatgaaggaagccccagatcacccgggtgtgattctctagccttttcccacttctagttcaagagatgtacccgtgttcttttaaccaaagaaaaaatcattgcatcctttactctagcagtagtgcctgaagcatggggtgaaggtgatgagtgcgttagggcctttgggaactctgtcccagccaaccctcaccgtccataccctgctgggagggaaagctgtggccccggcagctctcttggtttatactcccaagaggaaactcttcctctcgaagcctgggggagggacagactttggaccaagttcactctcccagctataatttgaagtgtggacaaaatgggcccagatgttcagccttgcttgttgggcctggctctggtctgcgttctcatccgcgagaccctcggcctccctgcccacaccaactcgccttgggtcttctttgagacattcttactgaacaagaaataattccccagggttagattactggacacaggagaaatgtgttctgcaagctgaggagaattgaatttggcttcagggacttcctcctccccaggtgaggtttaccagtctgtaaggatctcacaggtgatttgggtccatttttggtgcactttatttctcttcctagaccctttcctctgtcttcccagacccttcccctcaaaggggtgctggcgttgggttgcccacggctccttgccccggtgagccctgaccacgcagacccagcagcttccagggacctcagcatttaagtaatgggcgtgcaagagaaaaccaaaaccaaacccaaacaagcctccaaatgcagggagaactcctcagtgggagctggagagttctagttgaaatgtctgaggtgacagtgagcacgcagtggtcgactgtcggaaagctggtcctcaggccagaaaactcatccacagttccatcccaacttggtctttttgtatgagttgaagaaaaagtgtgggttttttgttgttgttgtttctttctttccaactagtttctttggatcctggcatgactccagaagaatcgtaccctgctgccccacattcatttttatttttaggggattgtaagttagaagaagtgacttctcttgcagatggcaaagacttacaatccaaaatcatcacaactcacaatttaaagacattttgatctctaccttcctgagcaaatcagccggcaggcctatttcttgtagggctttcgtctgcacatagtaggtcctggataaacacttgctgattaaatgatattcgaagcaaagcgactgcagctgattgtctacttagggcaaggtgagtgtaaatcagaagggtgagaaattgcatcaggctgcggagggatgcaggcttgcacggctacaaacaaacctaattagctgtgcctctgccagcagccctactcagacacatctggaggggggagaatggctaaggctagattggctttcccaagtgaaaacgcctctcttcagttgcacctgcacaggactgattgcgcctcaaatccatttgtcaggctggttgcaggtatctgagaaattgctaatagaattgggcaaaagtgcccgtgggagtgggaggtaaatagcatggcaagacaagcggctgctggagtcccgggttggcaggtgggcctgcccccatgccccgccaggctccagggggtacctatgcccagtgactacagagaagacccgtcttggctgagcatcaggctctggtgcagtctttgctaagtgtgtttatcggccaccacgagagtacttagctgcaaaatggaggtgctttcactcacagacaccaggagccttcactagggaggcactgagatcagcactttttccaagatgctccttgcaaggtacttgtgctccatcaaattgcaattcttcctagacacaaagggaggcactggcccagagtcaaggtcatagcaagaccccttgagctgcctgtttcttagcagaagctggagtagacagacatgacttgagacgtcttaaacttgtttggagaatttgggactggatctcccgcccaagcactttggaggggtctgaagagacacaggacgtgtgtatacgtgtgtggggatttggggctgtgtgtgtgtggggttggggcaagggcttggatcaaacatctggatatgaataccaactctgctgttttctgctgactgtgaacttggaagagtttcttatcagttcaagcctcacttccctcataaatgaaatggggatagtaatcattattatgggctgttgggtcccccaaaaatccatgtgttgaagtcttaacacccagtgcttcagaatgtgatgatatttggagatacggtctttaaagaggtgaatcaagttaaaatgaggtcctatgggtgggccctaatttaatatggctgatgtccttataagaagagagattaggacacagacacacacaggcgatgttatatggtggtttagggtctagactgccaaggttcaagttctgctgtgacttacttgctctgagtgaccttgggtttcatattaaattttctgaatatcaatttcctcacctgtaaaatgggggaaataacagtctgcctcatggtgttgctggaggtgtgaggtcagatattaaccatctggcacttccaccgctgcaggtagcttggccattgttattgttatgattaagggcaggtgagcatgtagtgtctttctttgctaagtatgtctgatgccaagtcagtattcattgagcacctcttctgtgcaaggcgcttggaaaggagtgcagtggctctttttccccactcttgcccctgctagattcatcctcaagtcttctctgagttgcttttcctgcagcccgtagttactgaaaaccataatacttatagatgctgctttctagaaatgagcctgtaaagtcttgtattttctcttggtctgcacaactttagggggggtaacacgtcctgtatttgccagttgttaaccttctctttgaccacggagctctagatgatggcaccgataatgcccaggcagatttagttttgatctccaatgaaagataggcctttctgtatttgcagtaataagcaaacacctttagcttgagaggataaacttaagtacaatgtttgttctctggaggcatactgattaactttaaaatatgaataaaaggcagtcctatttcattatggtaagaacacttaatacaagatctgccctctttttttttttttttttttttttttttgttggagacagagctctcacccgggctgtcacccagctctgtcacccaggctggagtgcagtggtgcaatctcggctcactgcaacctccacctcccaggttcaagtgatcctcctgcctcagcctcccgagcagctaggactacaggagcgtgacaccacgcccggctaattttttgcatttttagcagagacggggtttcaccatgttagccaggatggtctcgatctcctgacctcgtgatctaccctcttaacggatttttagtgtgcaagttatctgtaggtacaaggttgtacagcagatctgtcaaacttattcatctcacataattgagactttatgcctttcaattagcaactcctcacctcccgctcccaccagtcccaggcaaccactaccctgttccttttgcctccgtgagtttggctactttcaaagcctcatagaagtggaactgtgccgcatttgttcttctgtgcctggctcatttctcttggcatctttcctccaggttcattcatgctgtcaccaatggcaggatatctcgctcttttgtttttaaaaacagccaaagtcaagtatgtaaaaaggtgggcagctgagaacctggtaccagaatgttccaaggaaaggtactgagtggcacaacctggcctggttctccaccagtaattcctaaacttccccacctggaggctcctgatgacagatgggtgaatggcagagtagatgagtgagggaggtggggagccccggtggggcctggctggtcaaagtccaagcaatctgatcccagcaggacattcctttgaaggatcatgtatcactttacaaatatccacaagctttgcactctatccatatttgtttaggtgtaaaaaaatattttaagctctttactgagaaggaaaatgggatgcacccacatggattccccagcatgcaccgctgagcattccctgtggtaccgctcctcagtttagggtttaggtcaggggccctggaatcattgaaggagacctgtcttcctctcgtctgctgtcttcctcctggatatcacccctgggtcaagcccatggtctcagtgggttagcaatgaatccttcctaagatgcgaacagatgggagctcaacatttgacccatccctggggttttagtttttttgtttgtttgtttgttttgagacggagtcttgccctgtcacccaggctggagtgcaatggcaccatctcagctcactgcaacttccgcccctcaggttcaagcgattctcctgccttagcctctcaagtagctgggattacaggcatgcgccgccacgcccagctaattggggttttaggtttaagaggaatcccagaaggacagggtgatctgaggtcctgagcaactctgaggctgaaactgcgctggtctactttaaggcaggggctgtgattttccctgtgactgaggtcctccaggggtcaactgcatttcaggtgtgtgaggggagagtgactgcccacctggctacccagcccttctttctgagcctgtttactcagctgctggggcctccatgacaggtttgcttggtgaccttacaccgcagtggctcccagggccagagacgtgaccaaggagggaccttgcactgaggaacctgtgaccgtaggaagaccctctaaggccgactcttgcttggcccggcccagtccctcctaccaacactgataagaacttaggttcctagcatcccaggaggcagggtcacaaagacaagctgagaactgataccactgctatacccacccctggacctccctgtcccatgcaggagtctaagccagtgcaaccaaggccaagcacacacccataccacacagcaagggtttcacacggggttttcatttctttacccctggccgaaccatgcaagctaccagccatctacccagacttcttagagtctgccaaatacgtactcagaccagaattaagttcaggccatggtagaggtgaccagccactctgccgtgacctggattcagccatcaattccaaagaagcccacagtgccttgcattttgctggctggtttgtttttgtaaaatgatggggtgggaagcagtgctgggcattggaaaggggctgaacaaggggaaatcttcaacaccttttaaatggaagcatgtctagttggcctcttttctgtaaggaactatactgggcatcacagagatgcaaagactagagtgactgattcaggccctggcctgaaggactttattattgagagttccccgtatatataaatggctgaactctcaggccagtgaatgcctgtgaccaagtgccaatgggtgaaagtagaggttccagaccaggagtgggaaatgcatcaacagagagcttggccacatgctggcctggagtgcagagaaagagtgccaggcctctgggcactgagttctgagctgcttctggagggccaggagatactcccacctgcaaatgactggctgattgcactttccttagagtttgccacctgcatttccgctctacccactaactgactgctccggtgcagggagccaggcaggggcagtggtacctgggtcaggacacgacagcagcctctggcctcaggcagggagtgctggacagtccgtctcctgtcctgctttgtctctttctccttgagctcaggacacagtggggagccctcatgtttctgtaaggtcatcacacaggctggaatgttttttttttcctctctctctctccctgtctttcttttaatggacaaacacccttgaggtcctggttgattttcttagagaaatgtagattctttgattctaacgatggaacataagttttctgaattttgaggaaaacaaagcccaagatttcaacaaccagtgttcctgccaaatccactgggcaaacagaaaagctgcctgcctccggtgctcccagacccccttccttctcaaacacgcatcagacactttgcaccaagaaaaaacaaagggcatccctcctggggccacctctgccccctgtccaggtacgcgctgtctggcgcgccctgcgtgggggccgcaggttcagacacccgggcgcggcgcggggccctgatggatgcggtgaccgaggctgtggctgcgggcgcggcgtctccgcggcagtcgctgcctccgcggccccctccccagccccagccccagccccagccccagccccagccccagccccagccccagccccagccccagcccggctgagcgggcggccggagcatgcgccgtgggcgccgggccgggaggcgggcgaggaggcagcgcgcatcactcgggtccccttcctgcacccagccgccacttgccggttgctaagcagttatcattgtttctgtggcgattgcagaggctgttgctaattggagaagccccactaagcagcggcagcttcctgcttcggatcctctctctgctgcttgcatttaaagagcaaactcgtcttgtctacccaccctccctcccccatcctccccaaaatagccttgtgatttcggaagtatggactaaaatcacactcctccttaccttaccgcttggactctggtggctcccaactcgccgtcagaccccacctgccccggtggtgggaagcgcctggacagaccatgaccacagccaaggagccaagcgcttcggggaaatccgtgcagcagcaggaacaggtaatgctgcttttgggggtccgtgtgtgtgtgtgtgcgtgcgtgtgcatgcgtgcatatgtgtgtgcatgagagagacagagacagagagggaggatatgtatttggggaagaattttgtattttgtattggtttatgactgtagccccctgagccaccaagctgggaggagacgtagagtgctgggtgctgctggagtctgcggctctcctctccctggcttctctctctaaagggcgccctggcttgatgattaaggtacaggcacagggaacctctgtcaaggtaaacttgatgtgaaacacctctggacaaaggcctctctctacagagccgccagatctaacgagttccctgggaaggttcccagctagtactttgtaacttgggggaagagggttgtagccagaaacatcagcgtattctgaccctccaacaggactttgctttggttctaagacaagtcaaagaaaatgagcttactgaaaggacttttctttggatacctcgtggccctttcctcctgtttccctcaagagcaaactgtccctgctagagaagccgaaggatagacggtcgggataaaggaggactcggccgagaaggtgcaggtttaaagggctgaccgcggacggggaaggctgcgtgggtcccacatggcacagggcggccgctcgccttgtcctgagaagaccacggtctgcagaggcccaaggggtgagggaggaaaggtgagtcagccagccgcttcaccacgcgtgtagacatcgtaattccctccttggaagatcttgagggttcttgtcttttaatcattgctcagttcacctcaggcagatcattaaaatagatcctgggagacaccaatagattcacaaagcagtttgctcaagcgtggtaaatcaacagcttaagctgacttctcctatttattttagggttgctgttggatctcatttgctaggattagggcaaagataggcgacctctttagagttcaggaagctgaagagcctccttgaggacactgtgtgacagaattccatgccaactcttcagagacttacacgaagatgagtttggatttgtatttagtggggtcatttcccaaagcccatttatcgataaaagggggccattttattagtaccatcattatcatcatctaaagaacttaaatgaagttttatgtcatctgggaagaagattctgtaaatacggacattaaaaatttttatattcagtgtgacagtgtgcataaggattgatgctcagtatagcttgacaggttcaaaacagacaaaccaaaccctcctcctttcaaaaattccacagaatatttgctcaataaagaaatatttccacactaaattagcattctgtaattaactgggtttctttttattacagttctcctccctcattagttatgaagtaagtgtgcgatgggctttcaggcttgaactaggactcaggtagcatccctgaccatgggagagaagtaataattacgaaagagtgcattgctgttcataggtctacacccgatacacccaaggattgggagtcagaagcccaatctgtgttatgtaaaagaaatcccttgtttcctgtacaaatttgctcttattttgcctgatacctgagcatgccaggagagtgggaatagttaattagggtgtgggttttggaggacctatgagctcttggtttgattttatacctttttgtcattggaaatcccatgtccttgaacctattcaatcggagaaggcttaaactgatataaaactgaagagcagaggcagccatggctacagcgagcaggtgggacacccagaagaagcagctgtcctcatcccatgcagttgtgaagccgctttttctccctcctcagagaggtgtcacctcaaccctaaaaaatgaacagcccccacccccaccatgaagtataatgaagaggggaacagcagagataagataagccagatgggacagggggtgaagaccccacatttcaagtgtatataccttgaggagaccttacctggggtctgaacacactgcttagaacataaagaggtaaataacctcctaaaataaaatccctaaagacagtctcttattcctgcattatatataattttgaaaggtattaaaactatgctgtgtgcttagactgcagaactcttaatgagttctccattctttattttattttattttcctggttgctaatgaaacttcagggatacctctattcccaggctggtaggcatgtgtagggagaccaggaaagaggaatatgtttctttttttttttttttaatttattttttgagtgagagagaggattgctgctttgtggattggttttgaagcagggggtcattaaactgtgctaactcaatgactgcctgcaaatcaccaagtgttgattcttatgagaaactcactggcacctcacatcctcatcttgtgaggcattaaccagagaactgggattgaatggagcctgatgccatctccgacatccttccagctgtttggttactgcaatagactacccattacttcttagcaagtgaacagaggaaagtgagtttctttaccagccttggtatttggaaaccaggcatatgggtggtgggtggaaataatttttgtgtgctgaggatggccacaaattaggggggaaattagaaaaaaaaaagattttactattagttagagattgttgttttttttctaccgtgtttgctaaaaaaaatgtgtaaaaagagtattttgggatttttggtttgttttttaaaggatactaaataaacaagccagagtaacaaggagaattggcttctgggagactatttctctttctctttggagatgctaaagtttatttttaaatgaagtattgcaaacccagagatgtttggaagcaatatatactttaatctgcatgaactgagttgatcctttggctctgaagccaatcaggtgatactgagactcctcggtgaaaatggctgagcattggctgcacctgacctctgctcctgcgcagagggaagcctggtgagggacccagaaaaaacactgaggcaagtctggcttaaatttactatattctcacaagccaacggagctcttccttagaaaaccaaattaagggattttttttcccttaaaataaataaaagtacaaatttattgtagtacatactgtctccatttcaaatgatttaaaattgaaaagcagtgatcagtaaagctattaagagaagacgaaaaattaattccctctgcttgcaatgagccaggacacatttttgctcaaatattaagcagggataagtttttcctagcatattgtgtgcatgtgtatgtatgtgtgtgcatgcgtatgcacacacaaacaaatgcacacacgtgaacagtcacacacaggcacacctcgtgtgtcacaaaatcagagttggaaaggaccccacacatgcactcgttggtcctagttcatgctctcgtgctgaggaatctcacaaatgtgtgagaatatgcctttcctcaaaagatctccagaaaaacctcctttcacatggaaatagcctacattccactggctaacttggatctttggttatatgttcagtcacatttttaacttccttagacctgaaaatcagctgttctcatcacaccttgtatatgtgactgctgttttttgttgcttctcagttttcttcaagttgtacaaatcctgatagataactccccatgtgtctgttcttctattaaattatgagccccaggacctagtattaacttaaatttggtgtctgaacatatataataatgccattacagaagaactttttgaaatgaatagaaatttttaaacaacagattccatagaacggacattgaaatgcatgtgaattctgggagaggttaggtggcctcccggaagggcacataggtaatggcccagtaagagaatttctgatgttcctgtccgctgctctctgattttgatcttgttgcttcttgcagtagatactgaaagagaggatctaactttgaccataatgagagttaaattttttatgtagccatattaaaaggcaatgtgagacatccgtatttaagataaatgtggtaacaggaaaaaaaagaagtgaaaagaacacagaaaaacaagattcaatattaggaagtgcacataactattgaggagtcccaatagggaaggtggtccttttgcagttcaaaaagggcatggggtggggttggtggccctttcacagttcacacggacattggatgtagcagccatgctcacgtacagtaaattccatctgtgcatggtctaaattatctaagactctgtagataaaaagaaaacttgaaggaactgctgaagaatagggacaccaggttcttaggattgtgtagaagtacatctgggactcatggacttccagagccgggagacaggatggagtttggctgcaaaataggctgatgtgtgaaggatttgaggagagaactgggaagtcttggatatcctacagagagcaggtccagaaccagagctccctactgggaacaccagagtgggtccttgagctgatggggagcagcatggagtctttggggaagggaaagagcttagctggtgtggtgctatcctcagaggagggatgttttgcttgttaccaaagagaacaacatgatgaggaagcaagcacgcaactagcctggaggcggcatgcgctgtgctctgagaactgacaggtagttcacaatcttttgggatccgtgtcaccaacttactaaaaagtgcaaatcagcaagtgccatttagcacatcaaatgaaagcccaggcaattgagagcaaggacaaatgatacccagattggcttttggtgcaacccaaactcaaaacaatggaaacagtgtttctgtttggttttgttttttaaaatgctttctctgtgcattaaatgcattttgttattttattctgacattccattaaaccaaatccagccccctcattctcaatactgtggttatcagggcagatatactcaaaaccttcaaatgctccatggagaacacgtgagggctggagggtgcttttcattaaccttcaccgaaacatcttagctccagcgtgcacgtggaaagtgttaagatgctaatcacttagaggaatgaacagcgtgcacgtggaaagtgttaagatgctaatcacttagaggaatgaacggtcaccgtctctgcctcatcgggaattgtagcgttattatcttttatggaaatgagctgtgcctgtgtttggcactcactgatctagttttgcagtaggcatcatgcaccctctgtcattgagaaagagagggcagagtgaatctgtggatccagagttctaaaacctgaggaagagtatataattcggggagaaagtgattctctataagctctgagaggtcaatggttgacatccttgcttgtaaaagatcggacaggtagggggtgtatcatcttgtttcagacactgtttggaaaaacaaaataaagtggttttatttgaagatgtaggcttggttaccccatagccttaaatcatggaagtaggtaaccatgtcaatttgcatggggagccgcgtgcagtggctcatacctgcagtctttgggaggccgacgagagaggattgcttgagtttaggagttcaacaccagcctgggcaacatggcgaagccccatgtctagaaaaaatagaaaaattatccaggcgtggtggtggcgcatgcctgttgtcccagttactcaggaggctgaggtaggaggatcacctgagcccagggaggtcaagtttgcagtgagccgtgatcacaccgctgaactctagcctgggcaatggagtgaaaccctgtctccacaaaaaaaaaaaagaaaaagaaaaagaaaatctgggtgggatgtaaattgcaatcctgtttgttggtgcaattctgcatgtggctgatatcctaaagtccttcctgactttgatagcatgtgtttcttgaagtggggagtggagaggtctcaacacacacagcccaggtagaatgatcaaatccagaaagtttattctctgtcctactcccatccccatttgttgttgacctttcaggactctttacttctacatcccgggtaggcccttaatctccactggtacccatggtttagcaccattttctcatacttgactcttctatcaaaaatgctccatgtgcttttccacctgggccttgctaaatgactgagacaaatccattcattaaacaaaaagtgtaaggtgggtgtcatgcagtactttcctgagagcatttgcaatttcaacagtagctattggtgataaaacccaatgcaattattaatggtggaaatttcaggcacaaagttgtggcaagacctgatggaagaaaaaatatttagtcacatcgttaaggaataatgaaggtgaggtcacagcggggacagtcttggcaccccttaaatcatcgacaggctgtgcacatcctggaggtatctgttcattctgtgttcacattagagctggtcttgtatcaggcaagtaccaaattacagatcctgttgctgctttctgctttcaaatcctgaaggatttgatagtaatagtgttgaaatgtgcagcgattccttcttaggaaaaactgccataatatgcacaggcatggagtcagtgctgtgggtcccctttgatcctggtggctgggatcctgaatgcagccctccaccaatggctttacaaagcacgttgctgatataatgaagtcttgctccgcaaatttttagtgacaatgtatgtaattattcctttactagtatctgatccatttttaagaaatttaacttcccctgccagaattcaagaaaaactgctttccccagtgtggaactgcacgagactcaagcgtcacctcgagctgctaagttattaatttggaacacaggcttttaaacaatatctgtatgtgcgcccatgtatgtgtgggcagagggggcgatgggagaccagccaaatctgctgattaaaatgggaacaccgtggtgatggcggggctctctcaaaacactttaaaaggccgaagtccatcttgtggacatgctcataagatttctcttggagacaatggtaattcattctcttaaaaaggattggttcaaccctttgagtaggctacccacagcaagatgtgagatcagaaccaaaaaatattcaaagcatattccatgttttgtcttttggaaataatatgtgacagaggtggtcttgaatagtaatgatatatgtttccaaattaatgaaaataagttatttctttattctctagcagtgattcttgaaattcttcattctttttagaatatttgaagttgttatagcattcactctaggaattccaaaattatgacactaagtatgtatctcaaatcaggcctctgagtgggaaagggaaggaaacatatttttaattttaatagtctgcctaatatcccatccacttattagacagatattggatccaaggaagatttttattttgataaacagtaatgggagagccaaggtagggggaaaggagagctggatgggaacagctcaaggtcaggagagagcagaacagtccacagccagggtgcctggacccaaggtgcagccagcggtctgctggagaaaggtggaatgtggctgcaggggcacacagagatggtttgggaaaacagaaacaggaactgtgatatgaaagtgttttgaaagcatacaatggaaaacagcaatgggcttgtaaagttctagaagggagggaggaagtctgaacgtggcacgagaggctcttgcttaagagaacaggtgtttgtggaataggtaaaaccagaggagtgacttggacatcaaaattttattttctgaatgtgattatttaatctaggcatgttttgataggtgaaaaaagggactagaaacttctggctttcaaagagcaaaaagagtttgttatttcacaaataaattcaagtttacctagaagcaacaagatattttaagatatggtatatatatatatatatatatatatatatacacacacacgcacgcacacacacacacacacacacacccttacatatatatgtagtacttcctggaatagcctgagaaagaaacatttaggaagactcaatataattattaatacaatttctggctctgattttgatgagccagatattttgatgttcattttgatgcagtctgccatgcctggaacaccaggtcatatggtacatatgacttggttaaagaagagattaaccaataagagaactttggcaggtaagaactattttgccattaaaaaccatgaagctgtaacaacgtctcaaaagctcccttggtgcattttattaattctttctgctcattactaggcttgggatgatgaagacctgacccttgacttgccaatagctaacttacgggggagttgggagaattgctgtgctttggcatggatgcccctgacttctgatccgagctcctccacctgctagctgagggatattggacagttctggactgattctgtatctatgaaatggggatgattcctgtcacgctgttgctgtaaaaaacaaaatatagaaacacggaatgctgttcttggcatggagatttcaaactattgttcagtgaacacctactatgtgctgacatcccaatgctacttgaatcttcttattttcagcatttggtcagagctcatgtcccatttttaagatgatttgttctacaaaatcatagaatgtttgacttttaaagcttcttatagcccctcttgcccagtgatttttggacttttgttttagtaacgtaaaccccttttccaaagggcacgtcttttccaagattggcatgtgaaggtggtgaacgtgctggcttagtgcccctgagacgtgtcagcagagccccagggcatgggggagcccagctcacaaaccacacatctaattcagcagtctaatcttgcacaggagtaaaaccaagctcagagaggttgagtaaattaccaaaatcatgcagctggcaagctgcaaattcagaacacaactccctccttttttttttcctccaaatcaagcaatcctgagtgaaacgtgggaaatataatatgccaagaagattaacacgaaaactgttaactggcagctgcaaaggaaataaaggaattagataatatgaatgggttaacaaattctcgcctggaggtcagttaagaaaaggtttgtgtcctccaggtaaatcaaacctactgcggtttttcctcttcacatctcatggacaaacacagccatttcttctttttattgcaccagtgctggatgcatgaggttgttcgtagcaatctgtcatatttgagtaattcgttatttaatgagttgcttttgaaacaaggaaaataatgaggatgttaccgttgtgtatctccccaatttttaaaaggaagcaacaaatagtaaattatgcatgctttggaagtatgcagtagttaattttcaatctcatcttacagctgaataacctcaaaggtagtagttatacaacaggtgtgggaatatgtgagtgtgagggagaggaatcccaggacatcacctgtacacattgggggtttggcccagcagggcttcagatgttgaaacatctggaaattttatttgctcacaagcttaaaatgaaccaaaagtatgttgcttattaacacttttgaggatctgatgaaagccataggactgcttgccagaaaaatccctacaattttttgagttcctaaggttcacattcccttcatttctgtctgtggactccaggttgagcgtctctgtggtcaccatggtccccagcaagctagcacagtcttaagacacatcagtaggaatgtactcagtgctcaaagcttacatagatattgaccagcagccatcacctctggggggctgtgctagggaggcacagcatgtagaagaggctggaatgggccagggagagtggtaagggagcaatgggtaggagatcccagaagtggtaggtaatggaccgtgatccatgtcaggtgattaaaggctaaaggaatatggttctgtcctcaaccacatggtggcctcagcctgggatacatgactgtgtcttcctccataggggtcagtttaactaagaaccccaagtattgaagacctcaagactttaatatggtacttcctgtaccttgacacacatatataagcttctgaaggacacaaaacatgccacgttacttgttgtatctctgacgccaagcacaatggtgacccacttgcttgtgtgctaaatgaatcagtgagtgaatgaattgtgtcctcctctctaaacctcctctactgagttatacacaaagttgagggtctgtggttttactatttattcatcgaatgaaccattgaacaaagtaatcaaattttcagagccctgtagagaaatcaaatctccctctgaattgctaactcaccttgctttccctattgtttaaagtgtcatagccactcttcctttcccaacactccaccctcacctgtcctacccaaaaacatttctctgctacagaagcatgaactattcactccagccaccagccatgcatcaacattcagtcttgctgtgattcatctccataagataagtgaatattctctcatttaccaactgtatagataagaaaaccatcagaaatcaaagaactgttgaaaaatgggcattttacatcaccaaagcccttttttgttgttgaaacagaagcttcaagtcttctccatccactgaaatgagttgttgaagtggaaaagtaagttctaattgaaccaccttctccgatgcagagaaaaagcagacttgaacaattgggttgatcttctatttctcaggttggagaagtgctttgaggaaagaaagatggggaatcaagatcagaggaatgcaaagttctggaatgtttgcctcagttgccctctactgggtctggcttggggaagtttgtagaactttttaatgagtcattgtaggttcaggagagatttcagatgtgggggacagggtgaaatgctttcttacacagaagtgaatgagttagtgaaactgtagcacgtacagtttgggagaatgggggcaatggggggattgtggtacgggagaaggagcaccagcctgggattcagacaggtctgagtttaaattccagctctggcacttgctaggtaggcagcgttggacaagttgggtaacctcagtttccaccttgagcaagtgcttgactaataacagctgtgactgttaccagtatggtaattacagtatcccaaggtgtaaagaagcagaagcatgattatatgagttgggtcaaagatttggctgtctccctgtccccccaccaatctggctacagggcagactttgctaaatagacacagatttacttccaatgaagtgggtttgctgcactgaataaagtagtttacttttccttcactgcagctgtgcttgaaattggacagaaagccaggtgtggtggctcacgcctgtaatcacagcactttgggaggctgaggcgggcggatcatgaggtcaggagattgagaccatcctggctaacatggtgaatccagcctgggcgacagagcatgactctgtctcaaaataaataaataataataaattggacagaaaataagatagagttgtagcaattagtctgcagtttttgactttattaaattcacttagacatgtggctgcaccattatgctaaggtacctgaggctctactatggtgtattcattgtcgaaaatgtgtttgcgatgtagatacttctttcacctagttctatagtgatactattgggaatctgaagttgtcaagcagctagtgtatataattgcatgtaaaatagactgtattttgtacttattgaaatctaatggtgatacttggttttagattactgaatgtagattctgaagaattatggccccagtaatgaatggatgtgtaattagaatttttatcattattctgtaacatctctgctgaaaatttcaggtttatataattgttttggcttggcttgaaacacaaattatacttaaagtaacagacagtaattgagaaaattatacttaaaggaacagacagtaattgaatccaataaaaacaccaaagaagatcaagattgctgtgagtggagagtctggcttgtatattttgcgaacctcatggcttgaatgacatattctcaacaaatgcatgccaagtaaagaaaatactgactttatgtttttgattcaaatattcatttcatgaaactccaaataacttttagtgatatggtagtttatgtgttgatccagtgttttaaattttaacaatatacagagaattcctaattacactggagattttgaaattttcaaaaaataaaattttgtataagctttaccctgtgagggaatcctcacttctggtctcaaatcagctagtgttgggcattgaaaatattcacagagattatgtattaattatatagttgtacttagaaatgtatatgagagttgttaatgacataggactcaatattcgtctccctcgttctcactctttgtatgcttaggaatgccaattacttcctcacattatcctgtaaagaggtataatcgatttagagataatgagagtgacctagggaaaaagttattaagccacaaatcaattacaccctatcaaccacaccctcacttgctctccccacctctcttccagcccccaaataccaagaccaaaagcttggaatcacttcatggaaagtcctttgaaaatgatttgtacactgataaaacttcttggaaacataaatcccttgactgatacttgttgagcaagttaaagatgtcccagttcacacctattgcaacagaaccagaaatcactgaaagaggctaagttgtacccgtaagtttggaatgcagagctgggtttctgtcctttgttattcaggatgtatttctttctttcttgggctcagtaagtagagtgtagtaacagtgtaatagcatttgtgttcccaccttcccacactataccccaccccccccaagccatggcatgagcttatatgttagagaaaaaagaaacagcttcggagaacctggccattcgagggccatgctgtctggtagcttctgtgttggcagtgaggatcattgatgtgggtgatgggcttatgcccaggcatgtgtgttcttcatccagcctaccctcctctgcggttctggtttagagtgtgttggtttggggcagtgtgatgatctttatgtggcccccagggccagcagcaggaggtgtctgccatgtcaggggagagtaatgaagtctggacaccatggaatgcctgtgtgcagcctctctgcgcttgtcctcatgaacttctccaacagtcttactgatttttttacaacaaaaattatacctaatgattatctatttcatgtacaaacacaaagaccattttactgttaggattgaaataaaactttttttgtcttcaaattgttttgctctaacacaggcgagatttttatttttaaagacaaggttaaaactctttttctctgcataatttcagtgtctagaatagagtaacagtcctgctttatatttgtataacgcttagcaccagtgctaacaaaatgcaacatgagactgggcatggtgattcatgcctgtaatcccagcactttgggaggccgaggcgggtggattgcctgaggtcaggagttcaagaccagcctggccaacatggtgaaaccccatctctactaaaaatacaaaaaattgctcaggtgtggtggcgggtgcctgtaatcccagctactcaggaggctgacatgggagaatcgcttgaacccaggaggcggaggttgtagtgagctgagattggaccactgcacttcagcctgggcaataggagtgagactttgtctcaaaaaatatgcaacatgccgggtgcagtggctcacgcctgtagtcccagcactttgggatgctgaggtgggcagatcacgaggtcaggagatcgagaccatcctggccaacatggcgaaaccctgtctctactaacaatacaaaaattagctgggcatggtggtgggtgcctgtaatcccagctacacaggaggctgaggcaggagaattgcttgaacccaggaggcggaggttgcggtgagccgagatcacaccactgtactccagcctgggtgacagagcaagactctgtctcaaatatttcaaatatatatatatatatatatatatatatatgcaacatgaactactatgtaatttaaaaattttactagccacctttaaaaattaagaagaaacagatggaaatgattttaccatgtattttatttaatctaatatctcaaaaatctattattccaacatagaagcaatataaaaattgttaatgaaatattttacgtttgttttttccactccgagtctttggaatggcatgtgtgctttacactgacggtgcctctcacttcaggccggccctgtgtccagtgcggtctccataaaggactctggtgtccagaagttcccatggccgctccattccgtacttggttttcacaaaaactgtctcctaccttctaatgtcctcaattctacaggaaaatgagaatcatctccagacagtagaaactgtatccataatccatattatgaagagataaaatagccaattgtactttgtttttttttttgttgttgtttttcttgagacagaattttcctctgttgcccaggtcggagtgcagcagtgcgatctcggctcacagcaacccctgccttccagggtttaagcgatccttctgcctcagcctccctagtagctgggaccacaggcatgtgccaccatggccagctaattttttgtacttttagtaaagacagggtttcaccatgttggccaggctggtctcgaactcctggcctcaggtgatccgcctgcctcaacctcccaacgtgctgggattacaggcgtgagccactgtgcccggcccctattgtacttctgtttgaacttatattggcaaatgtagtaattttctagagttttagaggaggtagtgtttattattataaatatttgctgagaactttctgagcaaagggtactatttattctatataaatatgtactgagcatctgctagttatttaacagacttctaggcacaaaggatccaatggaaaaaataagaatattcatatttaacagcttctttgtgctctaggcattgattattctctgcattgatagaatttacacttgcagctttcaccaaagaaaatgttccacagtttaggcagcatggcaaaaatccatctctacaaaaaaataccaaaattagcaggtggtgcatgcctgtagtcccagctactcaagaggctgaggtgggaggatcgcttaagcccaaaagatcgaggctgcagtgagctgtgattgtgccactgtgctctagcctaggtgacagagccagaccctgtctttaaaaaaaaaaaaagaaaaaatgctataattttacaaaacctgctctccatgtatccctctctactctccttaagatgaacactgggtctggggtgcaggggtgccacagctggagttgaagaggaagttaggagaaggctaggaaccatcacggagatttttcaccctggttccttcattattacttgttggggatcagtgaagattagaaattgatgatggcggccaggcgcggtcgctcacgtctgtaatcccagcacctttgggaggctgaggcgggcggatcacaaggtcaggagttcaagaacagcctagccaatatggtgaaaccccgtctctactaaaaatacaaaaaaaattagccgggcatagtggcgggtgcctgtaatcccagctacacaggaggctgaggcaggaggatcgcttgaacccagaaggcggaggttgcagtgagctaagattgcgccactgcactccagcctgggtgacagagcaagactctgtctcaaaaaaaaaaaaaaaaaaaaagaggaagaaattgaacatggctttacagaggagcttctcttccctgcaggtagcggccttagacccttgtctaaggcaaaagtgggatttagggaaagatactgtggtagctgacacagaattgcaaaaggctgaaaacccccgccagcgaagggcagcagctgctcccctcctgtgggcactctattgccctcatagagagaaggcatctcccagcactttctacaaccacacccccaacccccaacccccaacccccagcttagttctctagaagagcagaccctcaccctcccccacctcctcagcccagcctggaaaggcccacggaaggactctgccagccctggctaaagttatgtgtccacctctagagcagccacctggcctggggacgaagcagtatgagcccacattctgagttgtaaaaccccacaattaggaaatagacttaaagtgctcccatcacattaggatgcaatgtgcatttttgtttgtagaagcttgttctccatttcttcttatttgggcaaaataagctcagtttgactaactctgccatctctaacccagaccccaccatgctctgacactttgacaagcacactggatgggcaaaagagtcaactaccgaaggaagacaattttcgtttggtctaaaactttatacctgtgatattctgtgccatggagagactcgtgcttaataattcactttccaatgatcttaggcaatgtagaagattacaaatactgtgagacctgaactcctccttcagggaacttaacagttttcagtggcgggggaaataagagtagattcctgaaaccatagcagcatccgatagaacagaacatttcctcgactctagcaaatctcttaattccaggtgtactcgggaagatagtagcatttattgggtatatactatgaagagagaagtgtcatatcctgagagggggtttataggcagtaaacattgtagtctttgccttcaaggtgtttgaaacataaaacatgctcacattagctaaatatgcctgcttcaatgcctgtacttatatcacacaaccgacgttatcaacctggtttcaaacgccatgagcaaaaatcaaatcaggtaatgtgtgtgaaagttcattatgactgtaccaccatacaaaccgagatggtattactccagtcagaccttctgttttatagtgtgttccagaagctggcctggttgcagaagagagtgagctcattagccctgttcaaaaaaaaaaataaatggaataataaagaaacttcaaaaccaaatgaaataccattccatgcacatcttggaaaagtttataacgtatttaaacatgaagagctattgtaagcttgacaataaaactgtgaggatattgttcatttccgagattcacttttccaagatagctctatcgtgaaagtctcttttggagtttatgtatagttctttaaattggcacagttggcttaaagctaaaacactgtagtttgcattaaaaaagaaaaaaaaaaagcaagtgcttttgcacaaaaggctgtaagaaatgagggctgcatatgaagcgagtgttccgttgactgtgtgagtgtgagatccttttggctttagtcatttatttggggcaagctccgaccttgatgacagatgatttcgtcaagctctccacaaaaggtacatgtctattttcatcgtcaactaacttctgtggagcacttgctgcttttggtcccctaaccatgaggttttattgacccatttgccatctctggggtaagtggatggaatcatctttcttgagaggagaactccaggaataatattacacttgtctctgagccatttgagcttgctatttttacagatttcagccttagttccttttcctcttcctctgtcaccctcagaacactgggacaagggggagccatgctgtttcataaacttcccatagaggttctgagtctcctttttagctgattcccatgagtttgtaatattttgatctgagctggttgcagtttgaaataaataaaagcaatctgatttcattctagccaacatctgatgggtttgatatggatgaaagctaatgagaggtacaagtgagacagtacaggtgaaaactacaaaatctctcttgtaaaatacacatatacgcagacccatattttccaatgacacttaaaaggagtgataccaagaggaaacactgagtcccatgaaacatttcttcaatcaggacagaaccatgagcagaggacatagtgggtggggttcgtggaaaaatagaatatatatctaattttctgtttgatgatggtctacggattgatttaattatgattactacagtaacttgcctagtacttcctgttcacggttgccttttacatgcacagcaggttgcttggggagctgatgtctgctcctagcctttctgctccggtaccctttgttctgttccattatgtttcagataatttaatcaaagttgtgtttgcttgtgcgctcccccctttgaatcattctcactgcacttctgccccttccatgcagatgcaggctgatgccggatgggtctccactggcctcttctctggacttctctggggcccgtatcagaacccaaaacctagcctcagcttgacttcttcctcttaccacggggtgaccccggtgtgatctcccctcccaggttccatccagcatgaccgccgggtctccctctgccctacttgattgcactcaccttttgttaccagtccaggcagcaggctccatgtctgggttgggggtgtttcctggcctgacggggcaccttgttcgtttcacccaggcaggaaatcacgtcttgtttcaacatcctgaatcttgtcctgacgtggaaaccgtgatgctagctgacctgacctgcagcctcaggcatccctcggccctttcatggcctggtgtttatgtggtccgtcctcacaaactcttaggatgggatttattgtctccattttcttttctttctttctttcttctttccttttgttattttttttttttttttgagtcttgctctgttgcccctggatggagtgcaatggcaccatcttggctcactgcaacctctgcctcctgggttgaagcggttctcctgcctcactcagcctcccgagtagctgggactacagatgtgtaccaccatgcttggctaatttttttatatttttagtagagacaaggttttaccatattagccaggctggtctcgaattcctgacctcaagtgattctcccaccttggcctcccaaaatgctgggattacagatatgagccaccgtgcctggcctacagtctccattttctataggaaatgaaagcttagtgagagaaggtgcccagacccccaatggctgcgaatcggcagagttgggccccagtgggtctcctcactccatcccccttgtaccacccagtgtctcaccagccattctgctcagatgggatgtagggcctatatagcaaatagaagttttctgggaaccccttaatgacaaaaaatacttgctttccagagtattcatggcaggccttgataatcttgagcctcaagtgcccacaattccttctgggactgactttaaacctttatttcaaatacaagctgggtcttcattattctttgttgcaatggatctctttacacgttaccctcagaaccacaaattagcaagagtctagctggaatctctcctgtgatggaaatttcattccctaagaaatagagcaacctttcttaattaggcatttactctaatgattcagaaagttggttctttatttttgctttattttcattagaaactaaagatttggatggtgttttcataatctattgagaactgcaccaagactgtcagtattcaatacatatgattaataatcagagggaagacacttatattttctgtcatacacacatacctaaatgtttaggccaagggcacatttttaattgattcaaatagcaaatataaattgtgcctctctgttacctgaatgtcttacttttttggaggttttgttgtcaggaactgccatataagaggcatgcatcattttaattgaatcttaaacctgacacttttattgaccaaaaaaaaggatttcaagttatttttcatgcataaagcctgcatgaagcctgtacttctttagtgaaggctatctcagatatgtatgaccttacctccttgcctttaggaaaaattaaacctcactgtctgagatccttgagatttggcaaatgttgatcaattaactcttcaaagacttatgatgaaataactgtaggcaataaaacatactgaaatatgtccaaatgaccagcacagcaaaatatgcatgaccctgtgcctaaggtctgtggcatacaagccttgggttctgtttatggggatgtcaccttctatgactcaggtccctgtctagaaacatgatatggccacgtcttggtggttccttatttatgcggtcgagtcttttgtattcttaagtcatctctggaggataaaagtcagagctcaaagtctatatatactgtcacaaaacaaggatgcagatataatgatgataaaattgaacctatgatttaagaaatgcgatatgaatatgatatgacaactctacctgccaccagtggactaatttcccttgttgccaggggagacctcatcctcatcctaatttacacagtgttgtatgtttgtcaagaatgcataattctgccagtctgttgtatttctaattttagcctgtatacatagaaacactttaaaacatttgcaggctactgcaatcatcgtcatacaatctgtatagttgttacatagaaataatatcagttggtttccccataataattttttctagagagctagctgttcaatgctaattcatatcctttcttaaggtatatggcaagtaaaatggatttcctcggggcctggaaggaattcctgttcaatgattggaacatttaaaagatttcctcttgatttcctacaaggaaggaataggaaagggaggtgattggtcttgttagcctggaaatagtattcactgggtcgctagagggtgggcagagagggacgcaaaaaggcgtgtgtcagagttcctgtctccggggaggtcacaggatcgttagacagataagagagacgcctgtgtctaggtgtctttggttcagtcctaatgttctgcttggtgtctggttcccacaggtcatttggggggtctgaatggtgatggatacctctcagagaaaaaaaagatttaggcttccaggcaaagtggagaatgaagagtaaagacttggaatgatgggtggcaggataaaatagaagaatcattagttattagaattattagggtaaaaagccgtgttaagtgctttgtaggtaggaggaccgtatatcccaatttgcttaggccagtcctggtttatggcaattgccctgacttgagttttagtaacattcccttttattctcaatagcgtcccagtttgggcaataagtcatatggtcaacatatatattgatgaagaattaggatcttaatataggaacagattgcgagtgaagataaaggtaaaatcaattttgaagtccccttatactacaccgtaatttgatatctatatcaatctctaattttacttgaggagtagtgttgacctcatgtcttagaagaaaaaaatgaaggtaaaaaaataataaaattttgcttaggccgttgtgaaatttcctttcaaagacggaactagaatttagaactcaaaaacctcatttcctatactaacccccaccctacattgccggggaaaatggaaaaagcaaaagaaataatgggatataaaaatgtatgggacacattctttcctctattatgagcttgtctcttaattaccaccatttatactggacatgtgatttgggtttccagaatagtaaaaacacagatattataagccctgtgatcatttgcaaagaaatctcatttgcccaggctattacatttctgttctgccttcagtggaaatacacatagaatggaatagaaatatgcattactatgagtaattccagacaccttaatgcttttagcgggagtgcatttggagtttgtttcctgagacccctctggtggaggtggttgttattcatgcttgctggaacagtcctccccacgtctgtgagctcaagcaggtcctggcctcagaaccacagaactccaatagccagagactaaaagaaaagggaaaaatggtttgctcggatccctgggttgcttggcccacaccctgagtgtaatatgtgatcagggttagaaagcaagtggtgggagcaggtcttgcttctgtgggcatggcctcctagagaaatagtccagcgctggaggcacagagaggggaggacaggcattccaaggctcttgaagaactgaaatctggaatcgacatgaagctacatcccgaagcagggaagtaacgacgggcctggaagggattcctgttcaattagtggaatatttacagaagtgttgttttgaagatgaatttatggatgatgttcatgtaaagtgagatagaatgaggggacagacagggatagggaagcaattaatttgccatagatgtgggtctgaaaataatctttactggcttgcctggtgttgtctaaagtagcaggggaagctttgagaatcctattgatttcaggttactatccaggaactataaaatattaaagcagaaaggagacttagtgatcattaaattcattctgaaatgagaaaaatcaagcccacagaaatggagggtttacttaatggagggtgtacatggtattaggggcaggaaccaggtctagaacacacccactggctccttgtcattaaccccgttgccctggagagaagagaagccggtggtcacactttgacagacacagtgtgggtgatgccagagccaaaaccttgggaagggaactgtgtggcttcatggacatgaccagatccacagtcatccactgggttactgtcttcccagttctcatcagccagggttgtttagaaacattgaaaaatgttgctaactgtggatagctctgtaagtagggttttccatctttctaacacttattacatttttttattcctggaacaattttgaatgagaagtggaaaccatggttttagccctacttatctcttaaggaagaatagattggaacagtacaggtgttttgcttaagtttgtggatttacttaaatattccctatgaaagctccggtgtacacatttattttattcatgatttcaacaaagctttactgtgcaccacatacagtccagcatggtcccatagagctttcagcaatggtggaattgtgttgcatccgcactggccagcgttgcagccactagccacatgttgctgtcgcagtcttaaaatgtggctggtgatcagggacgatgagcttttctcatatatctgttggctgcataaatgtcttcttttgcgaagtgtctgttcatatccgtcacccactttttgattggcttatttgttattagagaaatgcaagtgaaaaccacaaggagatactatctcacgccagttagaatggcgatcattaaaaagtcaggacacaacagatgctggagaggatgtggagaaataggaacgctttcacactgttggggggagtgtaaattagtttaatcatggaagacagtgtggtgattcctcaagggcctagaaccagaaataccatttgacccagcaatcccattactgggtatatacccaaaggattataaatcattctataaggacacttgcacacatatgtttcttgcagcactatttacaataacaaagacttggaaccaacccaaatgcccatcaatgatagactgaataaagaaaatgtggcacatatacaccatggaatactatgcagccataaaaaagaatgagttcatgtcctttgcagagaaatggatgaagctggaaaccatcattctcagcaaactaacacaggaacagaaaaccaaacactgcatgttctcactcacaagcgggagttgaacaatgagaacacatggacgacacagggaggggaacatcacacactggggcctgtcgggcggtggaggggaaggggagggagaccattaggacaaatacctaatgcatgcagggcttaaaacctagatgatgggttgataggtgcagcaaaccaccatggcacatgtatacctatgtaacaaacctgcacgttgtgcacatgtatcccagaacttaaagtaaaaatttttaaacatgtggctggtgactgagagatgcaattcttaactgtagttagttctaattaattgaaattgagatcaccacagatggcagaggctttcatgtcagtttcagactctggtattgggtcgagggagaaaagaaaaaagacaagtcatgatctctgaggacaaggtattcacagccgagagtggcagggatgaggagagacaggtaaacaattgtcacactggagtgtggccagttatgtcactgtgggaataaggtcctgtgagagcacggaaaagatgagcgtgatatgattcctctttggggcgggcaagcatcagggcagtttgacaaagagcagatgttcctgtctttacgaacggactgagaccgctccagacatctgagatgaacatgaagagaaaggaattttcaacaatggagcaaacatacattctcagcagtgtaaagagcagagcgccagaggcaaccgtgtacttctggtgtacttctgcgtgcacgttggtgtacacaccctctggggaggtgaactagcaggcagcttggcaagaagtcgcctgcggtgttctgcgtctcagcccttgttcaccatagtgctctgtgtgaagttggacaaatgcatctacctttctggacttcagtctcctctccactccccgaaggcagggcagagcagctgtatgactccttctcagatctgggcttagtccttacaagcttctgttgcattctccagctcctgcagtggccttccctcaagacaatgagaagcttcttggcctcctctttaacactgggtgctatttaatgagggcacctcaagatcctcccagttaccacgattgctggtggcagtcatctcccctccgacaacagttttgtgctctgagtgcctgtgctgtttccacatttttttctccccctcaggtattttagaccccaaagatacatgggtactctagggatactgtgtaaagactgggtagtatttggaactggcagccagagagacgacattggcaattcattcatctatcattacctcaattggcagtgttctcagtacgcagggactgtctctgtgtggctttttgtgagagggatgtaagatttatttttctctatgacctacctgctggcatggtacaaaaggtctctgccgaggtctgagggacctcacttgagctgcactaatagacggggggataactggtagaccaggagagtgtagacaggaagaaagaactcacctttgtaaatgagccactcaggcttttgattttgtggcccttgaattcccacttcagctgatggtcacactcatctgtggggaagctaattttacaagaaatggaacaggagggggttgctgttggatcaagaagatgcagctttggaaggtatccacgagggaatagccatcaatttgccacgtgtgtgagctctaccatcccgcagcacatgggagcgtgctgtgctgtgcctgtgtgctctcaaggtagacgaggtgtcactatatggtcatccacacagcaggtgtggccaaatatagagatctcgtgaaaaactaatagcctgccaaagaatacagccactttttcagggtcgtaaaaacactctgtgactttcccaaaatacagttactatacatgcactagcaaatcccaggatgttctcttcttatggtgcacatagctaaatacccacctgtggaatgtgggtttatttgggaagaagctaatcctattaggagtttcatattctcaccaatttgggtgatggggtctgtgaccaaagatcatagaaagtaagaaatacaggactcaaaaatgtgttcttcattatgtcttcacctcgtgctttttaaacttttttttttttttttgagacagagtctcactctgtcactcaggctggagtgcagtggtgcaatcccagctcactgcaacctccgtctcctgggttcaagtgattctcctgcctcagcttcctgagtagctgggattacaggcacatgccaccacgcccggctaatttgtgtatttttagtagggacagggtttcaccatgttggccaggctggtctcaaactcctggcctcaggtgatccacccgcctcagcctcccaaagtgctgggattacaagcgtgagccaccacacccggccatggttttcaaactttaatgtgcatggaaattactggaagtgtttgttaaagtacagatgctgcttcagctggttgggcataggtcctgagatcccgcgtctctcacgggctcccaggccatgcagttgatgttggtccatggatgaccctctgggtagcaacgtttggggtctttgtgtgtccacacatggtgtgtctgtccattaggaggaaagtgccagcgcatttgccaaagcgtttagataggagcctgttagagtttgaagttccaggaccaaggaaatctggtaaataaaggacagttgtttgttcatggatctaggtttataaagtgtgtatacattttgagattctgtctcccccctccaaccttaaaattagcaaaatgtagtctttctttgtcgagctctaggaataatttttctgcgtcagatgcatttttgggaaggtgcgtttggccatttcccactcaccgtgcccgcccagtatccctgcagtactttggaagcaccataattgggaaagagtagaaagttcttgccttggaaatgagattcttatctgggtcttgggcactggaggatctcaggcgcgggaggctcgcgatgggtccggggaacagctgctgtgttcctgtaggaggaaatgcctgtgatggaggcttctaaagccagctcccgtctcagagaagacagctctatgcctccacgtcgtgatagcaaatgttcccttttggctgttttaatagttctgcttcaagcgtatttgtttttccttatttcctagcatctttgagaaagatctgttctatactctgtagcccagtttggagagatatgacatgtttgactatgtgaggaaatatacatatttctcagggcttttttttttaaattgagtgttattggactttgatgtttgatttccaggcagtctttaatgtgaaaggcaaacacattcattttctatcagttcctgaaaatgttcccaattttagaagctctagactggtcttgccaatatagcaacatagtgacagttactcgtctgtaattctgtacttaaatcgtgaactgctagcactatcgattaatgctttatacagtttcaaagctgtactcccaggctgcatttagatggtttaaagcattgatttctctctctgacaactcttaagttattggctgccaaaaaaatgaggaaaggttggttaatctccatggctcatatgttgcttgctgtagagaatattggtgaagcatagtttttcttcattgtaagatgcactagggatgtgaagactgttttgaatcattgtgaaaactggaatcagaaaaacaatctcctcattcaattcaagaattcgagatccaaaacaacattcagtttggtatttggcagtttaaccaatatctgactttatgtaattttaattattggggtcagccattggtattgcattataatttgtaatgatttatatcagccttttaaaaatgctcacagtcatggacaaaactggaaaaaatgaggaagtaacccaatccaaattacttaatatcatctgctgtaattagaaattagattttagtagactgtttccataatacatttcagaattatttttataacttaatagtataaatacaaaataatttcagctttgttattttattatgtgctgtgctagtttaaattattccggttataggtgtatcatcaacaccttatcttcagcaaggattttaaatatgggctgaccaaatttatgtggaatttgcattttgttattcgtttaaaaacatacagaaaatggaaaaaaaaaaaaaaacctttgcaaagattctcttttgagtgctagcttttcctgatccctaaggatgccggctgctctgccaggaatgtgcccttcatattatatcttctagaatgaatgtttggaagggaaagcagtaagatgcaaaagcaagaaggacagatgatgttcatactcacagtaatagctgtctcccctcttatcagttgtgatgctggaacaaacacctctttcctgactgcagggtttggaggtccccaagtccaccctcacttctgccatcaatggcaagcggcactggctgcgtggaaaagccaagatgcctttcaccataccatgtctggagtctagttgctgctcaataaaccctggtggcgatcactctcgagattcagtaacattatccagaatttaaaaaaaatacaagcctgggcacagtggctcacgcctgtaatcccagcactttgggaggccgcggtggcagatcacttgaggtcagaagttcgagatcagtctggctaacatagtgaaaccccatctctactaaaaatacaaaaaatagccaggcatggtggcacgcacctgtagtcccagctactcaggaggctgaggtgggcgaatcgcttgaagctggtaggcagaggttacagtgagccaagattgtaccactgcactcagacctgagcaacagaggaagactctgtctcaaaagaaaaggaacagaaaaaaaaaatacaacaatgtgtggtccttgtattcaagccaagcttatttctgcctcaaagcattgtgccaagtttgtatgttacttcaggtttcataagccagcagatcctcttcctgggactgaaatgatgatttcagttttttcaatgcttaagcgtggaaaacaggcaggtaatttgtgacccataagggaggggtgagaaccacatgaagatgaaggtggtggaaaggagcagctgatgtcacgcactgtctacttaacattgccacgttaatgttaatgccggttatagaaagcaatgggtaattgccatatttttgttacggcttattgcagtgaatgcaggatgcttctcacatctcttacacatcaagtaagagtatttcttaaaaaacaaaacaaaacaaaacaaaacaaactctcaatgccacatatacctgaattgtgagtacttatttcacctaacaaatacctaacaaatattgatattttgccacttatgggttgtataaatgaccattaatatgatttgtcaggcacagtacacacaactaacctataaacaatgtgcagacgtaggtcataaactgtgacactcgaaatccaagtagtgcccctggtgggagatgtttcacatgttaataagcaattaccgtagtagattaagagtacagaatcaatccaagaagccaataatttagagttggatactgtagcacaagattgcaggaacctgagtgctgtgtgccacgctgcacatcagaggttgcaagatgtcctgcaatgcaggctcaggaaagtgactgatgcgctgtgttctaatgtggaattctacaggtattcgtggaaaaacatcaatacattagcaaaacctggaccgtttctggtgttgctggtgctgcatgggatgagtctgtggggcactccatgggatatatttaaagaggtgttattttgtctcaagcggctagggcggagatagagcatgctatttgccacattgcattctaggggttgcaagacatcctgaaatgtgggctccatgaaagcggttcatgctgtgatctgtacccccagatctcttcccaggcaggtctcatccaccaccagaaatggtccatgttttactactgtattgatgtttttccacaaatacctgtagaaatccatattagaacacagggcgtcagtcactttcctgagcctgcattccaggacatcttgcagcctctgaaatgcagcgtggcacacagcactcaggttcctgcaatcagcatgcccacatggtcataatacagacttagcaacctggaaggaagtctcagtgatctgtgacccagccctttctcctgatagaccgtggaactgcaggcagaagatgcacggcgtctcatctcagatacacagtggtggtgccgggatggtatgtgctctccattctccctggagggctcttggtccatcttgcttcagtgactagcatgagaggagtggtgatagcagcaggtgccgtggccactgggcaggcggggtatggagaacgcagccacacggccgccactcctgctatggaggcaccaggtcccgcaacactggtaccataggacagggcttcctggtatcacaggatttgccagagctggaacgtaacgcccacttcacaccttggagtatgattcaaagtagagtttgtagtgaattccaaaaggcatgtgattcaagctaactgccaagaccattcagagttgtggggagaaaaccccactgtgggcacgtgagtcagggaagcagcatggaagcggcttgggtaggattgtggcaactggaagggagttgggcgggccatggttacagatgcgggaagtggtcggagtggggaagaggacctgtctgattcccaggaagtgggcaggctccatgcagagcaggatcccccgtggagcctacacagccttgcacacctgaactgaggggcaacgaagaaggggtctttgtagttcccttggttaggcaagtcaccagctggaagtggcagccgagacccggcagggacaaccctgtctttcccagtgagcatctgatgatattatccggggcccgagcagctagggtagaaaaggagaagcatttaaacatcagtgcctcaaatctcctttccaaacatcccaggtatagaaagttacatcactcttgcaatttggttcatcaattgtcctcactgcaaagttgaacctaaactaactcctgttgggaggcagactagggacaagtgactttcagtgatgctgaactgtgaggctgaggcactggccatactgcctcccaaatggaaccctcgtttgtgcaaatgcccccggccagggtggtacccacacacatctgcacatgactttctcagtctcctcctaaattatccctattctttttgaaaacataaaattaacccaggtggaagtttgtgttgtaaaacatggagtagttttcaatattgtaataggctcttcaagaagagcagcatttgcccacaatctgaatttttagaaaacgtctaaaatctcgagttatcagcaggacgatatccacacagtagatacatccctaccggactcagtggcaaattatgacacaggccaaggtctatccttgcaccatctgtcatttctgagtcttcaaagagctcagagatgtcctctgtgtgcctccttacccaggcaggcagcctaaactcccagggttcttcccaggcagatctcagccatcctgggctcaggaaggcattccaggaaaccagaacgcaagggataaaagatggaggaagtcacctcttttagcagagtttgcactttgatgagaatgaaggctcacgcccagggagaaggtggataagagagacgtttaagcaccagctctaaggtagttgcagtttgctgggctgatttgggtgctcctgaaggatttgttgtctggggactcttgcctggtgcccaaggctgtaccttcttgcgcgtaagcctgttcagctctcggcccgtgtggcatgcaggccacaggagaaggtgactccagcccctcctccgttgactgcatttctcactgagcgtatatctgtcttgccttctcgcagattgttttcacgtggcatttcacttaactttagtctggattcacattttttttttccagaaggtgagattcttcttcaccaagatgtcacagtttgggcaaagttcaaagttgcttaaatttcttcgaagggctccatgagcagttgtactccagcaggactgtcactccaaattggactctccagctggtcaggggcggctttccaagaatcttgatgtcccagagcccctctgatacagtatctgaaaggccttttttgaatgtttggaatgctcttgtctgagagatatcttaatatgaaagcaaatacctgaagcataataaaagcttgtaaagcatcaagaaaagaaacgatctcaggaaaacctaatagtaactcgtgatccagggacatataaaactggagatacaccgtgaaataaaaaatgtcaggtacttaacagcatgcaaatgactgaagccaaaagaaaaagaaagaaaagaagaagaaccaattaactatgagagtctgcatccttccccagggccagtgttaatttccatcgctgtctttaagcacatcgttttgaaagagtgtgctcgggttcatccatcttatttcttctgttagcctcagaaagggagaaagtaattttcctacattgtcagcttctttacaaatgtctgggccttttctaaacagaacccccattgaatagaggaaaacaaccattctcacactgaatgccctctttaaccctaaatgcttattcagtcatttagcacctctcttcctcgccttttttcccttctgaacatgacctgaaagaagatgttggaacccccctgcatggcggcgggtggcattgccctgccccattcatctgcgcgttcatccgtttctcttacggagcagcctcaatgctctaccgatgtgcgggtgccaatctgtctccccgaggttattcagcatctaacgttgctatttaatctccagatttctaaacttgcagcagactggctgtgaacaggccagattatttgtttcctcttaaaataagtgcttgatggttgggttgtgtggggccggtccttggtggtcactgcatgtaatcaacattcatagactgtaggaaaatgtggtttaatgaaacattctgccactttttcttctttggcacgcgttaagcagtgcgtgcaatgcattgcaaatgcaagtaattcagagtttacaaggaaaggaaggagagtgaggaaccccagaggacagggacgtggggtggtgggacagggcttcaggctgatttatctttcatacagtagtttggccagtgggaacgcggagtgggaggaggctgtggctgcctgctcttcccaatggggaggaggctttacggtcctctcagcggagctggtgtttactaaaaggtctttcctaaagagcccaccgaatagaaaacgtctacttcccgtaggctcctgagaagcttcctgaagtcagtgagcacgttctgcataaaagctcatttgaactctgcactaatttgcctagcaattcataggaatcaatcatctaatattcagtccccatctaatgaatggctgcttaaacacactagtttttttttttcattgcattgggttaggaagtttgcagctggtaaattaaaataggaagcagtctttggtatgaaagtggcatattttaagtgccttggaatgcacttgttacaagtgctctgctgttatgtgagcagtagtttaatgtggttggctgggcgtagtggctcacgcctgtaatcccagcactttgggagcctgagatgggcggatcacgaggtcaggagttcaaaaccagcctggccaacatggagaaaccccgtctctactaaaaatacaaaaattagctgggcatgggtgcacacgcctgtaattccagctactcgggaggctgaggcaagagaattgcttgaacctaggaggcagagtttgcagtgagccaagattgcgccactgcactccagcctgggtgacagagcaagactccacctcgcaaagaaaaaaaaaattaatgtggttgaccattagaaacacaacatcaaaattgttttggagccatcttagttggttaagattgatgtgcaaaaatcaaatatttggcagttataaaaggacataccatagattttaactaatctcttttatgtagagagtggcaaaaaatcttaatgctttaatgaaacctactttacaatcacgaatgttatttgtattctgtgaacatattgcaatgtacaagcagctgaacaatgaaataaatccaaaatccccaaacacttcccagtcagctcagcctcacaggtgtccattgggtccttggttctttgcttcctctccatccccagctttcagcacattgctgtgtggccgtcttgaaggaaagcccttcattctcttcaccttcgctcaggtttcctggctcactggctatggtgaataatttatccctctgattttaatgagtgtattttattgtgtttttaaaaagtagggacccaaactgatcttcatgctatctctttgtttaaaactatatttgaaaaaaatacttccattaattttttagatattgaatccagaagcactggtgatagcagcaataactaacatgtgtttttcatgaataggtggcaattattgcaaaaaaatgctttacatacgttattgcaattaatacagccaccaccttagtcgctgttattatacctaccttgccccagaacagtgaggcttgagcagctaaaaccacttgcttgaggtcttctaggcagggagtaccatgaaacccgtgtccactacagaatgcctggcgctgctctttttggctctgagtgtgcttacgattttttgaaaaacatttcccttgagacatccttttcttatagtatttgtagttttttcagcatatataaatatataaattgaattattataacataaacttataaattacattctctaatgaatggattcaaggctcctggcagagatactagtttttatgcttgtaatcaatcacacttaaatatcatgcaatccaaatgctaacaaaattactctgtccccatttggcatttagaaaacatcaaaaacatgctgatgatgccaaatagggtttttaagaatggggcgaaaggtgaaggtgtcaagtgcagcgaggattcctgcagctctttccttgtgtgggggtatgtcagcgtcagtgcaggctgcggtgtctggctctgtccttctgacatctgcggtggctgtggtccacctggagaggtggttatgtaggactcagggaaatacataattgtgagcattccatttattcaggttttagaaatgaaatctacaatcgcatgtgcctttctcatactctgtagtcgcagatctgatgagaaaagtgagagacagaacagagaaaaccctcactcctgggtcgggctttacttcttgactgtccaaaaaaggaaagatataagattttgattctttcttggaagctgcatcattactttgctttattgttcaagaaattgaataataggattatataataataatatgtaataataatcctattattcaatttcttgtcccttctgtttagtcttggggtgtgtatgcatgtgtgtacgtgtgtttgtgtttcacttttctccttgatgacatttaagactgcacccatttttatgttccaggtgttgtagatcttgtcaaaatggctgtctgttccttggttaccttctcctataatgacgcaagaagaatggttgaatttaaaaggcaatacatttagaaccaattaaagagaacatttttagcacagggtgtggcgcttacaagagttcataaaaaccgaagttgctgggaatgagttgccattcacctgcactagaaactatggacttgtgtcaacgatgggtcctttggggaggaaatcatctcatcacctgtgattcttttcttgttatcagagggagaaaatgttggcacagcttccctctagaaaaagatattgttaataattggttaattatgaagactgatgaagaaaagacattacagctgagatggttgggagggagagaatgtctaggctgtgaagcaaaaggaactaatgattagccagcagggtctgacaaccaggttacggtcagcagccccaggatatctgatcgtgtgggcacagcatggaaaggaatgcctctgaattggcctactaagctgaggcagaacaggcagacacactgggatttgagccggggatagggtgtggtcaggtggagagacagaactgaggccttcacatgtttgggggttctaggagggacagattctgtccagcctaccttttctcaatgcattaaactttggcaaagtaatcaggttgcagaagcaacattagagtatcctcctttagctgctgagttgggggtgaagtgggctgtaagccccggggcagttttcagaggacaggctttgagactgcctgaaagattcatcaccttaaggataaatttcctggaggcgaactagaagatcctgtgcattaacagaacagtcaatgcctgttatccaggaactgatgtgaacatctgacagcttctgtacctttcaatcttcaagcactgcatggtgaattttgtgatttaaggaaaccataaatgaattagatcacttttttccttccaaatgcgagattccaaatgacagcagaatttccgtccacttcctaaaagttaaaggtagaactgcttgagtgaggctaccagtgctgaactggcaagccaatcgtggccaaagctctcaaggtaaactgaaatgatcaatgtatttatagtaggataatcaaaatttatttattaaagaaaccaagatgagaccaagagcatccagtggccaatattgatgtgcctcacttgaaggcatttcaaaccatctcgccgctaaccaaggtacagcaagattgttcagctttgctgaaaatgacttgaccgtagatttgcttctggggcaaatggattgtaaattgctaaaatgacactggtttgaatggcctgaaaagaggaagggaactgctgcttccgtgttccctgagtgccttgtgtcattacctcatttactcactgcaacgccacacactttgtggcttcctgattttacagatgagaaaaccaagattctgaaggagtatgcagattccccaaaggcacacagctaatcagcggtggagcgaaattccaaacagctccaaagactgcctgtctccaaggggcatctcactgcatcttcgcaagtgcacaggcagcgtcagtccgggcactgaaactgacagctgctgcggtcttgattttgagacagtttgggtctcagccagtgctattcagcggcttgaagtccaaaatcacacccgtgcacatgtaggattgttgtctcacgtatcagtggacctgtcccctgcagggaagagttgataaatatggcactctgcttcacttttcttgtttttgttttagtttttgtttttgaaacagagtctttctctgtcaccctggctggagtgcaatggtgcgatctcggctcactgcaccctctgcctcctgggttcaggcgattctccggcctcagcctcctgagcaggtgggattacaggcgtgtgccaccatgcctagctaatttttgtattattagtacagatggggtttcaccatgttggccaggctggtatcgaaatcctgacctcaagtgatcctcccgccttggcctcccacagtgctgggattacaggcgtgtgccaccatgcctggctaatttttgtattattagtagagacggggtttcaccgtgttggccaggctggtatcgaaatcctgacctcaagtgatccgccagcctcagcctccgaaagtgctcggattataggcgtgagccaccgtgccccaccctctgcttcacttttctactctaagttcttttaaaagaaccatgacatggcagaagaagagactgatgaaaggtaggcaggaggggcactgccctgtctttggtcccaagccttttcctctcttatctgcagtcattcctgttaaggttatttccttgggaaaattccacacccacaattgtctgttcccaagcacaccctcacgtctgtgttctaacacccgcttcttacctactttctctcaataacaataaggtaagaagtaaattttctaactggcagacaggcgtatgaaaaggtgctaaacatcattgctcatcagagaaatgcaaatcaaaactgcaatgaggtatcatctcaccccagctaaaatggcttatatccaaaagacaagcagtaacaaatgctggcgaggatgtggagaaaagggaaccctcatacgctgttggtgggaaggtaaattagcacagccactatggagagtagtatggaggttccttaacaaactgaaaattgagctaccagggaaaggttttaacaagagtactgctaccagctgtaccagcctgcgatacatgctaaggactcaggtgctacgtgagagagatccagttaaaaccccagcttcaagatttaggggctgtggaagcttgtacgagtttcttggcaactctgattcacattttccggtgagacccccatctctactaaaaatacaaaaaattagctgggcgtcttggtgcacacctgtagtcccaactactcgggaggctgaggcaggagaattgcttgaacccaggaggcggaggttgcagtgagctgagatcatgtcactgcactccagcctgggtgacagagtgaaactccatctcaacaaaaaataaaagatgaataataacctccaagtgctgttgtggggattaaatatgagaatatgtttaaatgcttaatagctggcacttaaacataagtggaaaaagtgatcatgtgaccgctcggcaaatatcgctggtaccgttagttggtttgggctgctataccaagataccatagactaggtggctcaaacaacagacatttatttcctgaagtttcctgaagttctagaggctgaaagtcgaggatgagggtgcgggcagctttggtgtctggtgagggctctcttcttggtctccacaccgggcaggaggggagagagagtggaaagaggctctcacctgtctcttctcgcaaaagcactaatcccatggtgagggcctcaccctcatgactcaccacttcccaaggtcttaccacctgataccatcccactagggtgacgatttcagcatggaattgagggggcacacattcattctatattttagattgtgctacttgcaaataatttcactgctggaaaattctgaggggctggtcaataggaagtgcatgtcattgcaattcttatttgcagtccattttcccatgggttggaaagtggggaggaaggcatcctactggtctgggaagatccatttgctgatacaggtaagcagatagaggtggatttcccaaggtggaaatcctaaggtggatttgcttagtcttgggacctgttgctgtccacgcccctaccttgggctttgctgttcctccttccgccccacattggctgagagcccagaggtcagctatgcttcccattctgtgtggactctgccatatgcatccataaaggccactgccagccacactctgcatccctcatttatggtccctggaactgggaccctgtctgtgctaccccttgcttccttctcctgatgtttccaactggagagggagaggacattctcattccagagcaagccctgctgctccctcgttccatccatcatttcttcgcatgcaaagtaccttctaaatgccaccagaaaactttctgtcagtcagacagacatgcttttgaactgaaacatactttgattagggagcaaggtgagccgattctttctgttacgtatcagcaaatggatcttcccagaggggtagaagccttcctccccactttccaatccttgagaaaatgggccgcaattaaaaagacaagcacttcctgtttaccagcccctctgaattttccaatggtgaaattatttgcgagtatatctcactctttctcagaggttggcccagactcccaggataaaggaaagaccatttgggtcttcacatactgggaggaaacaaaactgaagacttttcaagcctctcaaacctactttacagtgattctctctttcatctttctttttttttctttgagatggagtcttgctctgtctcccaggctggagtgcaatgaatggcgcaatctcggctcactgcaacctccacctcccaggttcaagcgattctcctgcctcagcctcccaagtatctgggattacaggcactcaccaccatgcccgtctaatttttgtatttttattagagacgaggtttcaccatgttggccaggctgctcttgaactcctgatctcaggtaatccacccacctcagcctcccaaagagctgggattacaggcgtgagccacagtgcccaggccctccttcacacttttaattgggaccccccctgtgtcttgagggactctgagtggcattacagtggagtcactttgccattaatcctatcactgagagcaccaagcaggtgttcatgcccaggtaggctgagcatctgtatcaaggcttcctgagctttcctgtgccttccatcgtcacttattttactgcaaaataacaaatgctttttggggatacactaaagctaccacacatttaatattgactctggagtttcaagtaacttaaaatctactaatctcagtgaactttcgcccagagtataatgttttccattttctatttttcctttcatgtagttctactctagagatggatgtgagaaagataatacaggaaccatcctgtatctcagcaaactctactgaaatcagtaggtatcatgtatgtgcatgcacgtacacacacacacgtgcacaaattagccctgtaatgttattccatgtcagattgttgcctttggccaaactcagcgattgtgaatgacatctcctgctcggttcatgtaacgtacaggagacctgttcttagcatttaccattatccttccagtcttgactaaggttgggtgcacattcacagagactaccaactctcgattcagggtttgaaaagtctgaatggttgtgtattaaatggaaaagatcagaccaatattccctagccttggatgaaactgtttgtttgcaaaatgatgttttagacagaagtgagttttcagaacattaaaagattccagtgataatatttgcaaatcctttcatctgcatgaaaatttagcaactaaatctggccattaaagcataatctttatttgaccaaagcatgatataaaaatggaataaactataatttatctttgctgacagctaattacctggaagtctgattaaagggaaaactaaatttacttaattagtgttttggtgtttaatctgtatacatataaatatgcctatctcctctcctacatgaacatttctagaaataaattaccatttttattttgtccctttcagatgctgccaaactgagggcagcattagaagaatgggtattttagcaacaatggtagcaggtgtttgtagactgtgatcccattagaggagcagagtgaggtaacacaagaatgggatgcttaccacaaagtagttttcttttttccccaatggctcctcctttaactgtgaacaagaagagtgccaacttgtggagtgaaccagccctgccaatgaatcctggcttggtggtggaaaaatctgcatataattaagccccttgaggcaagtggactttgatagacaagaggtggctttgaaaacgttgaaatcatttgttttttagcagcagtatttggcagtgttgccttttgacggtttgaggaactatgctgtaagtacagccaaaggcagaggaggttttatggaactctcagctcccacccccacctcctgatgctgcaaagttctcccactagatgcaatttaaacaggagacatatgtaacacacctcaggtggtgtaatgaaatcatcctcttttctgagcttctgaaagtcaaatatacttatattaattttttaaagtgatctgaaagtcatacgattctattcttgaaatagagaggttttcgttacttaagtggcagacttactgacagttcagttataggcttacaaataattggactaaaatatgatttttataaagcattgtaggttttaatcaaaatccctacagaaatgaaagtcttaattaaatctgaaatcctacttcccagacctgaagtttccaatatcattttttattctcgcccaacatcctctgtgattaaaatagaacataagtggtgaaatcgctgattatttaaaggatagcatcatagaaacaaacccaaagcacgtagaagtcattttagactcatgaaaggtagaagatgaaagaggcttgcacagcatcttcatctcaggaagacttttgggtcaggttctgttcatttcattatcgtcactcttctcggttgcataattggaagttctctaaaataactacttctgacaaaatttctaaaagttgctgagtggaggcttaaaaaaggactaatatccttaatgatttgataaagattaaaatcacagtttcaggaagggttactttttgcctacttcacagacattcaccctcttctctggtagcctggacagtcattttctagaaccatcttccttctttattctgccatttggctgaatgacccttaaggtgacacaaagtaaagggactatgacaaggttaacaaatgtgcaacacaagttgcctgttctctgttgtttcgatgaagcattcagctcaatataaaaaactatatctcattaatacaccttccaactgggcagaggatgggagcacagaggggtccacagctgtaagtggaggcaaacatatgccatgaaacccaggccagtgaggaagggggtgacatgtggattttaatagttaatttttgttgttgttgttgtttgttgttgttgttttgttttgttttttgagacggagtctcgctctgtcacccaggctggagtgcagtggtgtgatcttggctcactgcaacctccacttcccaggttcaagtgatgcttctgcctcagcctcccaagtagctgggattacaggcgcacgccaccacacctggctaatttttgtatctttagtagagatggggtttcaccatgtcggccaggcttgtctcgaactcctgacctcaggtgatccacctgccttggcctcccaaaatgctgggattacaggcatgagccaacacactcggccaatttcttttttgatgtccaggtacagagaagttgacattttcatttaaacacatacttgacccaaggacacaattcctttaatacggctgggtatgctaagctatggatcatcagtgccacagtaaaaatggacttgtgtttataggttgtctcctggagattgttgtgaattatatgcattttaggaaataataaacttgtaatatgttcgcctgtgtgacttaacgccgtgtcagctagagtaagtgtgcagcacatccaaaccggaccttctatggctttaatacttctgaagacctctgtaaagattcttccttctcagtacccaagtgctgaaaaaaaacatgtattattataggtcagaattagcattttagtcagttattctagaagtagagtaaaaaacaaattttcagactcacttatgtatttttcacatgggtaatcctttgagtcaggaaactggctagagttacattccataaataaaatgttttgatgatgatgccaacttgggcatggccttgtctcttaacttaggaggaggacaggcagacctggggggtgatgattaagtaaaatatcagtcagacagatgaaccgtaggacaaaaccaccaccaagggctgtggggatggagatgagaccctggtcacctcccctggagaatgtggagaagacttcaccctatggttgatggacatgtggtctggggctggaaggttcagtgggattttaggaaggggagaaggaagcaggaacaggggaaacagtttgatctgagacactggtgtaaggttgggataattttcagtgacatggggaggaacacggccttgaagggtgggagagtggtcttccattcatgacttactgagcctgtcatatgtgtgatgcagtggaatccacagaggattctgtcctggatcacacgcaaacccagccttcatggagcttgtgtgtggtatggcgtgctaagtcgtagacccattacttaaaatgactgtgttgttaaatgtcaaccgagtatcatggagacattcatgatgggggactactgtggtctagatcagcggtgtccactaaagacatttgaagacgggctgggggcctgtggtctgacccaggccaggaagatgtgtagttcagagtgagttgggtatcactgctctgccttgaacaggtgcaccctggtgttatgggactatcaggttcaactgcccgttgcatggtaacagaccaccagtacaccaaaacagcaggatgtggagcagacaatgtgtttaataatcatagggcagctgaacaaggagacaggaggaaacctcaaatccgcctctctgaggagctttacatgggtgtttttaagggaattttggttagggggcttaggagctggagatcactgactggacagtgtgtgggaaatgaaatcataaggatgtagaaattgcactcctgcgctgaggctgttcctcggagggcattttcagatgggctggagtcagtgggcccattggactgtaggttctggaaaatatctccaaatggaaaatttgaggtttcttaacatttaaggtgttacctagagaagttaggagcatgtgacgggggcacgtgacttctaagcagcaagcagctatcagaaagtgggccaaaggacaagctggttaatgcgtcactgtgcttctacttaaagcttatgcttttgttaaaaatttagcaatttggttttattaattttatgaggacggtttccctggtgagcatttggctccacagagagggatccaacagctaagagtctgcagtagaggcgggatcccacagcttcactgatcaccccattttcctgtggccccaccaccatctcttctcttctcccaggaccctagctcgggtggaaacagtggggaggccttggtctccagctcagaacccaggagccaaaaatagcagctgagtgtaaattttcattaagacaggggattagagatcaaaaggggtggcctcccactctccagaccccaactcctccctgagtcagcacccccacctgcacctgcacctggagggaccctgcctgcccacactcggtggtggccacagcctgcatctagcagggtgtaccctgtgccaggtggcaggagagcctggaatgtgctgtcagttctcagctgatctacaagggtaaccacagtcaaagccattttaaggaggggaaagttaagtaaggaagaggccaattaatgtgcccatgaggatgttaacaagcagccttggaattggagccaagacaggactccagagcctgcatggggggcctctgggtgtatcatctttgctccagctgagcaccggcttgtctcaagaacaggctactgcatggcacctctgctcccctggggtcctggaaaggttccctggtctggggcatctgctcccagccctctggaaggtgggagtgaggatgatgacatcccagcagggcactggccgaccagcctgctcctatagcaatgccttcctgtcctcctgcccactgcccctttgggcactgctggtggccagcactggcggccagtgctggcctcttctccctgctgcagagctgcttccataggcggacctggtcagagctcaagtggaggggaagcaaaccttttggagtgtcttgggttacctccttaaacattaaagacaaggccgggcacggtggctcacgcctgtaatcccagcactttgggaggccgaggtgggcagatcatgaggtcaggagatcgagaccatcctggctaacacagtgagacatcatctctactaaaaatacaaaaaattagccaggagtggtggtgggcgcctgtggtcccagctactcaggaggctgaggcaggagaatggccagaacccgggaggcggagcttgcagtgagccgagatcatgccactgcactccagcctgggcaacagagtgagactctgtctcaaaaaaaataaaaattaaaataaaaattaaagacaaattaaaaatttgtccttaaaaatgcagggacatggatgaagctggaagccatcattctcagcaaactaaaacaggaacagaaaaccaaagactacatgttctcactcataagtgaaagttgaacagtgagaacacatggacacagggaggggaacatcatacactggggcctattggggggtgtggggtaaggggagggagaacattaggacaagtacctcatgcatgtggggcttaaaacctagatgatgggttgacaggtgcagcaaaccaccgtggcatgtgtatacctatgtaacaaacctgcacgttcttcacatggatcccagaacttcagtaaatttttttttagatgcagatgtttatgcactgacttaaatatttaataaggcatgctttaatttgtttgtttttacttattgttttaaaagctagagtcctgaccaatttgcttctgcctccacacattttgtttttagagatataaactacaagtatatctcagcaatatgaggccaggaaagagatgctccgagcatgctctgtagccgtggcccctgggccagcagcatcagtgctacctgtaggcttcagacctgcagaatcctagggcccagcccagatgcactgaatcagacctgtattttaacaggtcccctgggtgacctgtaaccacattccactttgtgaagttctgtttaaagaagcaggcctgggatttgcttactattcagtgaaactttcaataaagcttcttttctcttcctccgtgaacggcagttattttctcgtagcaagagtctggactacagttgttctgaatcttttgagtagatattgaaggggagatacatgagcatgcaagcagacgtgcccagtatagcgagaaccagaataatgaacccctgcaaagtgggagggcatttggaaagagtgcacgctgagttcatccccagcataaaggaaccagcccgttattctaatctgatgagggaattcttcctgacaattgagtgatggaaggaggcattttaaatctttccatgtgtgtctcttctggcaagtggacagggcttgtgatgaatcctaggtctgataccagggtctttaatgtaaaagacaaaaacatactagacatctagcctattaaacttgaactccagccaaataagagctgatttcctgctgcaaatcaacaaaagacctcctgcacatggaagacgactctgacactaacactgatttagggccaggaagcctgcagtttaaattaagctggaggatactagctttatatgaaaatggcaggcaagtgtctgtggctcacagaacaagtatgatatacttttgttgcaagacctttgcatagaaaatcatcttcttttagaaaataaattccgttgccaagttttgtttcccattctactctgccccttaatgtccaaggagaattctccctgaagtccttgaggatggggcttattcagcacatcatagatttatgaagcctttgccatgtgtcaagcactgtgctaagcccaggggattaagagcaacaggcaagccacagtctccctctgtgcaccagccctggctccgtgaaatcaggaaagcaggaggaaagaactcaaagtgcacgcctggggaagtatcactgccacctaaacccttcttctcagctatcttccctatccaaccactagacacactggtgtttctagtcgtctcaacttgctctctttctatgagttccacaattctcagtctagtaataatagccaacatttcttgaatattgtcatgtgtcatgtgataagcccagtgtggtgttttatatgcattttaccatttaatacaatggccgtataggaggcactatctttaccctattttattgatgagatattagggactgggacagacactcctcatcctgagcctaagccactgcaacagcttgtaaactttcccttccaattccaagctactcctttccagtatatcctgcaaatggcttccctattaatattcctaaattatgatttcgctgggtgtcttttctcttcccaaagataaacactattttgacaccttcaccatccattcggtttggcttgctttggaaccctgtataaatagaatcatgcaatacatattcgtttgcatctagcttaatttgcctaagattatgtctgaaagtcgcctcacatgtagtactggttcactcttcgcatttctgtaaagtgttttgttttaggaatgtagcaccatttattccttctgctgttggtggatgttcatattgcttccagacttgatcattatgcacaatgctgcgggcactcttgtatgttcagtgcataagtgcatgcgtttatattgatggttgtgagctatgaacatgttcagctttggttgattctgccagagatttccagagtagttgcaccaatttatactcccatcagcagtgaaccagaatgtcattttctttacattctctcctcacctgcccttgggaggggtgaggctgttttggtggtggtggtgtttttaccattctggtaggatcccattgtcattttgatttccatttcttaggtgacttgagcacctttttagatgctattggccatttgggtagcctccttagtcaagtacctattcaagttttttgctcatttttaaattgtattttatttgctcattttgtattatgttgttattgtatggctcccttatacttgaactacaaaagttatttatatattctaggtatgagaccttcatcagatacattattgcaaatatcctttctctgtagttggccttttcatataatatttttcacaatggtgtcttttgatgaacagaattttacaattttgatgaagtctaatttgttaatctttgcttttttagagttttaatgaaatatctagtgttattcaagatcatgaaaatgtttctgttatttgctagaagctttattattttaccttcaacatttagatctatgatgatccagaatatctttttgagtatggtgtgaggtaggggtcatgattcatttatttgtatatgaatattgagttcttacagccccatacagtgaagacaccatgctttcccccacattactgctgtgaaacatttgtgagaaatcaggtgacaggtggatctagttttggactttctatctgttcccctggtttgtttacccctggagagaaatcacaatatgtaagttactatatcttgttaactggtagtttaagtggtttagatatcatctttaagattatctttattattctttgccctttacgttttcattaaaattttagaatcggcttgtcaaattacacacacatactcactcacatagtggttgagattgcattctatgaaagattaaattagtaagaatttacatatttacattataaaattttccaatccatgaatgtgatgtactcctccatttgtttagatcatctttaatttctcttaacctcattttaatgttttctatgtaaggtcttgcttatttttatgaggttcattcctaagtgtttgagggttggtgaggctaatataaatgttttattattttatttccattttctgttttttctatttaatttctattctgttcattttctgtgtgtttatatgagtgaaatggaaatacaattaacactaattttatattgactttgcattttcttagtccttacttaaaacttggcattttattttatacagttttgtaattttatttggatgtttatttttcctgttctcacagtacttagcccaatgttgaccaaataaatacttaagtacttgtggatttgttgattaatgatttatttaaataacttttgtcctagctgggttaccttaaaagttctaacttggtctggcacagtggcccttgcctgtaatcccagcactttgggaggctgaggtgggaggatggcttgaggccaggagtttgaggttgtagtgagctgtgattgtaccactgcactccagcctggacaacatagcaagaccttatcccccaacccccccaccaaaaaaaaaattctaacttattatatcaatcttttcaatagtcagacaattctatctaagaagttaaatgtaactgaattccatgggcttctcaatcatttcaaaaattacaacttttaaaacaaaataataattccggaagtagatatacacattttcctgcaaatgtttctgtactatgtcacatcttgctgaaggtcattttagttaaattaatgtaaaatgcagactgcatgaaataaagaataaaaagaacaaaagaatagcaaatagaaagaattaaaaaaacatgggaaggcaattagcgaattttgttgaaatttgacactacttaattagcagctcaaatttcctgaagcttgaggctttaccatctagacaatattacattgaattttgggggtttaaaaatataattaaaagtttattggacaaaagttttacccacacctagcacatcatagacaacactattgataaaatgaaattaagctactgtatttgattatcctcataatatattttaaatgaaccatgaacaatgaatagctgacctatagtaaaagcaagaggttaaagtaaaaagaaatgtatctaaaatgaaaaaacatacacagtagttttctttgattttaaaccaaacatggatatgcctgtttcattaatgcattatctttagaaagtaatgtggggcttttttttttttttttgcaattgaaaataagattcatttaatcagctatcgtagttcatctgttaaattacagcactttgctgtccattttgtaaaataatcttcaaactaatgaagtaaggtcaattgcatgcaattttattctagccaaattgctgttaattgcatcaacggctttggtaaggtcaataaatgttgcctttttacatcctctcctgaaaatggcagaaaataaacaccttttctctgtaatgtattcaggctcgaggcaactcatagcaggtggactattcgattttcattacctgatttgaaaatgttccatttctaaagaattgtgggaggtattggagtcaccaaagcacttttagcaaagatatcttttagctgggcctggtggctcatgcctgtaatccaacactttgggaggctgaggtgggtggatcacctgaggtcaggagtttgagaccagcctggccaacatggtgaaaccccatatctactaaaaatacaaaaattagctgggcccgatggcacatgcctgtaatcccaactactcgggaggctgaggcaggagaatcacctgaacccgggaggcagaggttgcagtgagctgagattgcaccattgtactccagcctgggtgacaagacaatgtgaaacttcgtctcaaaaaaaaaaaaaagaaaagaaaagaaatctttctcggaagtgctcccttgttactcttgaattatgtcagtggtgtccctcaaatagagacaaacttatactgaacaactcagagtagattgtggaccttgacttgttaagattttaatttttatgataatcagtctagagcagatcatctgttctcctttaacctgtcttacaacaaacagtaaatgtttgtatgtcagctcaaccatagttatactgtgaggtataccagttggctcacctgctcagccgtgcagcctaggtcagtgtaaggaggggatatattacctggacccatggagggttaggacctcgctgtggccttattcctgctgcagacctgacccagtctttaggacttgatcacatctttacaagctttatgctttaagatatgcttttctaaccatctcaatttgtaaactgtgaacactctgtggtttctgaaatggcggagatgtgtctgaaaggtgtcatgtgcgccgtattacaaagaaaccctaaaaacagcaacaagtgagagatacaggtggaagtaagagcagtggctggaggcagagagagactgtggcaagcggatggcactcgacgtgtgggggcagttccctaggacctctgggagagttgcacttatcctattttccttgccttcacataaggtcacaatcactattagagtctgtttgatatactcattactaatattgattttacagttcaagaaacaatatttcttcttttgttttgagatgaagtctagctctgtcacccaggctggaatgcaatgacgtgatctcagctcactgcaacctctgcctcccaggttcaagcaattctcctgcctcagcctcccaagtggctgggattacaggcagccaccaccatgcccggctaatttttgggtttttagtagagatgaggtttccctatgctgaccaggctggtctcgaactcctgacctcaggtgatccacctgcctcggcctcccaaagtgctgggattacaggcgtgagacactgcgcctggccaagaaacaatattcttcttttaaaactgaatgagcagaaatactgttagtagccagctgaattcaggaaatgtgatgcatgtgctggtgcacatacccaagaagactgaagacagcatagaaggacagaacaaaaggccagtgccaagggtggcagagggagtccttggtgcactctgggacaagccccctgcgtgctgggtgtttcgggtggtctgtctccatgtgcaatatcagtcatgtgaagccttaacaaggcattcatttagttagtatttcagatttgccaaccctgttggtgttgggataagggttagagatacagagaagcacccctgccccggaggagatcactgcctggtgagaaaaccaggatgggcttctactcaccccttcaagtccttgatgaaaggttccttctgcaggagcccccagcccctgccttctgctgtgtcctgctcctcctcacctatgctcctggcccctcttcccctgccttattctttatggcaccattgcctttccagcttagtttcagtggcttgctcattttcatttctcctcactatcacacaagctcccagagagcaggaggtcttgtcattttttgttcatttgtttccaccaagatacttagaacaatgtctggcatggtgagccctcaaaagtatttatggagggaatgaatgaactcgtgaataaatgaatgtatgaagtactaatagatgggtgagcatggaactctatgtgatcaagtgtaaaaggcactttcccaaacacaggacttaatgagaggcagtcagatagtcaaacactacagcacttgagttagagaaacgttttgactaatcaaggaagcctttctgggaagtataaatgtctgcattagaactagaaagtctagaacgccgtaggaaggtacagaggacaagaacgatctccttgggcaggcagaaatgatcgagctgcgagctgccggaggaccgcatgcaggggaaattttgcttttctgagtgctgcttggctttgagatgtaagatttagacgttagacactttctagctcattttactatgccagtagtgatcctccctttcttatttctttaagaattgaagctggcatgaatctgttttcaagctgccatttagaagttggaatagtgtgttatattaactttatttattcttaaaatatcatcttggtgcccaggatgacactgcctgaggagctatcaaagagccaatccctgtgggatttgtgagaaaattcagccatctctagacctccaattccaaacctctttcatctcccaagactctatactttgatctaacctcttgagtgacttccttcaatttcttcctttcacagcaacaatttcagtcccagggcatacacttatacttataaactatttctggggccagcttgacctcaaacccgtacaagatgatcgttccagacagagaaattctcaggacatgaaaactttcttagaatgtgctgaaatagggttgtgaatgcgtgtgttgctacctctgaaaacttgatttagtgctgtccagcaaaagtcttgacatcctatgttagttggctcagctctatacaaagaatctgaaagcacggtagaagatggttggcttgtgttaggttagaaaggcgtaacaatgagttgttttctaagtgaccagcatgtgtgatttatgactgtattccagaaaaattcaattatatgagataaataagtacagagttagtatggggcttcagaataacaggaagcagcataaatattgccctcgcccaccagaattcatcactgatggcctgctctggccctgccttctgctgtgcatggaatttttattgagcttgatgagattctgtgtaataagatgctggattccgggggctaatggcctacgagaagatttgagtgttgagattctgtataatcagatgctgaactccatgggccagtggcctattgagaagatccgtataataagatgctggattctgtgggccagtggcctatgagaagatttcagcattgagattctgtatagtaaggtgctggattctgtgggccagtgggctatgagaagatttgagcgttgagattctgtataataagatgctggattccgtaggccagtggcctatgagaagatctgagtgtgcctactggatagttacctgctggaatgcaagttgtcactgcaagattgatttctagtgacaataacaagcagaagctgactaacagcacactgcccaccatctgctcaagatacccaataaagtgtatttgttcctcattttctcggaaaagtctccacctgaaggtcacagtgagatagaccaccacagtgaaaggacatttgaggtttcttcctgcctgcactggtgatgacatcaggaaacttgtgaaaccacggtcttttgtttacattagaaaatgcatgtgagatgacaggtcaacatcagcaaggcataacttaacagagataaaggtaatgctttctgttggttagaaaaagcaaaagttttgaaaaacacctgagcaaagaaatcttgagaataattgctagccaaaaaaaaaaaaaaaaaaaaagaattggggtcatagggaccaacattgagacactgttgttgaagcagcaatgaataggtattttgtccaaataaaaggacgtaatttaatcattgttaatgtattgcccatcattggtaagccctcgggcatacacttacacttataaacttatttaatccacacatagcattatgaaggaggcattatcatccctgccttacagatggagaattggagtagaagaagtagtaggtaacttgcccaaagtcatagagggtatcgacttatcgactgcactgctgagtttagggtctgcagtttgtctgccatgatggctcacatctggagtgtcaggttcagccctagaagccacgttgtctggtggtgaacactgaccatcttgcagtcactgggtccacaagaggggaaccactgtgagaaggtgtcctgtgaccaacattgttgaggagtatctaaagggtgaattcagggaggttgtgctacagccttaaaaacacataaagtaactcagcgtcatcctttcttgttcacactggaagaactgaagtcaatagctggtcctagggagatgaataccaatatgagagatgcaggctgcacagacctggaaacagcttctgtggcttcgctcaggaaagaagccagacagccttctctcagggctcctgcaagtgggattcctgccctgcgggttcccaggtgaacacaaaagtcagttccaactctaaaattatttgtcattcggtacaacaaagataccactgcctccctagcaatagagttttttgtttgttttttgctttttgagacggagtttcaccctgttgcccagactggaatgcagtggcaccatcttggctcaccacaacgtctgcttcctgggttcaagcgattctcctgcctcagcatcctgagtagctgggattacaggtgtgctttatgatgccatgctattttttttttttttttgcatttttagtagagatggggttttgccatgttggccaggctggtcttgaactcctgacctcaagtgatccacccacctcagcctcccaaagtgctgagattataggtatgagccaccatgcctggccgcaatagagttttaaatccttctagaaggtactccctgagccaaccttgcactctctttgcaccccatggttattctgatgaggcagccattcaaggccacctgggctggaggcctggctgctccgagtgcagccctgctccactacatcagcatcaactggagcttgtttggagtggagactcttcgtccctgcaccaaccatcactgcagttttgcagggtctcagatggttcccgtgcacatgaaggttggattcccacatgaaaggctgtcatcataacccacctggaggagctttcagaagactatggtctaggtccttcctcctcccctccacccattgttcttggtgagccctaggcattgccagtgagggtttccaaagctctcccagtggctacagtggcagccagcattgagatgccctggtataaggccacagaagccagccacagtgaccagccctcctgagggttggccatgaactgatctctagggctctgttgagccttttgaacattgtttagagtaagaggaaatgtagttgttataagaaatgctcaatgttccagaagtgctatgagttactagaacaggaattttcaatggcagttttattccagtttgtccccagtgcttcaagagagggttgggtagggctttatgtgtttggggaagttgctgaagaaagcagctgaataactgaatccttttacttataaaaaggttcaaagttgtccagctgaaatgctgaggttgggagccttcaaattgaggacctcagggttctccaaacagaaggcttgcaagttccaggctgaggctaggggagctgtctgtgtctgtggcccccatgggtgattggtcccctctgtctgagcacgtgcgcggaaaaccatgctccgtgggttgacagctggtggtttgcttatttgcttgttttgaaaatgtctattttttaagactctattgtagctgaatttaatataaatgctttcatttgaacatttggccatctttctttagctaacatgtgctcttatttttatttagcctatttttaaccattgagttactacaaaacattatctcaggtttattttcatctgttacatgttttaaactgtagccatctgtgtctgaaacatttttatctgctacaagttaatattttaaaatgttattaattgggtaattatttagctgtcttcaaaaaacaaaaacaaaacagcaatcctgcttttccagctagtgagcagaaagtcagggcggtggggagtgtgttgtctgtccagccctttgcttgggacgggagtggtctcttgtgcttccgtgccctggtcttacctcaaagttactttcttaccttgaagacccaccattaaatataaactaatcagcctatataaacacaaatataaccagtaaaaacaaacaaatcaaactcatcataagtataagcttttagaaaagactgttgtcccaactttgacaaaaaagtggcatagtacatcatttgaaattcaccatactcacatggatgatgtcaccatccccgccctcagactcattgtccatctgttaggaagaggtgcacccaccacaggcagagcacagctacaggcccacacacacttatgccgcactggagaaaccgacctgccagcccagctcatctccttgtttcttgaattacccagttcatgtatgagaacaagaggaatgtgatctgaaactccccagttaacaagctgtaaaactgcttgacgcctgccaggctgtgcgaacaaaccaaggggcaggaggtgagggcaggggcggtggggtggggggttgcattctggaagagtcccagggtttcctctgcatcccttcggtgagcttagtcgcagtaccttagtcacagccaggtagctgccgttctcccattcccaaaggacaaatgtactaggatttgttaaaaagggaaaaatcctctgcatctagaaccaaatacctctctcatctcttccctgatgggagtaatcattctgcacctcgagattgacttgatgtcttaacttttgcattggatgatgttacctatgttgggagttacatcggaaccggcacagtagttgtcaacttcagctacatgggaaaattcatggaagaagcttgaaaaaatgtaggcacccagctgacattcattattgaatgaagtcataggataagcttctttctattagatttttgccccagcactcagatgacctccacaatctacagacaacccagagaagtgggagggttctatcagtgagttacaccgggcttataccaccaaataactggctcaactggactcagaaaatgggctgttcatttgacttggtgtcaggctgaaaggaagcagcttcatccaccattatgtcaagacatagacgagttcagaaattcattgcaccgtaggttattgttgagccacatggaattaaagggcttgcccaaagcagatacttctctggattttgccaagctaggcagtcacacttcccccaaaaagaaaagtagaaattagacaaaaataaactttatagcactagaaccaattttaatgaaccacaatcatgatacggatttagtagagaccataaaatccacaggacaaggtgcgatctccacttgcctttggtcaaagctgagaaacaaagaaccggaagagctcactccattgtgtcctgttttctatggagagatgagccccccttcttctcttcctgtgaaccagcttgaatcggaggggaacgtgtaactatgaggttcagatcacactggaacacagcgtggtccatttatgctcagagtccgccaggtggcatggacttcagacagcacagataccctaattaccatgcctggtcttgcggttcacattcaccgtccttcttaaaagtggggaagggggccaggcgcggtggctcatgcctgtaatcccagtactttgggaggccgaggcgggcggatcacaaggtcaggagatcgagaccatcctgactaacacgccacggtgaaaccccgtctctactaaaaataccaaaaattagccacacgtggtggcggacgcctgtagtcccagctactcgggaggctgaagcaggagaatggcgtgaacctgggaggcggagcttgcagtgagccgagatcgcgccactgcgttccagcctgggcgacagagcgagactccgtctcaaaaaaaaaaaaaaaaaaaaaagtggggaaggggaaagggagccttgtctctatcttccggggtaagcctgcgctgctgggctcctgacaggttccatagactcctcttgcagcacctggggtgctatcttgtcacagcttataacctgctccagagcctggctctgagcaaaattgctgaggctgaaaaaagacagtaatgcaactcaggctgctagggtgttctcactgacaggactgcagattctgtttggctgaccacaagttacaaagatgaagacaaagtgcgagcaattcaagggccagcttgactagctggtaaaacgagtggcaaatgtactaggatttattaaaaagcggggaaaaagattccctgcatctacaaccaaatacccctcccatctcttccctgaagagaaatgattctgtaccttgaggttgaccggatgccttaacttttgcactggatgatgttacatatgttgggagttacttcagaatcggcacagtggttctcagcttccgctgcacgggaacgttcatggaaagaaatttaaaaaatgcaggtgcctagcttgcaactgcagagattctgacttcactggtccgcggcaggattcctgctcttagatttaggtaatctgagagttccccccaagtgattgcagtgtacaaccatggtaggcaccgctgcttaggttgaatgacatcagcagaatgttttaaatcaacaggtttcatgagtttgagatggaagaattgggtgaggtagaacccattaaaatagttaaatgggataaaaaaaatcagaaagttgaaacaatgaaaggcagatgtgactttgtaatcatcaggacatttagatttgcccaagtcccaatacaattccctccctgtgaagccttagaaattcctcagaactgtctttagtaatagaggcatgcaatatgattggcagatgaatttacagggaggagtttgagcacgcatggaaaacgttctgattttgttgtctttgagatgctcttcgatgtcacagaaggaaatgtatgattagtgtcggtgttcttgtcaagagatggctctcttcctttcttaggggaggaggcaacgacgagctttccatgtcccattggagttgttgagagacagggactgacaagatcaataattgtttccaaataatggggcgcattagcagcttcccagggtcatgctaaggtgacaggtgggggcagatgtggacagagacccggaaggatcctaactaaaagggaactcattatgtgtgatggtccccttgccagccataggagacatttctactagccttggttaacctggagccacagtgtgatggcaacaggcgctaggccatgttttgagttagtgtaatttcaaagtgtacagtttaccaaatttgaacttttttttaaattttattttttctagtctggcttttgcaagtgactctgacaaaatatttctgcattcaaatatctggcatttctataacaatttgagaagcttggccttataagaaaatctccaccaacacctggtgtatgttcatgtgctttataaatattaatttcattgaattgaaaagccaaaagtctgtttttatgatataggtttgttttcttgacttttctccaaaattattactagagtctcattttttaaaaagtctgacaggaacatacccaacatatatttttaagtaatacagcagaagaggaaacaattagaaatcagagtgtgtagcatgagtaagtgtaaatataatttcctgaaatcttcatttcaattgtgtgtgtatgcaattagattgtaaaatttattattgattgattgattgattgatttttgagacggagtctcgcactgttgtccaggcgacagtgggcgcgatctcggctcactgcaacctccgcctcccgggttcaagcgattctcctgcctcagcctcctgagtagctgtgattacaggcacctgccaccacgcccaactgattttttgtatttttagtagagacagggttttaccatgttggccaggctggtctcgaactcctgaccttgtgattcacctgcctcggcttcccaaagtgctgggaaggcatgagccaccacacccagccgtgaaatttactttatactgtggaatgtaagtgaaattctgaaagctattggataatggcgttgtttagaataataaccttatagcgtaaaccacaaacatgaagtcagccgactactgcgatgtatgccaagcacaggaatctggagaagtacgagcctcctggctccccactggactttttattggggtgctagaccagtggttctcaaagtgtgctccccggggcagcagcatcagcctcacttgggaaattcctagaaatgcagattctcaggcatcctatcccaagcccaccgaatcattatctctgggggtgaggctcagcaatctatgttttaacccttttcctgtttgctttgagaatgttctctggcagcgcttgcggctgcagtgtttactccggataattttgccacgaaacatctcacttttgttactgtttttgcattgttctagcatatcgtctttggaaacaaaagacatcattctatttacagcattctggttttagtagttgtatttccatttacaaaacatagtaattctcgatcgctgaaaatgtcaaatcctagaaaacgtagcattcctacgcatgatgttaacatcgttcgcaacagttgttgaccaaagattcattagatgaattaaattttcccaaagtagatgattctgatgttagtaacaagaacagtttttatatttcactttcaaattgaaaatcagatttgcttcagcttcaaagagcatgttaatataaaattaaatgagcattgacggcaagctgcatttttttcctaaacaggaaaagggttgagcctcgcaggtggttctcttctgatatgtggcctctgagagaatacctggccagccaggtatgaaggtggaccatgacctccctgtctcagctccaggcctgcgcaatatccatcaatcccataggcatttaggcctagaagctaatcatgatgggtgtttcttttgtttgttcattcgttcgttcgtttgtttttgagatggagtctcactctgtcacccagacgggagtgcaatggcccgatctctgcccactgaaacctccaactctgggttcaagtgattctcctgcctcagcctcccaaatagctgggattaaagacacgcaccaccacgcccagctagtttttgtatttttagtagagatgaggtttcaccatactgatcaggctggcagtgttttcttctttacttctgttgctgaagtttgtaactaactttgtgtcaactgtttatttatttatttttgagacagagttttgctattgtcacccaggctggagtgaaatggcatgatcttggctcactgcaaccttccgcctcctgggttcaagcgattctccagcctcagcctcctgagtagctgggattacaggcacccaccaccacgcccggctaatttttgtattagtagaggtggggtttctccatgttggccaggctggtctcaaactcctgacctctggggatccacctgccttggcctcccaaagtgctgggattacaggcgtgagccaccacacccagcctcaactgttacttgatcaacccttaacagaatgtggaagttagtgaattgctaacgctgcccttggcctgctatttcccagctggcctctctgtgcccagcccagctctgagctgccacatgtcccctgcctttcaaagaatccaccttctggcctgacttttctagctaaattttacaaaccataattcctagctttcctattttctcagaaaaatgtccaccaggtgtttattcaggtgtctcattgttataatccaataaataaacacatcatattcatgggatagcagatatatgcatttatttatttatttatttatttatttatttatttagatagagtctcactctgtcacccaggctggagtgcaatagcacaatcttggctcactgcaacctccgcctcttgggttcaagccattctcctgcctcatcctccctagtagctgggattacaggaacccaccatcatgcccagctaatttttgtattttttgtagagacagggtttcgccatgttggccaggctggtcttgaacccctgacctcaggtgatctgcctgcctcggcctcccaaattgctaggattataggcatgagccaccacgctgggctggatatatgcatttaatagggactctttgatgcctgagggctcatgttatcaattgtgaatacaagacaggcctatgggaggggtgtttattttttgggggggaggggggatgggcagctggatgggagttgagagtggtctcatgttcatcaaatcagcccaagtagatgattgatttctctgcctcagtcagattttgtgacaaggtaaagcagtagattcttgagtagttgataaatgatattacaatcttttctaaatttaaactcttcgttgatctttgtcctgtttgtataacctttatcttttttgaaaaatgttagttcagcaactgtttagtttaattagctgattcattaaacttgggtggtggctcaccaataaaaaagcatttgaatgtttgaatgtcactcagagctcttcaatttctttgcagaaatactcaacctagattcttttaaattctctacctcagaacctgatagaatacttgcatatttttactgatgatgtttcacctatacttaatgtaataagtaaacacactacacgagaagtcattctgtaggaaagtgagtgcggatttctaattacttaggcacagctagtttcctagcctgacaggtgtggaaacacctttcacactcgaagcatgcagaggcttgcatgagctcacctgagcattctgaggagcctccctatgcagttttggaaccctctgtttgattcaaaggtctgctcctgataccagggaggttttagctttctgccaaaagaaatgctctttcatcttcaaatcaaatgttgaagtgggccgggcatggtggttcacacctgttatcccagcactttgggaggctgaggtgggcggatcgcttgaggttaggagtttaagaccagcctggccaacatggcaaaaccctgtgtctactaaaaagtacaaaaattagccaggcatggtggcaggcacctataatcccagctactcgggaggctgaggcagaagaatcacttgaacctgggaggcagaggttgcagtgagccgagattgtgccactgcactccagcctgggagacagagtgaaactctgtctcaaaaaaaaaaaaaaaaaaaaaaaaaagaaagaaagaaagaaagacagaaaaaacaaacaaaaaaatgttgcagtgaaaaaatatcacctcctcctactctcaggatggtacttctgcccattctcctgagtaggctcaagcttctgaaaggagagaaagtgggagtggttgatatttcgtgactctcactggcgaaggcccacttgcagactggccctgcatcccgctgtcctgaatgcacacgtctgtgtgccgtgggatggcctctagagcgattcctccctgaatccctgcaacagacacctctgagtccaggcacagcaggatttcaggaaccagggaggagctggccaggtgtacacccgggcagatacctgtgacccgtgatttcaggggtgacagaaaatgcctcttttccaaacaccaagcaaaggaaccaaaaccaaatctacacaaacatgacctttccctgtaactctcctgattgctttcatcctgtgctttgaaacagggaaaatgcgtagacataccgggaagccagaggggccgtcgtcctggttttatgatgcgggcaggaggaagttatcaagggccgtccctgaaaacaggctttatttggacagtgtgagggatgtaaagaggagaaaggcagaccccagagagaacaggtgccctagcagagatgagaccaccccccggggagtggggagagcctcaatcagagtcccttactggaggtttgctctggggcagccccagtggaggttgctgcctgctttcatgttgtcggatcacattctccaggcagaaatggtttggaggatcctgggatttgaaggctggtgctcgctaatcatggctatgcatgaagcgtaacacagggcggtttgagtcatcttcctcggggagttttgagaggaacctaggatgccttattaggaatgaggttattgcagagcatggattttctgaaagacaaggcaagcacatggccatctggtcagcactcaccgctccctcccctgccccaccatgagtcgcccccaacacgcagtgcctgtgctgaacacactgtgcctggccgtgcgtgggcagtcacttcctagcccagctcccagactggggtcgccctggatgacagcatcacccttgtgccttgttcatttacctattcagatatgaagtcaagatactgtgggtgtccagagatgcttttttaaaaattgcttcctggggaataaaaaggaatggccattaacacattagttgacatgctcaaaatttaatttgcaaacagaagccaaaagagacagctaaaacttttcattggaagcaattaaaataggaaagcaacgggactgaacagttgatagtttgccagtgcaggttctgctctgtgaggcacgtccaggaccccctgcatcagtgtaagtcggcatacaggggttagagtgcaccatcctgggaatgcatgacacataggtgtgcttggttacagaccagcttccccaccacccaggctgaggcctttgcagacagaaatcaaacctacctggattagcacagccctggggactgaccctggaaatggagttcgcgtctcttcccctcttggcctgtctttatcactcacagctcagttagtgcctctcggcatctccttcctgctgtcttgccctgcaccatccgcttcctctctcgttttctttcttcctcacattctttcatttaaaaaaaattccaagtatgagcaaaaaataattttaatgggatgaatacactcaattatggtcttagttgtgtgcttaaagggagtaaacttagaatgtgaagagccagaactagaaggttcacagtctgtgtagtctcttcctaattaattcatttttctgtaagggccagccttcaagaaaatgtagaaataacgatttaattctattttattctttttttatttgattaataattactcaattagatccccatgactttatgtaaggagaggccatggtgtttgcttcgtgaggcggttgtgaggagccatctctgtgaacgggctcctggccgctgaggtgcatttcacaggtgctcatgctagctccctcctcagtgtgggcttggccttgcaaatgggcacaatttgcactaaatgcagactcctatggattttgcaggtagattctagtttttctgaacaatttttgcatttatttctgcatgcgctcatttaaaaattgtgttgttgtagtagagcatgcatactaacattgaccatcttagccatttttcagtgcccagttcagtggcatgagggcatttacactgctgtgcaggcattttccaccatccatctccagggcttttccttatcccgaacggaaactgcgctaattcaacacgcgctccccattccctcctcccgcagcccctggcacccaccattcaactttctgtctgtgagtttgatgagtctaggaagctcatctcactggaatctgatggtatttgtcctttgtgcctggattattccgtgtagcataacatcctccaggttcatccataggttcatccttgttgtagcctgtgtcagaatttcctacccttttaaggtggtgagtgctaagttttaaactgattgccttataagccaaaatgttagaaaccagcctattttcacacaggaggctgtgcttccagaaatctgcctaaccctgtcacgttgctgtgtcacgccatcaggctcttaatgagagcacatgaagaaaccacagattttggagttagacagactccagttggaatcctagctccacaaccacctgctgggtgaccttggggacattatttcatgtttacgagattaggacaggaatagtaaatacctcatagtgttttgtggatcaaatgagctaaggtttaaaaagtgcttagctagcaagggggagaggtcagcttcctaagtgtctgccctcccctggagtgtggtatcatcactgtcactgttgcacgtgagccattttaaggaaaaggtgtgtttttcaggttatctttcctatgccaagagccataggagtgcattgacacgtgcagaccccgcaggaactgtgcattccccgatggcaaccgtgttcactcatgcttctgtctttcccctccacactttgagagaatgggctgacattataggttttttttttcttttctgtttattttttctttttctgttttttttctttttttctttttttttgagacgcagttttcctcttgttgcccaggctggagtgcaatggcaccatctcagctcactgcaacttccgactcctgggttcaagcgattctcctgcctcagcctcccaagtagctgggactacaggcgcctgccaccaggcccagctaatttttgtatttttagtagagatggggtttcaccatgttggccaggctggtctcgaactcctgaactcaggtgatctgcccgcctcagcctcccaaagtgctgggattacaggcgtgagccaccgcgcccggccgacattatagttttaattaattctttcaacaaatatctctaagtactcattatgtgacagacactttgaaggcgctgtattgaagcataggaacttggtcctgagcaaatgagggacttaatgagagcacatgggcttgcaaaccgtgaacccatctcagggactggaaggctctgacaaaagaggagcgtgagtcccggggaagagagggcagacagttctggatgtggagggtcaagaaacgcttttttgaggaggtgacatttgagcggaggctggcgtgaaatgggggagtggattatgaagagtgccaggggaaatattccaagcagagggaagagcaaattctagaacccttgagtggctatatgcctggcacaccccaagggcaggaggtcgaccacaatggcgaggggatgttggcccgggtggaggggtaggaaatggagtgaggcaggacccggaaaggcaccatggctgcagatttctatcagctgacctttattcactacggttttagtatgagccttgttacagatgaaatgttgtggaggtcctaacctccactgtgctagtatttggaagtgaattatttgggaggtgattagggtgagatgaggtcatgaaggcgtggccccatgatgggatcagtatccttataagaagaggaagagacgccagtgctttttctctgtctccatccaatgtacagactcagtgagaagggagccatccacaagccaggaagtgagctctctgcaggaacagaagctgccggcaccctgacttggacttccagcctcagaactgtgaaatgtctgttgtttaaactactcagccattggtatttcattatggcagctggagcagaccaacgcaagccttttattctccaaatgattctggtgacctctcaagacctttctctatgacgcccgccaactttgtaaataaatcctaccctttcatgaatggacgcagagtgaggaagagtcacttccttcacactcaggagcacatatactcacctgctggcccacctcgaggggcccagctaggtcagtgccaggagaggcaaggttggtgcatttcacattacccccactgaccccaccactggtagctgcctgggccccaccagccttcccggaaaccgtgtgcatttgcacttagccagacagcacacggtgagaggcttatttgctcatatggtactttcaagaatctgcagcattgggtaatttgctggccatgtggagattcccatgtgcggggaagggctgctgggctgaggacctgagcagatggtggtcattaatagcaccaacatgtgaccagctgtaattgtgctggaaggactgaagccactgatggttgctccgtactttggttctacttaaaaaatacttttagcaggacataattcattatacaaggcagcattagcaaagaaatatcagactcccagtaagtgccattttcctacccctgtgttttaacaagtattcctggtgtttagaaatacatagtctctcagtcatcgtgtgggtaaaagtgagaagagttgtttttctcagtggatcaagactaagtcttatgagatttgaaatctagaagctctgctaaaattgcatatagcaatgcctgtgaatatgtgaaccgaatgagaaacacatttgtgtcctagagcagaaacttagattcagctctttatacacacaatgacccctcctggttaattgacttgcaatggtagtttcaggtatccagcagtagttctggctacagcagatctgtctacccactgcctctaaagctaatctctccagttaatagcttgcagcctgggcctcattaagtcaaagaacttctgcccatacaataggctgtaatcctctgtattagtatgaggtaatttggctcctaactggggaatttttctcgtctaataagaggagaaattgtttggtacagtagaaatcatatagtttcccagcatttggctcttggagaaagtcagggattctgtatcctgttccttacctctggagggattcttaagttgttttgggtatcttacagcaaacacttttagtgacaaacaagtcaaattaataataataataaaaaacctaacagttgttgactactgcgtgcttaagaagagttctgagccattttcttgcatgaactcataatgcccacaacaactctctaaggcaggtattcttatccacatgttgcatacgaagaaactgaggcccagagtgattaagcttcatttaaaaagcgtgaaatggggcagtgagtcatgaacagtgccggaggaaatgttccaagaagagggaagagcaaattctagaatccttgagtggcaataagcctggcacatcccaagggcaggaagtggaccacaatggtgagaggatgttggcccacacagagcggtaggaaatggagtgaggcaggaccagtatcgtaccagtgctaagataaaagcccaagcagtctaatttggagtccagactcttgatcattgatatgatttggctctgtgtctccacccaaatctcatgttgaattgtaatccctagtgttccaggaaggaccaggttggaggtgattggatcatgagggcagtttccttcttgctgttctcctgatagtgaatgagttctcataagatctgatggttttaaagtgtgctgtttcccccttcgctctctctcaccctcctgcttcactgtggtaagacgtgccttgcttccccttcaccttccaccatgattgtaagtttcctgaggcctccccagccgtgtgaaacgtgagttaataaaatctcttctctttttaaataaattacccagcctcagttagctcttcatagcagtatgaaaatgggctgatacaatcactattcaatatagcttctaaaacatacatttgtattatagcatgctagaccaggctgtgtgagccacttgggcactgcatggatttgggtgagccggggaagatgtcaaccccactgtcagttgttatgcaaaggggagccttgtcttcatcctaagttgaaatcttagggactgtctcttctggacataatagaagtgtgtcctgtgtccataattgtaaataaacttactggcatatagaaacagtgcctggtgagctctttttgaggatagatgctaggtcttctctttcattctcaggacccagcacaatggtggggccactcaaatgtttttgaatgaatacatgccatttttttggaagctgtgagagtttatacatcatttttcacctattgccagacatttgctgtctccatatcttactctatacatgaaagcagaaagtagaataagccattgtatgatttcagagggagaagtgaggaaatgggaggtagctgtgtaaaattagatataaactaccatcaaaaagtaattgatttaaggccctcttaaaaacacattgtcttagctttggctgctatgacaaatgaccatagactggatagcttaaacatcaaaaagttgagaaaatttatttcatacaattctggtggatgggaagttcaagatcaaggtgcccacagacctggcactggagaggagggctcccttcctggtttgcagatggctgccttcttgttgtagccttacatgtcagaaagagagagagaagagaaaactctcctgtctcataaggacactaatctcattcatgaagcctctaccctcatgacccaattaccttttgtattagtctgttttcacactgtcataaagaactacctgagactggataatttttgaagaaaagaggtttagttgactcacagttccgcatggctggggaagcctcaggaaacttacaatcaaggcagaaggcaaaggagaaccaggcaacttcttcgcaaggaggcaggaaagagagcgagtgaggggaaactgccacacaattgtaaaccatcagatcttgtgaaaactcactcactatcacaagaacagcatgggggaaaccacttccatgatccaatcacctcccaccaagtccctccctcaacgtgtggggattacagttccagatgatatttgggtgggaacacagagccaaaacgattcacctctcaaaggctccacctcctactaacatcacattgggtgttatgatttaaacatatgaattttgttgggggacacaacattcagtccataacacatgtgttgataattacaactcggttccaagaggtgcctccataaaaggtcacagagaccccaagaacagagctgcctagagttctattgcagaactccagggttgcagcaattaattttacatctaaaatgttgctgtaagaatttaccccacaaaaattgatcaatgggatcacttggacacagggcagggaacatcacacaccagggcctgtcaggtggtggggggctgggggagggatagcattaggagaaatacctaatttaaatgatgagttgatgggtgcagcaaaccaacatggcacatgtatacatatgtatcaaacctgcacattgtgcacatgtaccctagaacttaaaagtataataattttttaaaaaaagaatttaccccacaaaaatgtgggagatgtaaagagaatagaaagcttgtctttacagaagaatgctccctaataaatatagaaagcattgtggatatagaaaagcatgattatgcaattcccaatatcataattgattaaaccaaaaattagtgaatgctaaaaattattgtcatagattattggggataagatatccatagaatattcatgtgtaatttcacagattcttattagtttaacatgaaaatattacctgtctaatggagaggtctagtggacacaacttaagccaatagccaaactaagcattgccaatattgggtcaaaatatgcgcttcctgatatgaagccatctgccacccaaaatgccacttatgtacaattactgcccaaaatgtttaagtgaatctaatcatgaggaaacaagcagagaaatccagatgtgggcccttctacaagataactggcctgattcttaacatcaaaacaaaattaaaaaacaatgtcatataagcaaaaagaaaccaaccaaaaagtaatgaggttgaggggagaatatactaaattgaaaaaacacacacaacattaaccttaattgtttcattgattaaaaaaatagatgcaaaagacattttgaaaaaattggggaatttgaattggggctgaacacctgtgttgaatgtattaggtgtggtaaaagaggggtaagagtagggttgtgttagaataaaagaaggtccacattgggaaacacacgctgaagtattttggggtggtgtttgcaaattattttcaaatggcttagcaaaaagagtgtgtgtgtacacacaaatgtgtacatatatgtgcatatagagggagagagtggaggcataattgtagtaaaatgctaacattggcgacatctacatgaagtgcagacaggtgttcattgtgttctccattcagcttctcctggaatttgcaattctttagcataggtagcatggggcaggtgggaggagatcatacctgtgcacaccaggtgaatcccagttgggaaacggcaggtgagtcctggggacatatgtgtctctgctagagcatccttctctttgctccagtgctatggggtgcagacgggggacatccattcatgcttttccttcttcacacattcccctggtacctttttgctggcagggaacacagtccagtgtctgggctgcagatccctcatggtcagaagaggggtttggtgagaagtgggagactggttgctagtcctgtgagtgcatgccagaggccatctccttggttcatccctgtttccccagttctgggcacaacttgcctgtgtttgccaggaatgcatagcttatctgagcttcctcatggggtgagtgggtgaggagagatggtgttatcatcaactgtcaaagctggaggcttccagaaatgacactgctgtccagggtggatggcagatgccatctggactgtctcatctcagtgtgcaggcctctagggacatcctgccctgggcgtggggcttctctgccatgagggggatcctggtgctgtgagtgtatcacaggtgatgtggcaaaggtgggcgtgggcaccagatacagacatttccagtgggatctcgttgtactttcatacatgtcactgccggactctgtggtcttaaaagccatgaagccagcccaaggacccttgccgctccatgccaggcagcctcctggccccgtctgactcgccttagggggtgccttttactccgttgtgtacaaagcattttgaaggaagagaaggaactaacagttagtgttgtcagtattctcagaattttggcaatatcccataataagaaatctgtttgatcaactcatatacacctacacatgtaatgcctctatatgggtctgtgtgtacatatcggtatgtatagctgtgtgagaggatctatagacatatgtgtgtatgtgtgtatacacatctataatgtatgacaaaagtttcatcagaccatccgtacgctcacactttgatgtttactaacatcaaagcattagtaaatcagtatttcttaatgcgctgcttgttactggtttaggctacttatgatccgaaaaatgctggtttcagcaacacggaaaacataaaaagataattatagaacagggttaggaaaccaattctgtctgatgtgtgtgtattattacatgagagtatttgtatgtatccatgtatgtgtctgcatgtgtgtgtatttccatttatctttgcaatggtgcagggcaactgtgggtctgctgccattgtgacttgtttctgtcctctcctgggccgggcccttcaaaaactgtggagggacatttgtcattggtgtccgagcttctgtgctatttctccagaggggtcatgggatgacacagagaggccctgtgctgcaggtaaatctggaggacagcttgcgcccagggaaattacatgcaaaccaggttttcctgtcctcttgagtggggcttttttctttcagaaacccccctttttttttcctttttttttttttttcaatgatctctgcagaagcagcagcatggggctcaaatttgaagtgagccgcagatgcaggtttgcttgcgagtgactccctctgctcaaaatcgtccgcattttttttcttcttctgagacagggtctcactctgtcacccaggctggagtgcagtgctgcaatcttggctcactgcagcctccacctcccaggttcaagcaattctgcttcagcctcccaagtagctgggaccacaagcttgcgccaccacagggcatcctgtatttcaagcttcccccttttgaaatgaggattgctgacggatggtgtgcaaactttagaacttgttgtcaagatgtcagttgaatcttaattaaccattgaggcagcctgggagatacgcctattctggtaggaatttttattctttcaagttcaaggatttgtccttcatcattttccaatccatgggatggtaacaataaaaatagctaatagctaacaaatgtttactctgtgctgcgctcagcgctcagcgctcttcatgtgttttttctcctttatttgttagggaatgaatgagctcactagttgccttcttctgccataatttttcttccttgttcacatgtggttggtggtatatattttagtattcctttttgtttgtttgtttttgagacagagttttgctgttgttacccaagctgtagtgcaatggtgcggtctcagctcacctctgcctcctgggttcaagcgattctcctgcctcagcctcccaagtagctgggtttacaggcacgcaccaccacgcccagctaattttttgtatttttagtagaaatggggtttcaccatgttaaccaggctggtcttgaactcctgacctcaggtagtccgcccgccttggcctcccaaaatgctgggattacaggcttgagccactgtgcctggccaatattccttttaaaatctcaaacctgccaaaacatacaggagggagaattattagctcatcagattcagtatatcaaaatgaacctgctgacaaggtggaacataattcacagactacagctgttattaatgtgtgactatttctggcaaggcccagggtgcacaatcagaaaactattaatatataacaggctgaagtggaaatgtgaatgagccaatacttggaattcctatagtatttacactaactgttcctctgcccttctgaactgagtacttcgcaactcataaaatacaatttcctgttttccactttgcagcctcttcacatctcctatttcttctggctcctctaattaatggaaacacttgcatttgagttcgcatcgatttgcaaaacattgtttaatatgagaatattttcaccgtcgagggcatgttgattattcctaggtgtaaaacattctagtcaaatttaatataagaaagtaacatgcattgtcaataattacatgaaaaaatatggtggaagatttttttctctgattaatgactcaacagttttaaacatgtgttagtgggctgggcacagtggctcacgcctgtaatcccagcattttgggaggctgaggtgggcagatcacctgaggtcaggagttcgagaccagcctggccaacatggtgaaacccagtctctacaaaaaatacaaaaattagccaggcatggtggtgcgtgcctgtaatcccagctacttgggaggctgaggcatgagaatcgcttgagcccaggaggcagaggttgcagtgagccaagattgtgccactgcactccagcctgggtgacagagtgagactctgtctccaaaaaaaaaaaaaaaaaagtgttaatgaattctttaaaataatacccatctcttcgattcatgaaaggattctttaaactcctctgcaagagcctgagtctgcccagcatcacggtgatggcctccatggtccctcttgctcagggagcagctgctttgcacctgggactctgcacgctcaccccattcagtctcccgggtgctccctggcaggtgcaccatcatcctcatttgatggtcgagactggagcgctaagagcgttggtgcacactggtgggacccaagctcaggtgtctgtgagacaaggactctgccctccagtaatgaggaaggtggcatcccctgtccctcaggaagattattgtttatttgaggaagtgcggtgtaaagacctgaatcaggaaaggacaagtcaaggcattgtggcatccaatggcatcttaaatgcctctgggagaaggaggtcactgggattgagaacattcagaaaagatttgtgggaggaggctgaacttgggcagacacttgaatgaaaaggatgtggggagtggaaggagcaggcattccctgcagtggggtgctgagattcagagaaagaagaggtgcagggtggtgtcttgatgaggcactaagaccagctcacaggccgatgagggtgagatctcgaaatctgtctgttgtcacactgcctctctatactaacagttttttagtgaaaaacacagtgagaaccagataagtgagttcactgaattttatttccaaaaaaatggaaagctctagtaacgttctgcagtaacactttggctcatgtctaagttctttttttctttctttctttctttcttttatttttttttgagacagagtctcgctctgtcgcccaggtgacatttctcacaatagcaaaagtttgaaatatgagtgttcatcagtagtggaatgattaaattagggtacatatagacagtgggatactctgaaactgttacagatgatgatatagctctaaaggaaattgtctatactatattcttcagtgaacaaggtaaattagaaagtattatatagttttttaaattttatttatttatttattttgagagggagtctcgctctgtcgcccaggagtgcagtggtgcgatctcggctcacggcaagctctgcctcccaggttcacgccattctcctgcctcagcctcccggtagctgggactacaggtgcccgccaccatgcctggctaattttttatatttttagtagagacagggtttcaccgtgttagccaggatggtcttgatctcctgacctcatgatccgcccgcctcggcctcccaattttttttctttcttgcattatgcatttttcatcaaatgcttggcttcgtgccttctaccatgaagaccccacttcacagcgacacatgctcttgggtcactccgccacccgtggggttgtgaatcaagttcttcagggagagaagacaagctgacaggggtgggacttgagttctgtgcatctgtgatcagattccgcctccacagtgctgggtggtgggaggaagcccattcatctctgtgagactaaagtccctcatctgtcaatcaagatgctaaattttatttatttatttatttagagactggcccttgttgtgttatccagagtggtgtgatcatatgagatgctaaatattccctcgtgggttgtcatgaggttcagctgcaaccctggctggcacaggccatgacacttccagcaatgtacctgcccagctgggattaatcactgacatttaactcccagttgatggcacctgtgtacggatgaattcctcaaaacagtatcagaatcttacgtactcactggtctcagcgagtattcacagagaaagcaagaaggatggtatttgattactcaataagtgagtcctgaggggtcattgctaggcaggctgaggggtggtctctgcagcccctcacagcctttgaacagccagaactttgattgatgaacaggtgctttcctgtaaaaagcaagaagcactatggaatcacagtttttgttgattttttcccctgctggtagtctggtcttcatgatatcattcttccagaaagccaaccctttcttgcaaaagtacaaggtgtgctcaggaaaaatgctgctagtgccaagattcctctttccatttctgtggccctcaggtgtggacatcgctgccttattttccctaaagtgacaaacaggatcacatcacatatttaaactctgaaatcggtattatgaggtttaatctgtatccatgtaggttttatcttgttgcaactgtttccatcctctcgcatttccagtgcccccatattgaccaggagcaccatctaggcatccgtttgtgttcctcctgccccccacccccaccatgcttctgtctgtcttctccatgagtaggaggaggtcacttggatcgagaacattcagaaaagatttgcaggaggagactgaacttggagagatgcttgaagggaaaggatttggggggtgtgcaagagggggcattccttgcagtggggtgctgagatacagagaaggaagaggcttagggtggtgtcttgatgagacactaagactggctcacaggttgatgagaacgagatctagaaatcggactactgccatgtcagctcacttcatgaatatcatgaagaccagtccaccaggaggatccaacaggaaggcaacttttttaagcaaagggattctagctctccactggattaccctgtttcatatgtaaaagttaggttaactcggaacaggagatgcaaaaaccccatctacttagagaaagctgaggagaacaaaagtagcgttagctggagacatatgccatttgttggagtgtccactgagctcgtgcaatactggttgaagccacttctcacagagatgaagcaccccgtgggtgagcctggaaataaaagtgcatggagccaggctgtggatgacggaaatagtaaatggcaaagcagaggagggcttgagcatgggtgggcaggtgagcaagcgtgcagggtgcagaaaccacagctgtgagaaggggcttttccagagtgaggttacagaaagatcaagtgaggcaggacagcatgtggacctggaagagaacataggcaaggggcgaaagagtgtggaaagaagagaaaatgaagctatatagacttcaagtaacagcatcattgctctagaactaggtcattcttggtctctgagctccggacaaattctgaagtgacctacatcattcatagaggcagaaggaggctaccattcattccagcaagcagggaaggctttcttgatatgtgctggtcccagactaagcctggaacacagtgacacacagtccttgccctcagggaactgaaagactaggaggggagggagtcatgtccataaattcaaaggccatagttgctgcaagatggcaatgagatgctaggagactataggtgggttttctagccaagtcttgggagaattcaggaaggcttcctggaagaggagacatccaagccaaggctgaaagagcaggagcccagcaggtgggtgggcccaggccatggacatagcatctccaggaggatcatgtgatccacccagactctcatctatgttgtttgcttttaccatgtagggtccctaccatttattttctcatatgagtgaagctgtctccttcaccagcccccacattatcatgtactgttttcatccagtcctctacagcctccccccaaccgagccccacagcccctgctgccaaagggattactgtaggctttgggacattctggactaatcccacgttcttcacccccttttatgtcagtcaccaggagaagctggtgactaaccacagttggtagctctttgtacgccataccttccccgactttctcttctgcttattttttctgtttcttgtttcacaatctgacatctcatgtgtctggaaggtcagctccatgaggtcaggaattgcctacttttttttttcaactgttgtacactcagcacctagaagagtacatggcatgcagtgggtgctcaaaacacagtgattgtgctgagtgcaaaggctcagcctgtaatcccatcactttggaagaccaaggggggagtttcacttgagcccagaagttcaagaccagcctgggcaacatgacggaaccccatctctattaaaaatacaaaaaactagctggatgtggtggtgcacacctgtagtcccagctacttgggagctcgaagtaggaggattgcttgagcctgaaaggtcgagctgtaatcacaccactccagcctgggcaacagagtgagagaccctgtcaaaaaatatatagtgattgaatgaatgagttatactgctaaatggtttaaacaattatctaaacattgtttatgttcttttgagactttgaagacattgactttcaaatccagtagtttccaaatttaatcatcagaattacttggagcactttttaaaaatgcccaagtcttccccccaaaactcttggagtagttacttcaggatatgcgactctgagattttggttttgattcagatataatccaggcattgggaccattttgcaaaggagagagtagaccagagataatgagtgcattatctctgccagggtctgctggggagaacctgccctgatgcccaggccagcgtgctctggctgcctggcttatgtctaacaggagctggagggcatgagggtgggacgctactgttcacatcacagggaagatgtgaatgggggtggtttggggtggagcgttgaccaggcttttaagagaactgtgggtttatgcctggtaatgataaaggaaagtagatttcaggtgcagaaaacatatccgttgtcatttaagtaaagttagaatcataggtctgagataatttaatagacttttccatttgtcaaagatgtatgtcttatttcccagtgatctctttccttctcaaatatacttgctactacaaatgacattccaagagcccatttcagtcccctgagcgttttgatttttctttcgagcagtagacctgctgtagtttaagctggttgggaaagctgtcgttcaccttgatggattaccgtccccgcagtgagcacccagtctccagaaagttcacggctccctcaccttatgtatctgatttatgtagaaacgtcgataaattagttaggagggcattcttgctgatatcagcaatcccagagcacctgggaggaaagcagagtgaagattttgaaagtcacaggcgatgtcggccactctcctgtgtggcccaggaacctcacacaatgataagataaggaagtttaatggatggtgctgccttctgaaagattaatcgtgccttgaaatctagatattttcatttcaggctgaaaacagtaaattagaaattaataaaaaggagatgatttcatcagctcaacaagtgcttctgatttcaagaagttttccttaaattttttttttcactgctgaaaaaaatcagtgtcttgataattttatgaagtagcctgtaattatttcactatggctttgcatctgagaactgaccatttgtgttttgaattcatgtcaaacaataatatattcgatagcattttatgatttattttagtgcctaaatatttataaaacaaaggcagggttttttattttcaaatttatgagctagataatgtcttgaagatgtacaacatagtatactaattttccttgcattctggcagtcctcaaaatgtaataggcaagtttattcttagacaaaagcccatttaattaaaactcacacgataactttcatacatagcaattgaattattcctaaaaggattaaatacctaagctttgaagttggatgggtgattattacaaaagccagattaatacaattgacctaatttctagtcagtgacattataagcagccttgtaagaatagctgttactacaaatatgcgggtttgcaatgttcaattctaaagtggtctaatttgttcttactacctgccagaatgtatgcattcaagtgggtgtcctccatgacagctttaattggtagtacaatggtatgagtgtggaaaggagctggtatttttcctgtttattcattaattgaacaattgattggtcatctactgcatgccagttagcttattaggggctcagatgcaagtgggggaaggtaataatcaacaaggaaatatctgtcatgtagagaaataaaggaaggtagggtggagggttaaagtaagacaggttcagtattccactggggatcagggagggctctcacttaagtgaggtaggttgaccatggattacctgggggcagagtgtgctcaagcagcacctgcaggccacagggaggctttgagttttgttctgagtgagattggaaggtgttggagagtttgagttttttttattctttgagattggaaggtgctgggttttattctgtgagattggaggtattgagtgagattggaaggtgttggagagtttcaagcagaaaaactgtaagatctgcagatgttttaaatagatgtctctgtaaattgtaaaactgtaagacatgggtaagaagcaatcattttcaggggtgagactgcttgtaggacttcacatgagcaaacgccaggcagagtgtggaacctggacccttcaaagagaaacgcaggtggaagaagcagcaaggaggaacggggcttagctgggccatcgccgccgtcttctctggcactgcccctgtgttttccgttcagagaaaagcctttcctagcattcatgacccccatcctgtatcatccaggttccacacggtcctcttctgagagaccctcccgactactcctgtgcccgttgccatgccatttgttggatcacttgcaggccccgagtctcaaacacatgatttatcatcagatcgtacagtcgtcagaagggtcccaccgtttctaaccatgtgacctgggcggttgctttacttctccgcacctcaatgtccttgtctgtaaaatggggcggatcagcccacctactgtttgggattaaatgaggtgatgtgcataaagctgtcagtgccatccctgggctgcagcgggcgttctggaaatatcacagattaccatcactgtccgccgcgcggcatccgtatgcccttgattcatacacagtgccacgcgtgggggcggttctcagtcagaaaataccaagagcagccgccgcatcttagaatttgctgtgttttactcagtccttttggggtgtcagcattttgttttctgtgtgttggcagttgatcggtaatttccaccgatgcccctgtacctcctccatccccagtcttcccagtctgcatggcttcaggtgtcacttctgggttcatgtctgctaaatttatgttggtagttttagactctcctaatcccctacttggcgttcctcatcattggtaggcacatctctgaatgtgcgtctttccagacccaaattcagctcgtcttaaactgtactcctcttaaaacctatttctccttaattcaggttacagggaacactgcctcccttagtccatcatttgggcagcttcggtcaataaccctcccctgtggttcctcttctctcagatttcatcccctctgtcctgatgaagcccctgcttctagcctctcaccagctcctcttgttcatcttggctatagatgcttatcagcaaagatgttggttcttcccaatggtgaggataaagtgtgggtgctgatgaaggcaggatagtgacctgatgtagggttctctgggtaaaacacaatgtttaggattcccctctagcacaaggttgctttaggtctcggagatcagtgcaccaagagaacagcaaccagcagtgacctctcctaatgacagtggtcatactagtatgaccatattaccagaagaaagaagagaggttgttttttaaagcactggagattccatgtcagaaaatgtgctattctggccgggcgcggcggctcacacctatagtcccagcactttgggaggctgaggcaggcagatcagttgagctcaggagttcgagaccagcctggccaacatggtgaaaccctgtctctactaaaaatacaaaaattagctgggtgtgtggcacacacctgtaatttcagctactcggaaggctgagacaggagaatcgcttgaacctgggaggcggaggttgcagtgagctgagatggcaccactgcactccagcctgggtgacaaaagagagactctgactcaaacaaacaaacaaacaactgtgctattttaatagatattcaactaagaaatgggtgggtgtaagtgatttaacctgaacccatctcagcagaaacctcagttgatgaactttttcttttctttttaaacccactttaagaagaagtacatgacaataccgcagcccctggaggttatttcatgcaggtggagagtggattcaccacatcctccagctctgagaccggtgttcagtgagaggtggttgtgggctttgagtctgtgagatcttcagtcatccaagttggattttgtttatttgacttagggtagatgttggaccaatacctcgtaggaaggtttttgaatcgggagttgaagcaaagcagcatttcttgttagtcctcagttaattagaaaattaaattaactacaatcctcattcccagagctttctgggtaattgatgtcttactgtatttggattagagaaggccccaggaggcacaaggttataattgtgtagaattagagaatctagggaagaaggaatggcaggtaatttgcaaaatttcaaggcagggggccctccccaaagtcccatggcaaaggcattgcttggtgagcacgcggggctgggccagaggctgcctactcgggagacatcagctgtgggtcaagagctacttaaaagagaattcaggagatcaaagtattgtcttccaccattcatcagaagaaaatacatctagatttaaaccctggaattagactggcttgatgcttttaatttgcatttaaagtcttaaactttttcttcttccaaatatttaccattttctgtagtccttttaagtatttggactagacttatttagaaatgtacagagtgcagaacaatgtagactcttgagtggctaagagtctaaacggctgaggaatgtagatcatttttggacttaaaatgaagctttaactgcccccaaatggaggacctccttttctggaagcaaattgcaatctgaatgctctgtgctaaagcttaaagcatagcaggagaaactattagaatttgtatagtagcattgccttggacgagcctagtgcaaactgagcctggtatgtggaccaagtactgtttatgacttttctttaagcataagttactcagggaaagtattatcaaaacaaatttggttataattgtcttcagacttgtttttctgggacttgggacttaaaagaggggagtaggctgtggataagctttggagttggcccacacaatggagattgttcaatttttttttttttttgtcctctcagacccagtaactttgggatttttattgactacttttttctccaatttttaaaattatggtaaaatatatataacataaaattgtccatcttaaccattttgaggtgtataatttggtggtattaaatgcattaataatgttgtatgatgattaccaccatctatctctgcaactcttttcattttgtgtagctgaaactctgtacttactaaacaatctcttcattcctccctcccccaatcgctagcaaccaccatccaatgttctgtctccatgattttgactactcttaagtaccttgtataagaggaatcatcaagcatttttctttctggactgccttgtttcacttaatataagtcctcaaggtgcctccatgttgtagcatgtgtctgaatttccctcaatttttagtctgaatagtattccattgtatgtgtatgttacattttgctcatccatttatcagttgatagactcttggtttccatccatgttttaggtattatgaataatgctgtataccagaagtggaattgctggatcatatggttatttcatttttaatattttgaggaaccatcatactgtttgccacagcatctctatcgttttacactctcaccaacagtgcacaagggttcagtttctccacatcctcactaacttattttctgtttgtttgtttgtttgtttttaacagtagccatcctactaaagaggatctcattgtggttttgatttgcatttccctaatgattagtggtgttgagcatcatttcatatgctatttggccatttgtgtaccttttttggagaactgtctatttaaaagttctgcccattattgaattgagttgttttgttgtattttttgagttttagaagttctctatttgttaattccttattacatatatatatatgaattgcaaatattatttcctctcctgtgggttgcctttttattctattaatattgtcttttatgcaaaattttaaacaatttctcgaagtcctatttgtttatttttcctggttgcctatgcctttggtgacaataaatcaatgccaagaaatcatggacaaaccaaatgtcatgaagttttgccctgtcttttcttttaagagtttcatagttttagatcttacatttaggtctttgatccattttgagttaatttttgtatatagtgtaaggtaagggtctagctttattcttttgtatgccaatatccacttttcctaatcatttgttgaaagaactgacatttcctcactgaatgattttaggacttttaacaaaagtcatttgtccatatatgcaagtttcttggctctctacttaatgcattgggattgcgatagagatggtgttgagtctgtatatcactttgtgtggtgccttacttcatttgggctgctatgacgtaataccatggactaggtagcctctaaacaacagacatttatttctcaccattctggagtctgaaaagtctaagattaaggcactggcagatttcacatctgatgagggtgtgtttatcatagatggtgccttctctctgtgtcctcaaatgatgaaagggacaaacaggctctttcaggccttttgtaaggtctctaatcttatccgtgaacattctgccttcttgacctaatcaactcccaaagtccctcacctcttaataccatcaggttggaggttaggtttcaacatacaaattttggggggaaacaaactttcatattgtagcgggtagcattgacatcttaacaacattaagtcttcccatccatgaacatgggatgtgtttccatttaattatgtcttctttaatttctttcagcaaggctttgtagttttcattttacaagttgttcacctccgcggctaagttaattcctaagtattttattctttttgatgctgttgtaaatggagttgtttttatcatttccttttcagattgttcattgttagcatagagaaattcaactgaatattgtgcatggactttgaaattttgcagaatgtactgattagttttaacaggattttaaaaaatgggatccttaaggtttttatatataaaattgtatcatgtgtaaacagatcattttacttttttttctgatttaaattacttttctttctttttttatttttggtctaattgttctggctagaacttctaatattctgttgaatcaaataagtggtaaaagttggcatccttacgttgttctctattttaaaggaaaatatttcagtcttttgtcattgagtatgatgttcactctgggtttttgtatggattttatttattttgaggtagttctcttctatttctaatttcttgagttttttttttttttaatcataaagcgctgttgaattctgtcaaatgctttttctgcatcaattgagattattacattgattgctttttttaaagtccttatgacttcggaagagaatatacttacgaattgttatttttgaattgacctgatttaactctccagtcactcaaataatggcacaaataaaaattataacaatgattatgtgcttactatgtgcatgacactgtgcaaaacaattcatgttcattatgtagttactactcaaaatacctcctaggtaggtactgctattctttccattctacagatgagaaaccagggctgagagatgttcagtaacatgtccaagccaccaggccaggaaatagtgggactgtgatttaaactctatttaactcctgtgcctgcacttgtgagagctgtgctacacgtgtggacaggacccttattctaatactgtggagtggaaaggaaggaagaaagggagggagggaaataagtataatgatcctcttttcctataacttcagagagagtaattgtccagctagcaccttcctgaaccaagggaatgctatctcgtgctcatattgaaagaaagataaaaagacaatcggtgaaggattgtaatgaagattaaaggagcctggagcacaactttggtttccctgatatttttcattacacagagttattacgtgttagagcacacacaaagtgtattctcggccaggcacagtggctcactttgggaggccaaggtgggtgaatcacctgaggtcaggagttcaagactagcctggccaacatgccgaaaccttgtttctactaaaaacacaaaaaattatctgggtgtggtggcatgcacctataatgccagctactcaggaggccaaggtaggagaatcacttgaacctaggaggcggaggttgcagtgagctgggatcgcgccactgcgctccagcctgggcgacagagcaacactccatctcaaaaacaaaaaaagtactctttttttgcagaggaagaacattataataaatgatgaaatctatgaaacagaatgaaatgggacctgcttttggaataatctaatgaaatagattattttaaataatctagtaagataaattagatttataagataaatttagaagataaatgtaaaattataagataaatttataatataaattagatttataagataaatctaataagattattttaaataatataaaataaggtcaaaatgaaggcacttctgatgttttttttcatgagcattaagcagtgcgcaccaactgaactctagtataaagtggcttaccagaattataaaaagactgcacatgttcaattttaatctatatcttatgaaaatggtaatggaagagacaatctgcctgagaaaggaatagaagaatcacattttagttttaatttctcattgataaacctcctttagaaacgagagagtattctagaatcgtccaattgatagaaaataatgtatttccccaaatgcaatgtctttgttatgaagtcacacctgcactattgaataaaatattatccatgttgtgtgtgacatgatttcagtagaataaattatcagtgaatgacccacaataaatcatatgcctccacttcatgctgttaacacttcatgctgttaatacttcatgctgttaacacttcatgctgttaattcacttctgatggggaagctactcaaattccgatggaaatgttgatgttgcagcatttgggatgagttctaatatgtttgttcacttttaaacactcctgagatgtggatgaagaagctgaccagcaggtgtgtgatacatttgtttgcgctgtgctgtactgggaggaaagaaagcagcaaaggtgtcttctctaataaacaccactctttccccttctagatctccaaatctttctaggtcttggtgcctttgagcctttcagtcaatcttttaaataaaatggtttccaggtgtttattcgtgtcaatttaattttccctaaaaatacatttctagatttttacccaaccactgtgatgccgtaaaatatggcagaattctgggcatggtaaaactgttaggaagaatcagagcaccaaccctagatgtacataatgcgtcagggtgtgaggttgagggtgttaatgacactatattgagacagtatattgagcatctgtgaggcacaggcagtcaccagatgttgtgcatatgtagcttgttagttttgccaatacctctgtgaggtactcatttttaagcccatccctaaaaatgaggaaaccgaggggcagataatttaaataattgcctaagatctctcaactaattagtaacagaatttggattcaatccaagatgatcttaactctaagcattagcatgctacaccatcacactgccagatttacctttgagattcatttgtaggttgtatgcagtgatagtatcgcctttgttcatttgcacatcaaagacttcgtgaccaatctgaacacccttgtatttgggcaccaatgtgatcataagaagaaaacgttatctgccatcatcctatttctttttcctttctattttatggtcatatttttttctccatttcaagtagagggacatccttcatattttctctctctctctctcctggttatgctgttttcattttgcaaagtgaaacacacacaactagcagaaaatgaggtgtgccaggtgcattcacacatcacttgtctcccagagtaccagactctggtgtctcagaggcgtgattctcttgaggggggaaattatgttttgcagaccttgttcatttatcacttctatctatctcagacgttcttttcttaaaagaagcaagactcaggcacactgaaggtcatttccatgggacacacttgattgcttagaaaaacaaatttgaaaaatactttcttcagaaggaaagatattgtttctccagggtaaaatatttctgagggcttgactctttccaatgacgcctttatgtaagctgttggagcagggctcttaattgataagcagctgtgttaataattcacaatgaatagcatatttaaaacgtcaacccagtgttgattcttatggcagtatctgaggcgagagagaccaaagcaacaatgacaatgaatctttagattctggaaactcaggagaagccacactatctctagagtcaccaccttccttttttaaagaaagagggaaggttcccctctccaaaggaaagtttgcttcccaggtaaccgtgatctttgtgacctattactgatttcgtttaaacagagtctttatgttcaaatgcaactgtgtggtaaaatggccccagaatccagacatctagatcatgcctgtaacacttttcttaatttttgtatttatattggataactcatgcaatttttcaaagactccattattatttctataaaatgaagataatcttacctacacggttaacctcgcagaattgttggaaagatgaaatgaggcagtcatatatggattagaaattggaacctcctaaactccaatgccaggtgttagtttctttacatctttcttgtagtcaaaaaaaattctgggtaattgttttgagcagttatattgagaacatcctctgagaaaagaactgtgtgcatcttgccatggaaaagaagtctgtctctgcacgtaaattacctgatagggcatgagagttactgcagagaggtggatgcatgggagaacgcaggggtgggggagggacccatcagttggtgccttctgttctgccccatttggggtgtgcactttaaatggctaagaaaggatatcatttctattcaggtggagggtaggggtgcttcatggaagagactgaattttaacttagtcttgaataatagatacaatttactgaaatatgtatatatgaaaatatccttcaagggaagagagtttgccaaggtcaaacaggccgagaagtctaggtgtgttgggggaaggctgagaggtgcaccttggagggagtgcaggtgtgtgtgggaggagcatagagtcttgctggacagagacctccaggggcatttgaatactgctggaaattatttggtgtgtcctggaggtaagagagaccagggagcagtttgtctgtgcaggaagcagtggagtgtggtctgcatgccctggagaagccaaggcctgagggctctccttgcgggagacgcctcctgactctcactggccacagcaaagagaggtaggtttgctggctggaagcataaacacagccctaagtgccacatctccccagagatggcgtggagttcctctgagggaggacatggctccacgccatgttttgagcacaggtgaggcagtgacttatgagggacaatgaaaggtcaattcaagctttaggaagtaggtttggacccaagaatctttttaggtgatctctgaaattatgatcatgaatgagatcatgaggaaaggctccttggatttcccactggggccattttagcggctgcccaccagatgccatgattgactatgttattctttttatttggtgccaaccagagaatcattttatccagttcagatctcccattagtagctgatatgagtttggtttagaataagaaaactaactcttagccagataggcaagcatggaatcacacatacacatacaaaatacacctttggagatagatatttgcaggtaattgttttgaaacaaaatttttccatatattttgtaaaattttaaatttctcattgtatgacattttattataacagaaaagaaccatgaattcctcttaatgaagacctttcttgtcttcactgttattatcctaaagatatttatttagcatttggtgtagtgtaagatgaattgcacagctaatttaaatgtattactggctgggcgcagtggctcacacctgtaataccagcactttgggaggctgaggagggcagatcacgaggtcaggagcttgagaccagcctggccaacatggcaaaacctcgtctctactaaaaatgcaaagattaggtgtggtggcatgcacctgtaatcccagctactcgggaggctgaggcaggagaatcactcgaacctgggaggtgtagggtgcagtgagccaaggtcatgccactgcactacagcctgggtgatagggtgagactccatctcagaaaaaacaaaaacaaaaacaaaaaaaaaacaggtattactggctgccccctttggaaacagtacaccaaatttactgtgcctgattctaagaatagaaaattgaaggatgccttagagaagaaatagagacattttaaaataatgacaactttggaaaatagcacccagaatcccgtggcttaactttgttcagtacaaccccaaattattgatttatgattttttgaccctgagaaaagatgcagatgcagagaaaagatgtagaaatccctccccttcccctctcctcctgggagccacatagggtatgaaagtggtagagatcctttctgctgagccaatagtcgtctttaaaactctgggatccccttccttacaccttatacaaaaatcaattcaagatggattaaagacttaaacgttaaacctaaaactataaaaaccctagaagaaaacctaggcattaccattcaggacataggcatgggcaaggacttcatgtctaaaacaccaaaagcaatggcaaccaaagccaaaattgacaaatgggatctaattaaactaaagagcttctgcacagcaaaagaaactaccatcggagtgaacaggcagcctacaaaatgggagaaaattttcgcagcctactcatctgacaaagggctaatatccagaatctacaatgaactcaaacaaatttacaagaaaaaaacaaacaaccccatcaaaaattgggcaaaggacatgaacagacacttctcagaagaagacatttatgcagccaaaaaacacatgagaaaatgctcaccatcactggccatcagagaaatgcaaatcaaaaccacaatgagatgccatctcacaccagttagaatggcaatcattaaaaagtcaggaaacaacaggtgctggagaggatgtggagaaataggaacacttttacactgttggtgggactgtaaactagttcaaccattgtggaagtcagtgtggcgattcctcagggatctagaactagaaataccatttgacccagccatcccattactgggtatatacccagacgactataaatcatgctgctataaagacacatgcacacgtatgtttattgaggcattattcacaatagcaaagacttggaaccaacccaaatgtccaacaatgatagactggattaagaaaatgtggcacatatacaccatggaatactatgcagccataaaaaatgatgagttcatgtcctttgtagggacatggatgaatttggaaatcatcattctcagtaaactatcgcaagaacaaaaaaccaaacaccgcatattctcactcataggtgggaattgaacaatgagaacacatggacacaggaaggggaacatcacactctggggactgttgtgggttggggggaggggggagggatagcattgggagatatacctaatgctagatgacgagttagtgggtgcagcgcaccagcatggcacatgtatacatatgtaactaacctgcacaatgtgcacatgtaccctaaaacttaaagtataatactaataaatttaaaaaaaagaaaaaaataaaaataaaaataaaaataaaactctgggatccaaaagacagactcagtgatagtttcccaatactgttattgggaaagcaataaggctgaataaaaggaaagacccttaaataaagtagaaaagatttgcatgtgacaaaactggaagcagagaaactttaaaagcacatacattttgttcaaggaacaactatagttcttagtctcagagggatttaggcatttgcccaagattatgatgtgtaaaacagagatgctaatagctaattatcagagttatttatatgactgtgtcaggtacctgcctgaaaatgctcaacactgtccatcagtaagtaagagcaccagagaatgactgtctcttttctttgtggttctaacgtgtcacccacgttagttccctggactcagcaggtcgccaccgtgaggccccagcatttgggtccatcactggcgatgtgctgctggcctcagaatgtctgcctctgactatgcaggaggttgctgtgtgatagagtgcgggggaatcaggacaccgcccaccgctgtccaaatgccaagtggcgattcaggtaccttaggaggaaaagggacatggtgaggactggagttgcggtagatgcctcctgggtgttgaagagtccgaaggatccagaatggcagagaggggaaatgggggcagccatgcatgaagacaggctggggggcgctaatgcagctttctctcctggagcctctcatctccacctgctgcggaagctcctgtgcatccaactctgggctgggaaagcaaagagcactgggcaatcacgcctttctctgctgtctgcacgtggcgaaaatgaaagcatttcatggaacctgtttggggcacgtgaagagtgggccagagtgccagggaggcagcaatctgcaggttgcgttcatgccgtgacagtccattcaggggtgcaggagctggtagctgagttccccttcctgttttacacttctggtcttttggttctcaatacctcggggtgtaaaggacagctctttatttggctgtgaatatccaccactgtcttcctacttctctttctttggaagcatttcatttccttttctagaaaatttggagctgaagtgctcggaaggccactgattttaagctcattaaactcacattcacctttgtcttttgttgaaaaaagttaatcttgttttccaaagggccacaggaggatattgtatggatgttatttattgtccttcacaaacacaccccagagattagctcattataggttttattcaacaaagtaattattgcagagaggaagctgagcttttagtgatggacttggaagtgatgggtgaccactctcactggactccagatagaaacagaaatcaaagccgctgtctaatcacacttcactcctccctctgcataggactgtaattggtactcaaggagaacactaaatcaaagatctcataaggcaaatattagcagcatgtatcatgtaaataagaataatgatcagaagctacgcagaggagggactattgtgctcaaaagcagtggaagaaatcataaaagaaagatccataaatgttccttgaagacaacaacattagactttataaaataccacacagaaaatcagaaaagagcctagagaaaatatttaccacaaataagaaggattaccatctttgagctacgggagtgcccatatgaatcaataagaagaaaattacaaaggccaaatgcataaacagccaaggacatgaagagatgaatggaagaaagagaaaataggaatgatgaccaggtcgaccagaaacattcaacttaaccagtaatgatggaaattcaaattaaggctaaaaggagacagtttgcttataaaatcagtacctatttcaatagttgtgattcgataaaatggactcctctcaatacttggtatggctgtaattggataaaagtgttctggagaggaaatcaaccttatgttgcaagagcagtaaaaatgttgatatgctctgatacagaaattccacgtctagaaatttattctaagtaacattatgtacagacccaattacaaaaaaaaatgcaccagtatgtttatgatagcaattttttaggttgtaaaaatagaaaaagacatccattaaaaattatgcttagaataagtttagtaataataacaaatgtgttttgtgcctatgtgtgccaagcgtcatacctacataaatatgtgtgtgtacacatatacgtatgcaaatgcatatatttatatgtatgtgtacatttctatgtatgtgaattttttttcatttgatttttcaccaaccctataaagtaagacccattattatcccagtttgtagatgaagaaactatgacttggagagtttattagctcaagcaacaatcatacacccattaaattacatagcgcttcctccagatcttcaggtccagatccagtgaaaaggaaatgatactaggtggaaatccctgtggtttgtttttggataaaagtttcccaatactaggtaaagatgttcaggtttaaataatgttttgtgacgtgcatgtactggtgttttgcttgtttttccttctagctacacatgaaaataaggatattttccttgttactataaaagtattacatattcctttaggagctgctttcccccccttgtttgtcgtctcttaaaaaaagcattttctaagcagactgagaaaggagtctattaacaagcaaattgcatttgtgagtaagctgaagtgtagggagtggtatttcccactggggctctggaggctcagctccccagtgcagtggctgaacagggccaggcagtgtgaggggactggagctgggcactctgctcagggggtggacagagaagggaacctgggaaggcccccggcaggcaggactcagaggctctcaaactgctctcagatctgcaggactggcttcccacaactctgttcatcctcctccatcgcaaaatgaatatgtaaaggttttccttttacctgccaaagacattttgggaaagtaatgtgaagatttgtactttgtgaatggactcatatttatgtgtacaaaagcatgcagcagtttaaggaatcctatggtgaatactctgatacagaaggaagaattatttgaaatgcgatgcgtaacataaatgacctttcaactgaagttaacttagatactggtacattaagttttctaagaaataaatataaataaatcttatattaatgctagctaaaggcaaaccgggaggcatgctgtaaagtctatgcaaaatctggatgctcatggagaagattcttgtcaaatgtcatgtattattagtataggtagtctcacccttctaaaaaaggaaaccagaagtttgccagccaacctttaaattttgaaaaggtaagtctacagtgtgcttttcatacggttttcaaaagcagataaacattctcttttattaaacacacttctcaatttagtcatggtttgtggaccaatgttttcttaaattatttcataataattttacaacactgagaactggctgtgaaatcaacctttgggaaaaattaggagtagccgggggatgcacacacgcatgcacacacacacacacacacgcacacatgcacatgcacacgcacacgcatacacacacacacatgcacacatacatgcacacacatccacgcacaaatgcacacacacacgcacctgcacacacacgtgggtttgcatgctgacttgacatccaatgctaacagttcaaccacatttatggtttcataaatacaatgaatcatgagtagacctctaggtcaatggttctcaaagtgcagtcttcagaccagcaccatcagccttctcctggaacttcttaggcaaattctgaggacccattccagactgagtcaaaaaccctggataggtcagttattccttactacctttgcaaaacaccattctgttttagctcatggtgatcaaataaagagcaggatgaatgccaagatagagtatatagaacacctgatatggtgttctttggatcatgaccacacatctgttcccagcaaaaaggaattgtgccaacaggatgcatcaatgcactcctaatcagtgtcacctgatcatccactaatagctcaggcaaacatcagcttttccatcagtacacaaatcagtcattattcttgcctctcatcttagtgacagtacttcattgccccagcctacttgtcaaatccattgtcctgttaattttctccacacactccagggagataacagaatctctgggtagcagaccccatctcatgcctctgatatttataattgtgctgccaacctcctcttccaactagaattcctccccatgtttaaatttccaatttaatttcaagattctttgagaagattcctccaagtcttccctgttctgaaccatgtataactcttctgcagctatcatttggttcatcatggttcccttcatgaaaatcattttatgcatgtaatatcttaactgcccaaatgttattgaaaaagttttgagaggaagaactacatctcacatgcctttgtatctttcagtgcctagccactgtctcaccacaagaagttatagtgttttctttgatgcctttaatgtagatgtagattttcgctacaacgattttgccaggatgtgtttaaagatattcacccttggtcccctttctgcagttccttggatcatgaaagatgtgtttggtttggttggcccttacagttcattttccttttgaatcccaatttaaaattttggatttttaaaaaatagaaataaaacttatggctttctttaaaataaaagaagacttagaccctaagtctgcatttttataggagttgatgaaagtttatgcccctttgaggagcatgtgaattccaggctgccatggttctcagcacttcctaatataccgtgtccaatatggagattgagttctggattattacctgcctgtagtactgattttcttagattggagaggattctccatcaggactgccaggtttctagcattggctttgcaacttactagctttatctaagcaaccttgtgcaagatatttaactttgggaacagtaatgatacctaactcataatgttgttatcatgagttaataaagtccttaaaaccaacctggcacttactgagtgcgcaagaggtatttgctgttgttgtcataattattgttagaaatagtagtaatagtaggaaattcaaatgtgggaagtaattctagttggaggggaaggttggcagttgtagtaatagtatttactaatgtttcaaggtagaaaaatgaaatatgaattaggaaagttacatgttccaagaaaaatgggacacatttattttcaaaaataaagaatgttcctgtattcaatgtgtaaatacagtgttttggtctcaaggagactataacttaagatgtcagctaatgtcactgattacctgcttgatttatgttgcttcattaaattcaagttagaaaagtgggttcattcttgatttcttttatccaaatcctactatcagttttatgtggttattgtttttttaaatcttttcaatatatatttttatattggaataatgttagatttacagaaaagtttcaatgatagtacagacggttcttatttaccccttacacaatttatctcttgttattaacattttacttttctgtggcacattagtcaaaactaagaaactggcattgatacacggctattaactcaactatagactttctttggatttcaccagttttcccatgaatattttctctctgttccagaccctaatgctgagttccccattgcatttgcgtgtcctatctttccagtctcctctggtctatgacagtttctcagtcttcccctgttttttttttttctgaccttgaatcatttatttatatcaacatttttatggattgaattgtattccccccaactcaaatttatatgttaaggccgggcctggtggctgatgcctgtaatcccagcactttgggaggccgaggctggtggactatttgaggtcaggagttcaagaccagcctgaccaacatggtgaaaccacatctgtactaaaaaagtaaaaaaattagccaggtggtagtggtgcatgcctgtaatcccagctgctcggaaggctgaggcaagagaatcacttgagcctgggagggggaggttgtggtgagctgagattgcaccactacactctagtctgggtgacagagtgagaccctgccaatttatatgttaaaattcccaatacctcagaatgtgactgtatttaaagattggtcctttaaagagataattaaattaaaatgaggtcatatgaatggaccctaattccatatgactggtgtccttataggaagagattaggacacagccatgcacagagaaaagaccatgaaagtatagagggagaggccaccatctataagccaagggcagaggccgcagatgaaaagagtcctgctgacaccttcatcttggacttctagtccctagaactgtgaggaggtaaattactgttgtttaagtctccaagtctgtggaatttattatggtagccttagaaactaattcaagtatggactcatataagtcatctttgaacttttcattacaatccaattctatgttgtttatatcgtggctcaaatgattccagctttgacgtggtctccctctcatgttggttcctctgtcctcttagcatgtacctacacttgtgatttttgggcacttttctgatactacaagatgttccaggtttgttttgttttttccttgccctggcgctaaaatcagttatttctccaaagagtgaggttccttttacttgtgaatggcattaaaaaaccaagacctatggtaccaggttttgatccctgacctgtggcaccactttcaacataccatggttctgtagcagtgctggctgggaggcttaattcttgcctgttaagcatggccttcagtttggaagcccagtcgctctccaaggtcctgattttgaaaggcttttctttattgtgtgccaggaaagacagaggagaaaatagacaagaacataacatttaagcacaggtacagtcattctctgttcttttcacatttatgatgctaataaaagaaggaagatatattacatgagttaaagaaatttagaaatgttagaatttaagaagtagtgcctgtctctttgcaaatccatttcttgaagaggacaagtgagcctctttaaggagaaaattcaataagatacgtggaaacagagcttacataacttcagattttcctaacatcgtgtcttagggatgacagttcaagagaaaatgtgctaaagctgtgacttgaagggtttatttagatatgtgcatttcctgacaggcgagattagtggattctggaaaaagcaataaaaaggtttacagaattttcttctaattctgctgataaacagatgcaaactggcttaaactctgctgggattaaaatatttccgattcagtatttcatcaggtataaatgtggtttttcatccacatttcatttatgaggcagatgaaacattgagatctttttgattctgtgcatgcatttgatagtacacctccttggataaccaatattatgatatgcaatactttttttctacatttctctaacatgctgatctgtggagataggtggaggaggtagtgcttgttataattaaataatcacacattagttttcactaaggatctttcatcgaaggatgttaagagcaaaatggattctgcattattgctgcagtagatttttaattttactgttaataagcattaaagtcccacagcatgcaatattttgtttcttcccttttaaagaattaaatttggtgttttcccttagagcttgattgatttgctagattaaaaagcatttaaaatcattgtttaacacatggaaaaacatattgattgttgcagttctttataaagaaaaaagtacagtttggttccctgaaaaatacatgaattcttttagctgactcttagaaattaagacacatgtatctacaagtaggtttgggccaagaatgttccctgccccaactccgtgaaaaatttccattacatcagatacttctaggattgtatattcccttggaagatcacaaaggacatccgtctccacctttgcttaaacctaagtgatctttataaagaaaagactctttaatgtttagtagagatgtcacagaagtagacatatattagcatctttaaatgtctgctcagatttttcgtaactctcattgcattcatcctcctcttcaattgttaaaaattatagtcaattttctaaatttcaagacaggatctcactcccattgcccaggctgaagtacagtgtcgtgatcatggcacttgacctcctgggttcaggtgaccctcccacctcaccctcccaagtagctgggaccacaggcatacaccaccatgcccagctaattttttatatttttagtagagaagggatctcactatgtggccaaggctggtctcaaactcctaggtttaagcagtctgcccttcttggcctctctaagtgcggagattacaggcatgagccacagtgcttggcctcaatttttatctccctagaatatttatgattctttctgaatatcagttgcaaacccaaatctatatgataactaatcttccagaaattctaccccacaagacagagtcaactgtatacatgaagacatttatgaactctgttttcttttaggctcaacgatacttcttggcatatttttaacttttgtttataggccgttattaattttgaagtacctggtattgcttgtgtggaaataaatctgcattcgagtaattttaactctatgatttgggcgctaataatacttattgcaagagcatcctgaagtagtctcgggctaggtaattcatctagttcatcctcttcgtttcaggaaagtggatttcctagcctattcaagcagctatcacaaaataccccaagcagggtgtggcttagaaacagcagaacttgacttctcaccattctggagaccgagaagtccaagatgaaaatgtatttggtgtctgctgaggggtcactctccaacttcaatagcacctccttgtcaagtcctcgaatagtggaaggggtgagagagctctgtggggtctcttttatcagggcactcatcccattcaggagggttctgccctcatgccctcatcacctcccaaaggccccacctcctaatcttgggggttaggattttgacacgtgggaaacaaaaacatttgcccatagcaggctgctgggacagaatacagttcaggggctgcaagtccaaagccaggtgccagcaaagtcaaagtccaaaggcaaatgaacccagcagggctaatctccagcaaagcttctctgcttggcttgcagaggccagcttctggctgggtcctcacctgtcctttctgaatgcacgcactcttttggggtctcttcctcttcttttaagaacagtgccctattggatcaggcctccccacctcatttaaccttaattgccttcttagaggccccatctctaatgcaatcacaatggcagtgggggctagtgcttcagcatatgaattttggagacacaattctgtccataactgtaggtttttggttatctctggaaatggaaatgctttactttctaatttcccacaatccagagaagcaatatctttttttttcaactttagaaatcttttgaagttttgcattgttatacagcacttattcaatgccgcccaatccgagtgacttcatctcactcgacgacctcacctgactattccctggcctctgccctgcccagggcacacactgtggcaggtgagtgcttgtgcatgggcacacaaggcagatgcctgggtgttctgggcgtgctttttgcctgagatgttccatgacctggtctggtgtctcacaaagcctcctcatgagaaacacctttcttagggaaataccttgtgttgctcttttagaagattccacatgtggtccaagaggcatcagcatcccctgggagttcatgagaaatgcagctcagacccccatcccagccctcctgagggagaacctgcacttcttgagattcccccactgacctccaggcttaggaaagtgagagacacgctgccctaaagtggtcctcggtatagattcaaggcagctgcccaccccagtcatccaattccttgggctatcttaaattcttttccagtctcttctacttagtttaaataaatcaagtcacactttttctccagggactcatttccctcaaacactatatctgatgtttctgcacctactgggtttttatgcagttatgcagagatcacaggctgtttctatggatctttgcatattgcaggaatctttttgatagtgaggtaatttgtgctgaatcaaaaggctgacatgcaaagagagtatggtggcgtgtactaaaggctttatggtaatttttgttccatttcaccatcttttattcatatgccattttgatttttctagagcgaatatataggatattatctgaatccattttctcaaagctacgttttaacaacatttagtttgggacatttatttcgtattgaacacacaaaatgtttgctaaataaaggcttcaaatagcaacccctcccctgtttggtattttttcattgtttatcattggacttttagaagtgtaaataagatgtgtgagtcaaattctttctttgtaactgcttgaaaaattcagtaaccaattatttataataattggaaattaaatgagaatcaaaattcccagtgagtatatggcaagtttgttatttcctttctaccaataatgaatgataatgagtcaaataaaagcaatttgctttttcatgaaaagtagtgatgattattttaacaatcacaaaatgctttcctgaacatgttcttttatcatttctgtagtattgaactttaaaaaaagatatcattgagaataagtgaagcatggaacctgtaaattgcctgtttttgaagccatcgtgtccatcatttttagtgagagaataatgttctgatatctccacttgacatcttagactctattgtgttataacttcccacaacttgccaaagggccattctaaacttttgctcttcaatcggccatcattacgggaatattggcttccaatttttgtgtactaatatgaatttggctcatgaatgttactactccgaccaacaaaattcaaatgctccacaaaaagagaagagcctgtctagcacaaagatcttttcagcttttgagtttcctcttccctatcaatcatggggtttaatttaaattaaaaaggaaacattctttcaagatacatagtgtgaatcaatcaatcaatcgtacagtcttcctttacctaaattaatcacctttataatccttttagtggttcttgatctcttataggatacaatcaaaattccccatcttgatatctaaagcttcttaagctgaatcccatctcccttatcacttctttttatcatctctctctctactttcctttacacatattctattccaaataacctacatgttataccccaagccttactcagtcattcctcagagctgcgtttttatctgtggttacaaaacagatctgctgtcagaccagtcctgacttgacctttctgtgaggttgccatcaggtgtcggctggggctgtgtcttctgaaggatagggctggatagggctggaggagcctccacctaactgtcccccttgtgtggctgtcaagttagtgctggccccacacaggttgccgaagggtgctcacggcatggtgcctggtgtcttccatagagatacacgagtccaaatctgaagctctggtggctttggtaatccagcctctgaagtcacacactgtcacttccagtatgttctgcaggccacttgtagccagccctgatggagtttggaagggagtgagtagcaagaggcctgggtcccaagggtcatcttgaaggctggccactgcagggcctttgtccataccaacaaagctcaccctggcccatctctgcatgcttccttccacaccctgatagatccttcttcctctaggagccttcctgacccactctagattgaagcaactcaccacacacctgaaaccctttagcacatactatctagaccaagcaggtggtacatgttatattcacatgtagaagactcatccctggttgagtgacactctagataaatcactcaaggttccagctcttaaaagattaccttccatatggtggtatgaacagagattccctaatgaccactactcagaattaagaaggtaaaatatgccgcatataatatattcaattccttcaacactgtgtggctttggctaaagttaacttgccttcctcaagcatgcttaaatttggtgtgagtagtaggtctgtggcaactttgcagagttttgtggagaatttcctattacaaattctctaggttgtgagctctgcggtacaagtggctatgtgagactaatgagacattaagatcctgtttaaaggtgcctgtgggtccctgagctatcttgggctcccttctgaataagcaaaagggattaacttgggctcagtatgatgtaggttaaattttgacccagcagttgaactcttttagaagaataaatctattgatagtagcgttgggcagtactctgtcatctagaatgccccattttctggccaggctggagaagtgcattttcagtactggaaagctgagtcattttccccgttacagattgagttggacacctcctttgaggcatccaaaaatgacagggatttcagatgaagcaaggctagaattgtactcgatggacttgaacttgaacctgcagcttctcaccctccctgctacaacccttgtgttggagttgcataacttctgggagaaccatgccagagagttatagtagtccccacttatcctcagtttcactttctgcagtctcaattacctgtggtcaactgagatccaaaagtattaaatagaaaattccagagataaacaattcataggttttaaattgcacactgttctgagtagcattatgaaatctcacaccgtcctgctccatcctgctccgtcctgttctgggacatgaatcagtcctgtgtccagcatctcaggctgtgtacaccaccctcccattagtcagcaacatcatcttctgacagccaaccatggacatcatcatgccgatgattcaggatcacccaagcagatgatcctgcttctaacctattgtcagaaggtcagtagtaagctaacacaacacgatgcctgtgtcattccccagacttcatctcatataggcattgtatcatctcagatcatcacaagaagaaaggtgagtacagtacaggaagatattttgtgacagtgagagagagagaaaccacagtcacataacttgcattgcagtacattgttatacatgttctattttattattaattctaaaaataaaatctcttactgtgcctcacttataaatgacactgtatcatagctatgtatgtataggaaaaacagcacatatcaggttcagtgacatctgcagtttcaggcatccactgggggcatccccttggcgtgtattctcccccaccaaggatcaggggagcaattgtaattctctgctaaattctagtctgtcaggatacttagtgtttacgaatttgaataaatatgagtaaaaacgaattatagaaatgcggttttcctgctttcaagtgcaaacattgacctcagtggacaactcaggaaacgtttctagatccagcttctaggaggcctgtggctagctggctccctctgtatgcaaaccattcacatgcaaaatctcttgagcaattcctgtctaaaaggggctcataggctccgtgaaatcatgtttacagtttcaccttgcttaccaaggcctttttggttctagacaaaaagtctattacaacccatgtcaagctgtgatattattcaaatcactggagtctgatttcaatgatcgttttctatgcacagcttcaggatactcagcctatcacccaggaggtgaatgaagcaagtctgaggtgtctgggctacttgactttcgggtgatctcagggaacatctccccaccaattactttcaagactgactcgctgacatggaaattccttatctggaatggtttctgtctgtggttgcaatgcttttccaattttcatctacatgaaactctcccagaaatcttaaaatgtagtttttgttgcagtaggtttggggtgatggccccccatgctgctagtccacgtaccaagcactggaggtatttaaatgcacaagcccctagaaaaataatgcctgagactttctaaacggaagtcctatctgtagctcaggccattcccgtaagccccagcctgtgaaggctccctaggcacctgaggtgggctaggccctgacctgatttcatgacttctcccttgggtttttccctccccacctcccaccccgctcccagaagcgaagagatggcttcaccttctttactccctgccttgggcagtggctccaacatcttcacactctctcaagtcggacagttcattcatcttatttcctcactcccaccacaagtcagttactctgtcctttggatggtgatcatgtgcatgatggctgtgtcatgtttcccatctgcatttagtcctccccatcttcatggctactctgtgccagctactctgtgccaccctcatcgcctcttgcctaaactcttcaaaccagtgcaaaagcgacctcttatttgcttttgtaattcattcttcactgttttgccaaagggccattacaatacattgacagaatattattacccttcctcaaaatcatttgtgtctctccatggccaaaaccctttcacaagagatcactttgataaacaattaccacctgctcatagcctataatccaaccatactgggaaatgtatcctttagtagataggacctgcatttgcaggagtctttgtctcctaattttccttcagccagaaaccatctcctcctccagcatgccatagcagaacctaaaaagtctgcttcccttctaaacttctgtgtcaatttcactttctgcaggaagccaaccccaattccaccagccctgttccaaatcaggaaaacctgccccaccttgcctgccactagctctggctttggtagcatccttttgttctgttagtgttgttcacttaagttcttcttacaagattgtaaattttgaattacaaaaactttgttttattaatctttgtttctcctaagtcagccagcaaagaaccttgtttacagtaggtgcttaataaatatttaatccatttatcaattgaatgcaagcgtttcttgagtgttttttcttagattgtgcgaaaggaaagtgtgaaagatgaaaggaaatcccataatgaaataatgaaagagagtggacaggggacggctggaatagctgatgtcaaatgtacctgaaacacagctctatctgtgagtcctagagggtaggaaataacagtgacctcataagaaaccattcctctccctgctccctactttacaaccagattatattacttctgccctccttgggaaatgctatgttaaatgttatttttctgcaatttgtaatgacctttatatctgaaagacagttcctataaaaacatgagattgagaacccatcaaacaagtatctctaccatcaactaaaataagcaccatggacccttcttaagaagtgagggtctcatgtttcaggacaagcgtgttcaagtaccaccagccaggaaggccaaccagggcaaggctgtgcattccagaccctccagggctatggcgtcaggcacttgacctgtgttttaggcaattgtgagttaatggaaatgatattagcaatcataggcaatgactaatatttaccaagcatttagggaattggatcagtgactgctggaaatggaatacaagaattaatgttccaggaattaataatgatcctcagaaaagcttatggcttcatccacaggcttttgtcattttagtattaaaggcaaagcaatgaagagactgtggctcattcctctttccttgaatgggcgtttgcatgtttcaacacgctggaaggttaccttcttaaaatgccagctcattattcgtgtgaaagtgatcatacattggtattaaatgaagagtagaggcttatcattttagacatgatgggtatgctttatttacagatagtcatccttccaggagttaaattcacattgactattttttaaaatagtgctcacagcttagttctggatatgtttgcgttttccatctctcttggctgcttgagaacagagcgtccttaggaaaggacaagtcctgtgcagaatgcgttctcctttctcccacatttgcatttgcggggagaggcgtgcctgctgttgtgcacttcaccagcgacctcccacacccttggttctgccctgggcttgtcttcctttttctttccttctcttgaaggggttacagcccgaagcctgaaggaaaccagtctataaaactggtgaacgctgtctggatagagagaacagccctcgaattttgaagcgcagtttgtgtaagagtttatgggctctggatcatctgatagttctatttttagttttttgaggaacctctatactctttttctcataacagcagcaccgttttgaattcccaccagcagtgtgctccagggtgtttccaaaataagtgaaatcaggatgtcaaagagacaccagcacccccatgcccatctgcagcaccattcacggcagccgaggtgtggaaacaatgtaaacgtccattgaaatgtggaaacaatgtaaatgcctttgacggatggttgggtaaagaaaatgtgttatgtacatacaatggaatattattcagccttacaagagaaggagaaggccggcacggtggcttttgcctgtaatcccaacactttgggaggctgaggcaggcggaccacctgaggtcaggagtttgagactagcctggccaaaatggtgaaaccctgtctctactaaaagcacaaaaattagctgggcgtggtggcgggcacctgtaatcccagctactcgggatgctgaggcagagaattgcttgaacccaagaggcggaggttgtagtcagccgagatggagccactgcactccagcctgggcaacaacagctagaagagagaaggagatcctgccacttgtgacaacatggatgaatctggaaaatgtaatgctaagtcaaataagccagtcacggagggacaaataccgtgtgattccactcataggaggtatctaaagtagtcagactcatggaaggagagaatagaattgtggttgccaggcactgggaggagggaaatgaggagttattaatgaacaggtataaaatttcagcgatgggggtgggtagggcatgaggaaatacagtcaaaaaatgcaaagtttccatttgacaggaggaataagttttggagatctattgcacggcatggtaactatagttaataataatgtgtatttcaaaattgctaaaagagtagattttaaatgttctcacaacaaaaaataagtatgagatgatgaatatgttaatcagcttggtttaatcattccacaatgtatacatccatcaaaacattccactgtagcccgtaagcatattcatttactatttgtcaattttttttccaaaaaatcattatgcaaaatgagtaagttctacaaatctgctctacaacattgtgcctatagataacaatgctggcattttgcacttaaatctgttaagagagatgatcttatatgaagtgttcttaccacaataaaactttaaaaaataaaaataataaaataaggcaaagtttaaaaaaaaatgttcgtgagctctggaactaagcataccaggattcgaagtctgagtctcccaattactaagtgtgtgactttgggcacccacgtcacgtctgacactcagttctacatctgtaagtgaatataacaatgcctaattttcagcatcattacaagaagtatagatcctgccgcagggtcttgcatggggcagtaaccagaaacttgtagctactgttgtgtgactgccatactgtctttggcccttgtaagctatgtgattttagacaaataatttgcatgtcagtttctttttttttttttttcctttttttgagatggggtgttgctcttcttacccaggctggaatgcaatggtacaatctcagctcactgcaacctccgcctcccaggttcaaccaattctcttgcatcatcctcctcagtagctgggattacaggcgtgcaccaccacgcccagctaactttttgtgtttttagtagagacagggtttcaccatgttggccaggctggtcttgaactcctgacctcaggtgatctgcccacctcggcctcccaaaacgctgggattacgggcatgagccactgcgcctggcctttgagtgtcagtttctatgccttagaaagaggggattggagactggatgatctatggggagggtggtctaagactttgatgtgtatgagttgtaaagtaacataatagatccaaatgacaccaaaagcttttgctgaacccagtcagttgagtcaaacaagtcattagtggagaacggaaccagctatttaaattaaacactggcatgtgcctggtttattacagtggccccagtgcccagcatgttgtaggcactcaggagacatttatttaatgattgaaaagcatcagtcagagctacaggacatagaaagcacatttgaaacagttgagaagatgtaatgaagtaacaacttagtaaagaatggacagggtcaggaaagcaggaaaacgtggtgaaacattctgggattagaatcgcaagaagttgctaccaccctttggcccaagggagcagttagtgaaactcagcaaatgtctgtagttacagagaaagaggaaggacaggatctgtgggaataaatacctgaattctctcctgactttttgatctcttggtcaagcctcaaatctattggccaaacctaactaaaagctggagcacaaggaaatcaggttgaggctggtctgcagaggtcactcttcctagacaaagagcagatggaaaagggagcaaaaaggatctgcagggacaagtgaagaacatacagcactctaaagaagcttcccatagaagcaaatttgtgtatgtgggtgggaactaggatattttatttgtttggggatgcttttattacaggtaaaagcaataactgcatattttggtctgagatgtattttttctactaataaaattaataggctaataagggcaatgatcaccttcaaaaaacacacaattttcgctagttaatgccaggtctgatcagcacattttagatggatggatggttgaatgggtcaatgggtagatggatggttggatggatggatggatgaggaggaggtggtagatggataggtgaatgggtaggtggatgggtgggtggatgggtggatggatggatggtgagtgggtgggtagatggatgggtgagtggatgaaaggttgagtggatgggtgggtgggaggtgggtggcttggctaagttaggattgctacctttaaaagcatagcaatggtaacatagagtatcggccaggcaacaacatttagccagaaaagacagatccagagcagggtctcccagctggcttgcaataaataaattactttttcgtaattttgtcaaaaacgttcaatgtgcttggttttaatgaccaggaaatatctagctgtgttgaagccccccatctcagggggaggtattacctgctgatggttctcggcttgttgaaagttcacatcctaagagtgtgtgttgttgttagtgtgattacagaaaatctgcgccctctttctaacctgtgtcaaagataaacaaggcatgacacaaggtggtaagaacagattttaatcagcaacaactattgcaatagggaaaagaatacaacgtgaactaaattcaacttccatttgtacagcagtgactgggcatttataaaaggagaaggaaggagtggagagagttaagcaggatttagtagagtcagggaggtgaaaaactccgagggttagtcatgtgataatgtcggtggtgtctgcgaactggcaattatggaagttaggattccatcctcccacagagaccagacacagaggctctgtcctcaggtgtcagctggaacaagtcataagctcttttggcaggtgtgacttttctctggcaggcacttctggttgggggacagccagggccatcctaggaatgtgaccttgttctgttagaaactgtgctagtgtttgttcaagtctttatagaccgagcttaaggcctagttaaaaaaggattcagagaaatctgactcaagtttggtcaaagagagagtccttgccaattgttattctttaggcatttagatatctctgaatacccaaacagagaatacagacaaaaaggaataagcaaactatgttgtcaaggaacagttttattgtcaaaatgtatctcagtgatgattaatgaattggaaagttataagatgcctctattaatcacttttctaaatgagttgagttttgcagcacagctgaaaattttgatttcattgtttaaagcaaattttggaaagaactattgagtgcaagttaaagccggaaactcacagaggcaaagaaacatagaggatggtctgttcccctactgccatagactctataaagagcttgtttcacggcctttgttttcaatgttcctcctatggaaaaaataattgccagttttcccaccaatgtggacacatatatgaaaattttttgactcttcccaatcatttgtaaaaatgatactatcctctcctgtttttgcacgccattagagagatgaggtgcaagtgtaccataggcctagaaaccttgcaatgtcagctacgcactgtttatctcaactcacatacgcagatatttgttgcagattagggtgttgtctgtaaagaaagaaaagtgttcaaagaaaacctgctaggtgatgtatttgttttcgcttattgctgttacaaattaccacaaacttagtgacttaaaacaacataaatttattatcatatgagatccaaagtctgaaatgggcttcaagtagctcaaatcaaagtgtctgcagggctaattccttctggaggctccagcagggaatctgtttcctgcttctagaggcttctacatgtcttggctcacggctctttcctccgccttcagagccagcaatcgctgcctgtgtttttctaatatcatattacttgacaccgactcttctccctccctcttccacatttaagtacccttataattaaaattgagcccacgtggataattcaggataatctcctgttttcaagccaaccaattaggaatactaactccatctgctgcccagttcacgtaacgtagccacaggttctgggaattaggatttagatgtctttgggcggccttgttcattacaatgaagcaatttccatctgctgcagattctagatctagaagttgccacttgacaactgcgtgactttaggtaaatctcctgacacttaaatgcttccctggctcttctcatttgcaagttgaaggcactgtgttaggtaacctctgccatctctttcagagccctccaagtttgaggaatccttttgatcaaaggtgaaggtcatgaagtgtaatttgctttgccgtggttattgcattctcgttgattgattttttggattggatacccatgaagtcttatgcacatttaaagttaattatttcttcattatataattaaatgtagatgagtcccagtgtaaagtgtcagacggataacttattctttccaaaagaagaacagactcactcagcagcagcttttctgctctctctggaaaggaggtattgagtcgtcttagattaactcatggtcttcctgacaggattgggtatggattttaacagattacagtcatcttggatgccttccagaaactgattctaaactgcttttatttttcataggaaacacccaacaacactgcatagaaattagatactcctaaagtggatttgaaccagtaaaattagctgtaaatatcgaagcataactaaggtttagtgtcttctctttgtaggtaatttgtgcagccctaacatttctcccctctggagcttagctgtacaattctaatcactactgtggtctctgctcagtgggccatcgctcatgttttgaaagcactggctttgtccctatgtgagcttgctagttagttgatacatgcaggagtgtggtggcctcaggggaatggaatttctttcttctgtttataggttagtttggggaaaaaaatgtgtgtgtgtgtgtgggtgtgtgtgtgtgtgtgtgtgtgtgtgtgtgtgtttactgagatggagtctcattctgaatcctaggctggagtgcagtggcatgatcatagctcactgcagccttgaccttctgggctcaagcaatcctcccacctcagcctcccaagtagctgggcctacaggcacacaccactatgcctggctaatttttaaatgttttgtagagatggggtctctctatgttgcccaggctgattttgaactcttggtctcaagtgatcctcccacctcaatctcccaaagtcctggaattacaggtgtgagccactgtgcctagccaaaaatattgtgcatatttttaagcactggttggcattaagtttgagggttacagggctaaaacaaaagatgagattttactacaaaaagaacttggaggctcttttagaattggattcaactttcttcctgctatagagactatagattgcttgatttatgatgcgagatttgattcttcatgtcatcttgccaacacagccgctgcagttgtcttgttactccagctctttacccagcatactgtttgccagttgaatgttattcaagccagaagtttggcaaaacactttggtacaataaaaatatatttaagaatttaacattttggctttttattgtagtattgagtagggaatgggaaattagccaatgataggactactagggtctacattcgaaagaacttttatagcacaatcttttggtaacttatttggttgaggacgtactaaatacaaataatcatgtgggaatttggtgagctatggtaatgaatatgacgtgagatgacttcagaggagtttgcagttccgtagtagagacagacacgtgtagaaaatcctgtattggtcttcttccttgttgaccgtagtgctttcagtggggtgcatctcattagaacgttgtgattgggacatacaagtggaaggtttctttaatgtctggttcccatatcggtgagacatagccttaatgtattattctccagaggggcaaaccatccaagactattttagaattaaggacttgctgctctggttacttggtcactgttgagaggatgtgttggaatgacatagcaaaccatgagatgatggttttggaaaaacatcagccgagtaagttatttggtactctgccttaaaaaaaaaaaaaaaaaaaaaaactgagccataaatattcaaaaaagtttgtatgcacagaacacaaaattccaagagaattatttgtttcctaccctaggagtcaaaagtgtttgtttagaataatgtgtaagagtttcttaccccgcccccaggattaccaattcctttaacaatgccctttatttgtgcatcagtgctagtaggtttttcttttaatcagaaataattttggtgagcgtgtctatgcacacagaaatagctactaagatcattaatattttattgttgaaagcagttttatcttataatcacattttcatttgatgtttttagttttctgcttctctcacataaatgcatggtgtcgagagaggcacaagtatttttgtctctaatatcttaaaaattaggattaagtgcattctgtattgttttgtattcacaaaatagttttgaaaaagcttgagattaagtgaaatttgtatgtttttaaccatagtttttgtgggacaaatttacgctttatctctttggtttagatgtggttgacatattgatgcatgtattctctttattctgtaggctttctttttccttagaaatgaagtcacattcagtagttaaataatactttactcaaaagtacagtgatttgaaaataaccttcaactgtcagaagaggctgaacttgactgaaatgtggcctcctaactgaatattgcacatgaatcttaacagaagttatcataaacatttaaatatttgcacttggtatttagacattgattttcaccaataactgaatagatataaagcctatttttcttctttagccctcatgaatatcaattcagtttgttttttgtttcttctgggtgattcatagatgaatgcctagtgtcttcatttgcaagctgttcatggaaggaagccacttttctgttgcctctgtaaccattgcagggccttcaatagcagccttcagacactaggcatgcattcagcattggaataaataggatagccaagggtagctaattattttcaggttaattcctaaagagttaatttgcactgccttgcccaaaatcaaaccagcagaacattttattaagcaaggcttttgtgtgagtggtatggaagcactgaatcagttgctgtttcttttaatctaaattatcgtcattttgagctttatattaatacactggctgagtaactttgtttaaaagaaacctaggtaaattgatagttctatgttctaaattcttctgaataagaaaacagtgatctgccagatgaaaaaggcaattcagaatgtgacataacttctgttgagagatttttgttgaaaattgggaagtatgaattcttcacagactttcataaaatatttcaatactcttatttttaaaaaaccttgaaaagtcagaaatcagttagaataattgacttctaggcatagaaaaattcatttaaattttatttatcctggatgtcttcttttttagcataatacacctaaaacagatattccactaatatagagtgattgaagtattcagaggaagattgcattttaaagctataaagaacatttaagagtaaatgtggaaaacagtatgcagatttcttaaaagaactaaaaggatacctgccattcaatccagcaaccccactatttggtatctacccaaaggaagagaagtcgttatatcaaaaacacacctgcacgcataggcttactgcaaaaaaaattcacaactgcaaagatatggaatcgacctaagtgtccatcaaccaatgagtggataaggaagatgtggtatatatgcaccatggaatactactcagccataaaaataacgaaataatgtcttttgcagcaacttggatggagctggaggccattgtcctaagtgatataactcaggaatggaaaacctaatattgttatgttctcacttacaagtggcagctaagctatgggtatgcaaggcatacagagtggtataatagatttggagactcgcaagtggggagagcggaaggggtatgagggataaaaagacacatattgggtacaacgtacagtgttaagatgatgggtgcactaaacgctcagacttcagcactgtacgcttcatccacgtaaccaaaaaccacttgtacctcaaaagctattaaaataaaataaaacataaaacaaaataaagagaatatatagcctacttccttaggttttatagtcaaagcaccactgatttagaatctaaaggcctggcctcaggtctgattctgctactttacatctgtgtgaccttgggcaagtctcttaacctctctgagcttctgcttcttaatctgttaaaaaaaaaaaaagcataatttgtcttatccttgttttgatcaaatgaatgagttctgggaaatccatccagctggtcagtggaatccacgtgcgagcacagcaaggcctaacgaatttgctgacgctcctctgaccacctagcttcacagatgggtgggcagccagacctacaacccaacccacgtctgccaagtcccagcctttccattcacctttcaagggaagaaaacttctcatgtattggaaagcacagtgcctctagtgcctctctttcttgattgttggagttgggtctctcagcattgtggttcactacgacagagcatcgcttttaacagccacataaaataaccctcttgggtaacacactcaagaggcttcgtgaactcgggaggcaatctgggcaggcttacagctgtgtgacaacacaaacgctgtttatttgagtgttatcaggaagatgtgtcactgtcatggttgaatatggagaaacaggtgcccgcctcggaatggctacccaagtcaaggaggacccaaggctaatgtggagaccacgttcctccctggagtaccggggttaggcagggcttgaatgaggtgcagcgaggccggtgaaacacagcagtaccacgtgtcttatgtcacatcagcaatgcaggtcgcgctcgtcacagacatttcagatggagctgggtattatattccagtcctggcatttattatggtcaccaccagcacagagcgttcctggcctggtgctgtctggtttctggaatacaggccatccttcctgatattctaaagcctgcctcccaccctcaaagagtcagacggcaagtttccatccaccctcccagttctcagcctttgaaggtgagaagctcctcttctaggggccgctgtcagaatctcagggtttggcactgttgcgctcgcctccattccccaggctcctcgacggccttagatgcttaaacacgctgctgcctctcatctctggaccaaggctttcgtttccctgtgagtagacagcactaaggcacggggttagtttaatgatgcaagtcaactggggagccttgctgctatagagataccctttgtatgtttactttaacttcttgcatcagtcaattcaggctgttgtagcagaataccacagactgcacagcttaagcagcagcaatgtattccttatgattctggaggctggggaatctgaagtcagtgtgctggcgtggtcaggtctggtttgtagatggctattttcttgtatcctcacatggcagagagcacagagcaggctcttgagtctccttagaagggcactaagcccattcaccctcatgacctaattacctcctgaaggcccccctcctagtgctgtcacattggggagttaggatttcattgtatgaatctggggagacacaaacattcagcccatagcacttccccagccgtgcaacacaggtgccctttggtggtgtttgcataggtcatggctgctgatagccaccgtgtgttgactgcccactctgtgcttgacgctctgctagaggctctttatgttgtctttaatcctcacttcagtgctgcaagggctgtgttattcccagctgacatatgagcttccaggagtttaatggatggaagctcagctggcacatggtggaggcaaacccagggatgtctgactcattcgaatgtttctttcgttaagttaagtcttccattcaggaaaccaatattgcaagttcaacgtgtgaaaatgtcactaggctccacggtgctagagaggtggatcctgatgatgtcctgtgctcacggcgcttactttgattggcacccagagagaagacatgagcaacactggttgtgttcagatgagagacagtgcacctcaagggaagtgttggtgaagtcctcagaggaaggaggaacgcaaaggcctgtgttcagaacaccgtggtgccctgagaacagctgccaaggatgctcgctgggagccacaggccaccagggggaagcgccaaggccgtctttcaagatgcagttacatcatcactgagcagcaccagctcagggctgctccagcaagcctagacccaccctgcttccctgcgccactccccagggcctgctccacaccacccacaaaaggcaggcggacagtggaagaacactccaggcccccagctccaaaggctcagatagccgctgtcgtcaaaacctcatgtcaggctctgtttttctttcctttcttttcttttcttttcttttcttttcttttcttttcttttcttttcttttcttttcttttctttcttttattatttctttctttctttctttttttttttttttttgagatggaatcttgctcttgttgcccaggctggagtacagtggcatgatctcagttcaccacaacctctacctcccaagctcaagcaattttcctgcctcagcttcccgagtagctgggatgacaggtgcatgccaccacgcctggctaatttttgtatttttagtagagacagggtttctccatgttggtcaggctggtctcaaactcctgacctcgtgatccgcccacctcagcctcccaaagtgctgggattacaggcgagagccaccgcacccagcctttccttctccctttcttacccgacttccttggaattggtattcaggaccttccttttctcctggtatctgcccagtgatccaggacagcgctcagctcctggtagccctgggctctgtggtttcaggctgggtgcatctgttcctgtgccctgatctcagcctggcccagctccttggcctctccaccctccacttcccttggaagaaaaaatgggggtaacggtaaggaggtgctctgagtaaagcagtttccgggtccaaaataattcaaagaaatgaagagcaaaaatcacagtacaagtagtttagcttttcctcagttaatctgccataatattaagtaaagctagttttaagtatttaggctctaatgaattccatgtactaagttgcctggctgttttctaatacatgttatttgaagattctcttgaaaattgcttatatcatgctgctatgttacaagaacatggttttcacgcattctggtatggaatgtgtatgttgctgtcacttatttaataataatagtcacaattaatcagtacaaatatttatggccctaagtaccctgagatctgttgcttgatacatgtctgaacattttggacaaaaagaggccagtgtgggacaatgagatagccttttaatagagagattcttttctcttaacaatgatctaggggttttcggggggaaacacacacccccttctccatcgggaccgaaactgctcttgtccgtgtgttctgtcacacgtagatgaacaggctttcaacacctgcactggattttataatgcattgggtttggttattgtcattattgtttttaccagtttatttattcattatggtgctagccacaaagcttatgcatgctgagcgtgggtttcaaattttgagtttttttgaaacattcaagacacggaagtgggcatcacaggtcatgagttctgttcgataatgatgtcactggtcacccatgttgcttttgacttggtaaaagaaaaattgtacttaggaaaagctgccctcatataatgtgtactcatatggtagttaaataagtccagtcaagggctgtaagacagccaatcagaatcttgtttctaaatgggcatgtttctaaactggtctatgatgtgctaatggacagaattttgcatttggaaaattgccatcacaaactcttgagccttccattcttaaaccagttgcaaggggctttaccaaactgacttatccaggttacagatataacaagttcctgtaggtaatggctctcatactagactgcaagtttttttttttttttttttttttttttgagacagagtctcactctgttgcccaggctggagtgcagtggcacaatctcagcccactgcaacctctgcctcccaggttcaagcaattctcctgtctcagcctcccaagtagctgagacagggactacaggtgcatgccaccgtgcctgactaatttttgcattttttttgtttttgtttttttagtagagatggggtttcaacctattggccaggctggtcttgaactcctgacctcaggtgatccggccgcctcagcctcccgaagtgctgtgattacaggcatgagccccctcgcccggcctcatacttcattgtttataagcgtgtactgggcacattgtgaaacacaaacgttctcccaccctgtccccagagactccagttcagagggtccaggaatctgcatttgacgtgcacacccgggggttctaaggctatttttgtaccatcattttgagaaatacatgaagctatttcaaacactcctcataatgtcaattagtcttctccttctgtcctaggaactagataattattatttcttttgtccaaaatcctttggattatacaaatgcattatatctggaggcagtaattaagctctggcctggcccacttttctccagataagtacactgattaccttcgcgtttccttacaggtccaactttccaacaaaatcatcactgtttgctttcctttaggcctacacgttcttttcctctgttacacaatgtctgaagtaaaacaaagatttctgtctttcctttcatgttgtacatgttgtgactaaaacacatgcctcaggtctcagtctatcttaaactgtggttatttctttaaaatccattttacctataagaacaataaaggcgtcttcaggctttttaaacctgtaacaatttaaagacattgggtcataaaataatgtttaacctggactgatacaattaaaataaaacattaacagtctgaattttgtttaagatagaaacttagccctcttgttcctggtatgtgcgacttcatgaaaacccaagtttcgctacttaaagtgcagactatgtttctatagtttcaggtagaaattatttggaaatgtaccatgctgctgtaaaacaaacaaaaagccaccctaagcccgtattttctccttttgtgacactgcagagttatagtttccacacagatatcgtgcctgcagggcctttagaagcatgtggctgctggctttcaccctgaaggtccagactgctggactcttcagccgccgcttcacccttccctctctgcttgctgctggctttggggttgggatctgcttcccactctcctgcatctgacgtgctcttccatttttctcccagtccatcatggtaaattcttgtcttcatattccttctcttctcccacctttgtttctgagctgctcacctgagctgtgggagtgcaactgggatcatcagcattttccaatcaaagtgctcttatcttctgatcagcaaaataacccatcacagaaatgactgaattaatgactctctagacagttgagtctcttccacgtttttgatcagggcctgctcatactcagacatttcttgtttgttgttgttgcttttatgttcatggctgttcccaagcagagagaatttattttattctatttttatttttattttttgagatggagtctcgctctggtcacccaggctaaagtgcagtggtgcaatctcggctcactgcaacctctgcctcccaggttctcaagcaattctcctgcctcagcctcccaagtagctgggattacaggcacacgcccttatgccccattactttttgtatttttagtagagatagtgtttcaccatgttggccaggctggtgttgaactcctgacctcaggtgatccacctgtctcagcctcccaaagtgctggaattacaggcatgagccaccattcctggctgagaatttcatttaaattgtggattactaggcattaattatgtttgtgtgagagagagtggcagagggacattgaaagagcaacagggacagagagacagagagagaacaaggagaaggaggacgagagagaaagaaagagggaggaatgggagggggtactgagagatcacaccaaattcattgcacgttcctgtgagttgctgccacacgctgcactgggccaacgctttcccaccagtttcactagtggagatgacctcatcggatcctctttgccatcttctgtgaggttggaaccatgcagagtcctgcattttcctccatctacccctaagtccttgtgttaattatgatctgtgttggcttttatcacctttgtggaaagagaagagccaccaataatgaagactgagtaaatgagccagtgaaacagagacggggatgtgcaccccccaggctcctggatgattattgacggacacgtgtcagctgctaaatgttatttaaaacttgttcttgccatcctatcatcatttgctgtcctcctgaatatggaaatacaatgattagaaggctgttttaccatcctgagatatgtgcaccattgattttgtaatttgttgctaccttctacttatagtaaatggtccatgatacataaaagaaatttatgtcagagcttttcacagtgaataaatattaggaagaaaatacatttagacaatagaaggaagcagtgtaatgggagatcctgcagtcatgtatgtgtcgtttattttctcccaatattttttatagtagctgtgtgaatatcttactttttacggtgctcaattccacattggcctgatatttgacatattttaaggcacagtgggagaaggaaccaatcctgacctttctctaggcacttttctgatgtcagtagatgaactgaataattaatatctgacttcttctggaacttatttgaggtggcttacagaatcctcccctggcttcctattgtgttttggataaaaggcaagaccagtggcacggtccacgaggctgggcctggttttctttgtgcctgtctgtccagcttcatctcggatgcttcacgcctcactcctgacatgtagccacacatgcaccaggttacaaccgctccattgcatgggaaacctgccccagctggtcaccacctccttcctgtatactcttcaactctcagctcaaattctcttcctcagagcacccttgcttgccccaacacctcagtaaaaatcagcacatgccccatcattatacgccctcttgacacatggaattcctgcccactgccccacctcacagtgtcactgggtttgcctgaggtctctcccaccgcgtgcaagtgtagggatgtctcttcagttcagcacgttaggccaatgctcactgtcacaacattggtatccagtacacgtggttaaccattgctattgtgaaatattataatgcaaaaactatggaacatgtaaactcacagcttaatgggtgagtgtaacctgaatttcctaatgtgaaatagcccattcaggtctagaaacagaggacagccagtaccccgcagctcctgtaccttgacttcctctttccagtggcaacttctctctccccgttgagttatgcagcatcctggatttcatggaaatgtctttctggcttgtcttcatgaacttacgtgtgaaccactcacttagtgtagtttgcccactgtggaactttttacaaaaagaaatattcatcttatattctttactgtctgatctatgtcacttaaaattatatttgtgaggttcattcatgctgtgcatgtagtcagaggttgtgatttgcatggctatatggcattctgttacatggaatacaccactctggtagacagaccaatgacaccccatgaagatgtccgtatcccattccctggtacctgtgactatgttagcttccctgacaaaggagactaaggttacaggtgaataaagatagtaagattactcatcaattgcctctctgcagccaatcatttctctgatgctatttgtttttccattatactggattatgtgaaaattctgatactaggctaatagctgtttaacatggatctaatgaatagattccattctaggccagctatagtttaaaaatactacagctttctttttgagtaatttgatacctaaaatagtgaagacctcaggaagagcccatcctctttgagacccgtgaacattctgccgtgccaactgtcttggctggcatttgcttccccttaaattagcttcctcctgtcacagaggggcccatactacaaggctggtggatgatgacaaatttgattcttgaaaatctgttaaggtaattgcaaaattccactcagtttccctgggaaaataactctacctgctagtagaatcaccagccttttcaaagaaaatgtatacatcaaattagcaaattagttattttaaaattgtaaaccaaaggccaggtgtggtggttcatgcctgtaattccagcactttgagaggctgaggtgggcggatcccttgagtccaggagttcaagatcagcctggccaacatggcgaaacccagtctctgctaaaaatacaaaaattagctggacacggtggtggacgcctgtaatccgtgttacttgggaggctgaggcagggagaaatgtttgaacccaggaggcagagattgtagtgagccaagatcacgccactgcactccagcctggatgacagtgagactccatctgaaaaaataacataaaaataaaataaaactaaattaaattgtaaaccaagagtgttgttggaatttccacctagtcttcgagtgtaagtgtagctagaatatgccgcagacacaggagcatacccctcaggaaccagggagcaggcgctggatgaagcatcaatgcttgctgtacattcggcttttgtttttgagtttcagaaacccactcaaattagtttaagtaaaatggaaaatgaaatatctcctaaaggctgggcactgtggcaaatgcctgtaatcccagaactttgggaggccaaggagggtggatcacaaggtcaggagatcgagaccatcctggctgacacggtgaaaccccgtctcgactaaaaaaatacaaaaaaattagccgggcgtggtggcgggagcctgtagtcccagctactcaggaggctgagtcaggagaacggcgtgaacccaggaggcggagcttgcagtgagtcgagatagcaccactgcactccagcctgggtgacagagtgagactccaactcaaaaaaaaaaaaaaaaaaaaaaaaaaaagaaaagaaaaaaagaaatatctcctaaagtaacaggagtgcattattaaatccaagggaaaaatgcatccaggcctcaggaggaaaagtacatcaaaaatggaaagccaagaggagctcattctgtctctttgagcttcttacctttttgcctttgtctctttgcttttcattctctttggttctgaacctctctacttcattcctctcattctgtaaatctgctttatttcctttggaatctttacaccatatggcagcaggcacttaacttccctccccaccttccgttctcatggtttgtgacagcagccaagaacgacttggaatattttaatctcacaccacaaatcctggagcagacttttgacctaggttaggccaattaattgtctctggctgaggaggagaggagggggctcacagactagaaatgtggcttccagggcccatgggtggaggaggagggcagctccgatcattctgactgggatgctcttcacaatgcctctgtaccgtgctggaacattgtaccagggtggcaagccctttttaaaaagtgagctccaattactttagtctctgccattcaattgctggtggttcttgcctttgaggctagtttgttagttacttaatatttattgagtgcctgcagggatttttgacattgagaagtgatgtgttgagcgtgccaaaaatctacccagtatagaaaactcatctcaaaatcgcctgtgggtttcagagagtctatgcaaaaacagccattatctaaacatgctttaagacgctgttatcatacacagcaaggtgaaagatacaaatgctcaattttaaattctgcagcttacttcatagccatcttttcactgaaagggatttctcttgggcctgatgtgttgtgacatttttttctgtggatgatcaggtcacagtgctgctgcttttggaaatatatagaacaacttgatacctttaaaacattatatcaaaatagaaccaaagtagactgagcccagaaagcaagactaacttacattttgaactaatttcataaaagaatctatcagacccagtcaattaaactgaagagcctaaaataatttgaacctgatgttggaatttgcaggtaaaaataatcaagaagaaatgttaacagatagctattgcatcaataatttgcctgtttgttttctagaaggattgatagggcagaagttaattctgaaaacacagttttgctgaccttcaagtagagggctgacagctgctttagcaagggtggtgggtaggatttcaaactgctgtgccctcaggcagcaacatcaagtcatgttatgtaaaataggcaacttcagaagttcccaaatgtatttgagaaaagtagggtggatcccaggtgagtccatgaggcgcatacggaaagggtgtgggagagccctgggagagcctgagcagtgagacgtcccttctccacatggaggacgtggtggacactgcccaggggaagaggggcacccgcaggtttgtgtctggatgtaccggaaacattggctcctctgcttccactaagatgatgatgatgatgtataattaattgccagtcctcgaaagttgggcaggttaaccaaaattaacttctaattaatgaaataaacggaggtgttggggaaggtgggatgacatcgtcttccaccaccaccacatcccattcccgcattggttgcttcagtctttctgaaagggctgctcagctgcccacgcctgcagtctctgcagttattcacatggaggcggcattaattcataccttgcggccatatccattatccctccctcacccccactactagcaaaagcaccccggaagtactcacaagaaacaaagtgacagtcacaaggaaaggagcatctcggggagtgggaaagcttcccctgctaagtacatgcaatgctttattggacgatgagttagggtcctcttgctccaacaagactggcttgcgtttccacctccagccagcattgtgaatcccaagtagctgctgatttatatgtatcctctggaattatttaaagctatcaattacctaaccatgggtatagttatatcgtagaaaaggccactttccattttgggagcgagacattgtcttctagtcttaatatacttctgcaggctgcctgatagaagaagagattgattggtttaaagatagattgttatgagagaaataatttacttcacttcctccttccctagtgagaaggccatctggttgacccctctgcctttagctaagggacatagaatgcacaattgccagctgtccccaatgtggctggcaaggctggacctcagctgtccccggggtccctgctgtgctgcccccgattgctccagtcttctcctgcaggggtgtgtctttaggaggaggctttggttgatcgtgaaatcatcctccaatctcacttctgctggaggtgactccttctgtccctttagctgcgtaaggccagacttacattacatgaaacaaacacgtcatgggatgtgtacccggaacattcacagtggttattggctgcttgaggtatgcatcactttactgtggagtcacaattatggatccaataacctggatcactctgctttgaggacccaaaacaaattaaatttctgatttcccctcattaaagctcaggatgcaacaagaagttggaggatcacaagtggaatgtgaccactctagccccttccctttctttataaagagtaggaaatgcaatgcactttcgagttctttctctattacatatcatatgttgctaaaacattacttggtggtgatagcaataaatagtaaattagtatcttgtgtttctataatttttataaattatagtgtgctttcaaatacatttacatttaatcctgataacacctatgcaatcagttccttttgtgtcccactcctttcctccttgcagcgttcaaaaatcgtctccaacttagagttctcatttgaatcttctcctcttcataaggcacaaagtctgataaaggtagcaagcaaggcaaatccatgagagatacgaagctcaggccaagatgagacgtgtcagattttaacagagaggagagaacagggatgcataacctgacagagaggcgtgggctctatcagctgtagctggggagaaaattaaagcggcctgcattagggtcctccttgaatcagttcatagacattgtggtgtctacaattattatcttaatctgggtttcttgcactcgagatacaaaattggcacacacaaaagtcaagctgtaatcacaagttactaagataataacattggataaaggtgaattttatgtttaaaatgaccaaacgactcagaaaaggtatagcttggttttagttcgttgtttgttttatttttgcctgagttaaaaataagtatgagcagcagtgatgtcgcaaaggacaggattgccaactatgcgtgtcagtttgcattacatcttgcagaatccattgctgcttatggcctcattcacgcaactgggcttgcattaaccctttgctttctgcatccatcaatgattgcctttctgttacttctaaaggcatttatccatccattcatccactcaacacagtctctgtgcactatgttgtcccaagttttgtacgagacattgagacgttgaacacagtaaggtaactgtgtccttaagtagtttgcccccctggtaatgacacatgcattatgataatatattaatactcatactaagataatatatattaaagagataaattaatagtggaacagtgttacagaaaggcactcacagagtgttgtgattgtgtccagggggaaagaataatgccggtgaaaccaggcaagacttcctacgatgtcagaggtgatattttagctgataagtaaagaatgcaaagggatttgcctggcaaaatgaagatgaagggaaattccaggaaacagaaaagttgtagggcgtgttgaggaaaggggacatggaagggaatgacttgctccaggaacaatagggtatgagcggagtagggtagaacttagatttggcctagaggtagaaagaggacagacttgccatgtcacaggggcaaagggtgtttttttcttgaaaacagaaggctagagccccagagagggctttacatgcaaaagggatacataaatatatcccgacacctaggtctgtatgaccttctcagaataacactgttggctaatatctttctattgtatgcccagaattcagctacttcccagcatacccaccactgccacccaggacagacctccattacccctgtgccttgttggccgctcctgttcccaccctggtttctgcaagtgtttcctctaagcagctcccctggccaccttccttagtgggagccttatttacacactgctgtgctcacacccctttcactcagaggtaagccgaagcctgcacctggccctcaggctctgcactccctggccccttactgcccccactcctcagaacagtcaccttgctctcccactctggccactgcctccttgctgtctccactgaagcctatgctgtctcacaggccaggcacctgccactccctctgtctggattgtcttctcggatgtcagctctgcagattccttcagttctattcagatgtcactttgctagagatctctctgatgcaaacagctcccagagctccattgtcctgcttttctcttctcttagtgagctgatctgcttattgtttgtcccttcccccattcctgcactagattacaagaaaaaaaatgaaaaaaaaaatgaaagccattcaacttctgttgataacagtgtcagtatctgttttattcattcttgtattcaaggttctcaaaacctaacctggcatagtaagccctagataaacatgtgttggatggatggatgtggattgacagatacatggatggatggatggatggatggatggatggatgagtgaatggatggacggatgtggatgaatagatggatggatggatgagtggatggatgggtgaatggatggatggatatgtcgatgaatgtggatggatggatggatgtggatgaatagatggatggatggatgagtggatggatgggtgaatggatggatggatacgtcgacgaatgtggatggatggatggatgtggatcactgggtagaaaacttattcttcttagagcaaatggttaattgtgaacatgcttttccattttaatggatctccaaagtatgcatgtggtaacggaatagggaatatgttatagcctcactttcaccatgctaggcaaaaaatgtctcattctactgagaaatgcactactgacactcagtgtgccgggggacaacctagtgacttctcttgactttcatggaaagcagaatcaatcctactcgaattttcaacagttcaactcctgcaagttaggaggaagtctgaatgtggggagccaaattagatgttcaaagaagcacatattagcttgcattctaacttgaaaactgcatctatgctgtggttgtacccatttaaaaattaaatgtgcatatagaccagaaatagaaaacaatatgaaaaaggcttggccaggcgcggtggctcacgcctgtaatcccagcactttgggaggccgaggcgggcggatcgcaaggtcaggagattaagaccattctggctaacatggtgaaaccctgtctctactaaatagacaaaaaaaaaaaaaattagccaggtgtgattgtgggcgcctgtggtcccagctactctggaggctgaggcaggagaatggcgtgaacctgggaggcagagcttgcagtgagccgagatcgcaccactgtactccagcctgggctggaaaaaaataaaaataattaaaaatgaaatagaaacaatactcaaaagatatcaattatttgagctaatgaagataacattaattttatcattctggttcatgaataagatttggtcttgatgttctgtttttaatggtttccttggaatttcatcttaacagcgtttgaggaatgtcaactgggctgtgagaaattgcgtgcactaggttgcttgtatgaatagtaccactgaaagattcctgctagtcacagacttgatgaaaagggcttattttctttctgaattcaggtgaaatgaaaagctgctgaattagcaagatctaattacttatccttggccctggccagtgattttctcccaaagaaaatactacctaataggaaatgagattgaatcagtgtaactttctgtagctgttttgttgctcacggatagtcttactttttaagttctaaaaagctactctctgtagatgaattaagttatagatggcaaatatgaagacttgtagaaattctaaaccactgtagaactctttcctactaagcctataatggccccatgaatttttcttaatttaataacaaatatagccaatattaaatattttggatgatattgcatattgtctattttagtttgtagcaatttgacacattctaaagaacttttaatctttgatgaaaatatatttatgtattgcattgtctactttttaaggccgtcttcattctacctcattttggcttggttactaagttgcagttatgtgcactataagagtgtattctccagactatacatggacagaagtggtccctttgcagtgtgaccatctgtccttatttgttcctgtataattaataataatccatgtgtaactattatatttattacttattatcaagcattcatatgatcctttttgtctctcaaagaatcacagtttcgactaaaagttatatgattcctctaatttgcacggaactgaaaacttggtctcagcagccagtacgcgtgatgaatttcctagacttatgtagtctttagcaccctttagcagtgtctccagagtccctctctcacctgccactcttgctgcagtgcaagagggttctctggaagggactgaaacctagaataaggataggtgagttgcccagtgaagagagaccaggaaaatcttgaaaccttgaatgaggagctatggaaaaaagaaaagcctgaaggcagtgcgatgggcagaagttggtgaaaattggcacatagcatgtgctaaataaatatttaaatttggtaccctgaaatagaagttgatcacatggatgtaaaaaaaaaaaaagggaatgatgacagaggacttggagctgaaaagtttaatcctagttgggttggattcaatgagggtaaggaatttagctgtgaagaaggaaagctccaagatgaccctatactgcagagtctggtttattgggaggaggagcattaggtttgcacaaaagctgcaaacataataatatcagattctttcttgaggtaacatttggccatagtacaggaaaatgacagccgaaggctttgggccactgaaggcagaagggtgcagaagggtacaaaagggaactaatagtagcttcaagaatgggaagatgcctctttcactgttttgtatcttggttcttgatttaaatgaaatatgtctatttggcttattttatttccttatttcactcactggggttttctttgttgttgctgtttttaggagctggtggggagtaaccctccgcagaggaattggaaaggaatagcaattgcactgcttgtcattctggtcatctgctccttgatcgtcacctcggtcatacttctgacaccaggtactgtattcattcttggaaaagcaagtcgctgtcagagagaaagagcataattttaccttgcaatttttttctaagtaactacctattacataatttatttttcccaagttctaattctcactatgccatatgatataatatggtttcaattttaaaaattcattttatatgttttggatttgttcacaaagttgtttactacgtggaaatgcttggcatatattaaaattacttatacaatcacttattcatgcttgatcaacttaaagacagtggcataaatataatgattttatatatttcatagaattcctggacattatatcaagggtgaattaagaaaattattaaaacaacatatgttgagtgtgaactaaggagaaggtgctaaataggtactactgaatattacataaagtataaaccagtgtcataaatctctcaggaaagaaaagacactaaaatccacagaagaaacctacaacaaatacagatatatacatgcactattgagtaagccaaagagaagtgctattggagttgagaggagaaagagaaatctttcaaaagaaagttcatggagaaggtagtacgtaaagtgggcttaatggagtaatggtaggaatttagtagccagagagtggtaggattagggagagaagaaagcctttgcctataaaataataatatagagctggacatggtggcttatgcctgtaatcccagtactttgggggactgaggcgggtagatcgcctgacatcaggagttcgagaccatcctggccaacagggtgaaacctcgtctctactaaaaatacaaaaattagccaggcgtggtggcaagtgcctgtaatcccagctactcaggaggctgagacaggagaatcgcttgaacctgggaggcagaggttgcagtgagccatgattgcgccattgcactccagcctgggcaacagagcaagactccaactaaaaaataataatgataatataggagttatcatagaaaaacattgtggccatagataaaacagtatgtaactgttttatccgttctcatgatcatagtagatgcctatttgtgcaggcaaaaaagttttaattctcagtaaatacatacacaagcattagaccttaagatgaaaaaaagtagatattataatataaaacctttttccacaggtacaacaaatgtgggcaaattataatccaggcttaaactattaccccaaaatctaaatgagaaaaggacgatctgtaccctgataccaaactagataaagatatcacaaggaaacaacatgccaataccccttatgaaaatagatataaaactcttcaacaaaatagtagcaaactgaatctaactacatgtagaaagattatacaccatgaccaaataggatatattccaggaaaaacaaattggcttgtatgaaaatcaatcaatgtattatacctacattaatagaataaagggcaaaaagcacatgatcatctgaacagacacagaataagcatgtgacaaaatccaaaaaccatttcctgacaaaagactcaacaagctaggaacaggaagaaacatcttcaacttgacaagtatctgtgaaaaacccaatagctagcatcatactgaagagcagaagactgaaatcagtccgcctaagaccaggagatggtagacaaggatgttcattcccagcatggctatttaacattatattggagggtctagccagggctattaggtaggaaaaacaaaaacaaaaacaaggacaaccagataggaaagaaagaagtaaacctgtctctattcatagaagacataatgttgtatatagaaaatcttaaggaatccacaaaaaaacctattataataataaatgagttcagcaggaaggaagatttcagaccaaaatgcaaaaatcatttgcatttttagccactagctatgaacaatcccaaaataaaattaagaaaatgattccacttaaaatagtttcaaacggaataagatacttaagaataaatttaacaaaataaagaagtataagacttgtgtactaaaactacaaaacaaaatggaaagaaattaagacctaagtaaatggaagtatatcttatatgaattgattgaaagacttcatatcattaacatgacaatactccctaaactgatgtgcagattcaaccaaatctctatcaaaatccctctttctttcttaaagaaactacaagttgattctgaaattcatatgaaaatgcaaaggactcataatagtcaaaacaatctcaaaaaacaattcaaagacttatacctcctgattttaaaacttactgtaaagctacagaaatcaaaacaatatggtactaggataggtatagacatatggatcaatggaatagaattgagagttcaaaaataaacccatacatctatagtcaattattttttgacaagggagtcaagaccattcaatgaggaaagaatagtctttccaccaaatggtggtggtacaactagatattcacctgcaaaagagtgcagttggacccccaactcgtaccatatacaaagatgaactcaatgtggaccaaagacccaaaatataagagctaaagctataaaacttttagaagaaaacatagggataaatctttgtgactttgaattaggcaatggtttcttacatgtgacaacaaaagtgcaagcaatcaaataaaaaatagataaattggacttcatcaaacttaaaacattttgtgtatcaaaaacactatcaagaaagtgaaaagacaacccaccgaatgggagaaaatatttgcaaatcaggtatctagtaaaggtctagtatctagaatatatcaacaactcttgcttctcaaaacaaacaaacaaaaaaacaaataattcaatttaaaaataggcaaaggatttaaagagacatttctccaaagaaagacaaatggccaaaaagcatatgaaaagatgctcaacatcattcagcctcagggtgaatgaaaatcaaatcacaatgaaataccacttcacatccactaggatgattataagaaccaaacacaaacaaaaaatggaaaatagtaagtattcccaggatatagagaaatgggaaccttcttacattactagtagaaagataaattgtgtggcctctgtggaaaatagttcagtagttctcctaaaagttaaacacagagttaccatattacctagtaattctactcctaggtatagactcacgaaaactggaaacatatgttcatatagaaactagtacatgaggttcataacagcattaatgataatagccaaaaaagtgaaaacaacccaaatatctatttcccagagaatggataaataaatgtgatgtggcggggcgcggtggctcacacccataatcccagcactttgggaggccaaggagggtggatcatgaggtcaggaagccgagaccatactggctaacacattgaaaccccatctctactaaaaataaaaaaaaactagccaggagtggtaacacatgcctgtagtcccagctacttgggaggctgaggcaggagaatcacttgaacgtgggatggtggaggttgcagtgagttgagatcgtgccattgcattccagcctgggtgacagagctagactccatctctaaataaataaataaataaataaataaataaataaataaataaataaatgtgatgtaaccatacaatggaatactcctccactgtaaaaaggaatgaagagctgatccatgctgtaacatgaattaaccctggaaacttcacactaagtgaaggaaggctggcataaaaggccacatattgtatgatttcagaataggcagatccctagagataggaaatagatttgtggctgctgtaaggtagaggtagggagaaaatgaaatgattgctaataggtatgaaatttctttgaagggggatgaagaaattattctggaatttgatagtggtgatacatgtatgactctgttaatattatatattttaaaaacactgaattgtatacattaaaaagatgaactttatgatatgtgaatttcatctctattaagctatgagtttgataaaaagatgggaaagctgttgggggagaaaagtgtaacctggccacaaaagtgccagacatactaaattgccttaaaaacttgtgtaactccaaagaggcttcaggagcagttccgggagagagagcgttgcagtctcctgcgtgagcgagcttcgtgaatggagcacagttgcctggaacaatcaggctgaggattcaatccagtgcttcaatgcccaggaaacagatccctgcacctgctgaaatcagatgaccagggtttagaggggctgggggaggaactgcaaagccaatccttgttttgttttatggtggtggtgctgatgatctcacacagctggggactttaaccactacatatttctaacgaatatagaggaagtcaagttttcctcagggtctgtggagcatgtgtttctgcctctacttttctttgagcagaattgtgctttgtgtaagaacatgattactgcagattcgatcttgtggttgtctggcactccctttgggacttgaaagcagtggtgtctaggggtttgcagttactcccaccttccaaggtgcatgtgaactttcatgtcaccccggtccaagggctgtcacgagtgtcactcaagagtggaataaggccggtgtggtggctcatgcctgtaatcccagcactttaggagggcgaggtgggcagatcacgaggtcaggagatcgagaccagcctggccaacacagtgaaaccccatctctactaaaaatacaaaaattagctgggcttggtggcaggtgcctgtaatctcagctactcaggaggctgagcaggagaatggcttgaacccaggaggcagaggttgcagtgagccgagatcgcgccactgcactccagcctggcaacagagcaagagcctgtctcaccaaaaaaaaaaaaaaaaaaagtggaattaaatggctgcccggagcttcttacaccgaaatgtccacagcagcaaagcgggttgagaaccaggtcctgggaccctgtcctccaagctcaactccaggcctggcaagcagtagccctgcgtcttctccacgcacagggagtggcggcaggcctcctccctccagcacagcagctgaccctgccagcatctacattcagttcttttgcagccaaggcaaccacagcagcctcccctctgcagtaaacagaggatgcagttgctgggaactcttctccctccatgctgacggccagttgtcaggggcaactgctcctggagaagctctagtgaatggctgaattccagagaaggctttggaggggaatttgcttttcttgttccatcacaatacacatgcagctgagccttgcttcaccttttggttctgctgggctttcatgggtgctgtttgtttctctgggctgtgctgccctgggatggggtgtccaaggtttaggcctctcccacagggctgcacagcaaatgttgcaccgctgctcccgcaccgaggcctgactgcatccactctcctgcaatacagcaatggcttgtgttttggcataaaattccatcaggcagaggaggtatcaaatcattcaacctgccactagctccagagcagtgtcaaattcactaatgtacagagcagtgtcacctcgacagagaatgcctgccaacagagccagcatgaatgatcccggctaggagctgagaactccatgctaagtgccagacagaatgtggaaagagaagatgccagtacttcccatgaagcttagagtccacgtaaagacaatgcatgtgcaaggagaattccacagtagtgttatcattaagtaaaaataaaagtcaaaggcagggtgtggtggaggcctgttgagttgtgtagatagtggaaatgctgacctagagggctgagatcctcgccaaggcaggagtggcttccaccggtgaaagtgaaagatgacagtcagtcttcaacagtggagaatccaagtcgtaaccgtcacacttcgcatatgtttgcacacagtgttgagtgcgttcctacccaacattgcttccattttggtagatttagttagaaattgtaatatgtgcttttttaaaaaaatagtatttttcaagtactaccagtcttgtattctggtttattgcaactcagagtacagtatctgctttctacttaattagaaaatccattctgaactcacttgattcagtcgttttgtgaaagtggttcctggtacccaggggccccttgccacccctgtgagaagaatctcatgcgcatggtggagtgccctcctgatgacgcagacctggaagggcctcatggtaatcactctgaacaacaaggcatcttgtcctggagtacagtctaattatcaccagttatgcacaattgatgttttagaaatcaaattaaaagtgttcaaggtgatcttagttccaaagggatttaccaagtgagaatatgtccctttcaatgttgtcattcatatctcccttgctggtccatgctcttttctaaatttcttctctttggaataataggctcaacgttacattttttattttcaatattaaatatgtatctgtctacaataggccatgcacagcgtatgccttttgttagcagctacagttcccgcattctgatggaaacaccgtgaccttctccggtgccacaatcgctgacgtgggggtcggaaactccagcaggatcggatttgcatgaaaacatccctgacaattggcttttatggaatctcacattagagcaggtggacagtggtttatgccggaaacactagaacacttttaggtggtacatcaatgagaagccttgaataattcaaagtcatagtgaatggaggttctgggttaaggccaagcacaggttatcagaacacaagactcgtcagtcttttgggtagaaacgtaacatagagattacttttacggaattaaaatgtcatcactgtttaatgtctgtgaccgcattgccaaccctcaccttatctttttaaaattcttgaacaaataatttcaaaacattttattgaagaaggatatacatataggatatatattatatatttaacataaatattatatagatattaaatatataaatataaacacatgtgagtaagctattgttgaattttgatgaattttaaaaccaaacttgattctgtaatcagcatccaggccaaaaaagcagaatgcagccagcatccggaaagccccccaggcccttcctatcattaatcctctcaagggcaacctcatttctgacatcacagagtagtattatgagtttttatattctttgcatttatggcataaatgtaatcatctggtatgtctacttttatgcctgcttttgttctatatgtttgtgagattcatagttgtattttagattgtactgctacccaatttttaacctatattggattatcttatcataaagtcccacataatctcaatgaaaattgcaaaatagcttaacagtcatttaatagcttttgtgtgtatcataaaaagtaatgcatacctcctaatttttttttgtcttgtagaaatagatggcttgctccgtatcttttgggcattttctctctgttagggctcctatattaaattcattccacaaattcaatcttgttatattccatctactaacactgaccatggcccaacccatttcatcatgggaagcacaggtggcttgagtgggttctggtattgttcatttgccctggggcatctgctctgtgagtcctgggctcctccgtgcctgctcacacccatctgcagcggactgactggattggggatggtgtctactctgatcatgaaacacagagttgttttggctgctgccgatgctaccactgttaatgtttctgcccaaagttaacttgttaatactaatcgagactgggtgctataaatagaggctgcagatgatattcattatgatggtccaaaacatgggagaggccattgagaacaggatacattcctggaaggcttcgtggagaatgagcaattagggactttaaaagatagatccagtagagatggaagaaaactgagagggaaagccatgagccctcgggggacagaggacagtctggccaggaagttgtggaggggccaggtgtggtcaagagttaagggagaaggaaagggatggtagccaatggggagagcctggagcgcacagggcctggatttgagactgaactctaacttctcataccgtttacaccagtgtcctaaccagtttcagaatctgatgaaaactgtaagtcatcttatcgttggaaggaaagaaagggcattgtgtgcacataaacatttggatatgttgtattaatataacgtttgcaaacctagtcagtccatcccagggccatctcagggatctgcttgagcgtttatccaaggtccaggtgttaaagtttgtcagccaaaatatttttgtctgtgagtaacagaacagccaactaaaactgttccaattgcaggtgtccgtattgtttcacaagacaagtttagacatagccagtccaaggcagattcagtgctcgtggatattgtcaaagtccaggtgggctccatctctctgctgccatcagtatgtcgacaacatggttgtgacggcttcatgcttcactcgcccacacgcacaggaagggatggacacatagaacttagcttgtgcatctcacttcctctgtcatggaggaaatagttttctgagtagttcctttcggttccccggagctgcgaggagacagcttatttgctgtaaccatattgcatggctaccttcactggagggggttggcaaagcccgccatttgtaggagtcaggctctgctgagtcagaagaaggcagagaggcactggctcttggggaagcagccttcagtgtccaccaccacgagcaagaccccttgatttgtgaaatccttgaggaatgtggtctacattccttgaacatgaccagtgaatttgagtcattctttaaattgaaacaaatcttctccctccaaaaggagggagttctgacagattctcatagaagaaataattaggttacattgctactaaccctatagtgagttgcaaacttgcaaactactgaaaagtgggtcgctgggaccatcttaaccgtctctcttttgatttcccatcattaattctagaaggactactaggtgcatctcgcttatttatggagtccttacactaaagagccatttttctaaaggatggcagtagatgcttattattcacactcgtgttaagactataagctaaggcaaatgggtctacatatttatctataaatggacacttttcaagtgttgctgcattttgcatcctattttaaaggcaaccatgaaaatgagtaaatcttatgctgggaccctggtttcctctggagtctcttgcctgctatagatgagtgcctcctggtcagcttcaaattaattttggtggccttaaggaccatatttttacaagcagctggctcctatattagttgctagtttagtgaagactctggcagtccagaaccaaaggcagcaattcaggagtttaagcagagttaccataccatgtcagggtcaggaacacagaaagctgtgatataataaaatcggagaactggagagcaattctgtaaaatgaactaagcaggtcggggaactaggaagatgaaattccagattgaaatggttccaaattctctgaactcttcaccttaagccctgcttggacaaccattgatcacttctgcagaaacagtatatccatgcactttctcagattgctacttcataatcctcaaatcccagatattctaaattgactctgtgcatttaagtatggtattaaaatcaccagaagttcagttaagtgataatttgcaggacctcccatttaatcagtctctttcttgcttttcccctactcagattcttcatgtctttctttttcattcagtaaatgtatgatcattgcagcctcagaggatgccttctaaagtggtgggttggttggaaatgggagaaaggccttgaaggatgcggtaggctaaaaaatgcgccccccccaccaaaaaaaaagtccaagttgtaatccttggatcctgttaatgttttcttttatggccaaaagggggccttttgtggctacattaagcatctgaaatggaggattacccttagttatccaatggaacctcaatgtgatcacatgtgttcttataagaaggaaataagaatgcttgtgatttttgtacattgattttgtatcctgagactttgctgaagttgcttatcagcttaaggagattttgggctgagacgatggggttttctagataaacaatcatgtcgtctgcaaacagggacaatttgacttcctcttttcctaattgaataccctttatttccttctcctgcctgattgccctggccagaacttccaacactatgttgaataggagtggtgagagagggcatccctgtcttgtgccagttttcaaagggaatgcttccagtttttgcccattcagtatgatattggctgtgggtttgtcatagatagctcttattattttgaaatacgtcccatcaatacctaatttattgagagtttttagcatgaagggttgttgaattttgtcaaaagtgggcgaaggacatgaacagacacttctcaaaagaagacatttatgcagccaaaaaacacatgaagaaatgctcatcatcactggccatcagagaaatgcaaatcaaaaccactatgagatatcatctcacaccagttagaatggcaatcattaaaaagtcaggaaacaacaggtgctggagaggatgcggagaaataggaacacttttacactgttggtgggactgtaaactagttcaaccattgtggaagtcagtgtggcgattcctcagggatctagaactagaaataccatttgacccagccatcccattactgggtatatacccaaaggactataaatcatgctgctataaagacacatgcacacgtatgtttattgcggcactattcacaatagcaaagacttggaaccaacccaaatgtccaacaatgatagactggattaagaaaatgtggcacatatacaccatggaatactatgcagccataaaaaatgatgagttcatatcctttgtagggacatggatgaaattggaaaccatcattctcagtaaactatcgcaagaacaaaaaaccaaacaccgcatattctcactcataggtgggaattgaacaatgagatcacatggacacaggaaggggaatatcacactctggggactgtggtggggtcgggggaggggggagggatagcattgggagatatacctaatgctagatgacacattagtgggtgcagcgcaccagcatggcacatgtatacatatgtaactagcctgcacaatgtgcacatgtaccctaaaacttagagtataataaaaaaaaaaaaaaagaaggaaatagagggagatttgacacagacgaaggaggaaatggcaaagtgaccacagaggtggagatgggagggatgtggccacaagcccaggaatactggcagcccccagaggctggaagagacaaagaacagatgtgatatggcttggctgtatcctcacccaaatctcatcttgaattgtagctcccataattcccatatgtcatgggagggacccagtgggaggtaattgaatcatgggggtgggttttttgtgctattctcatgatagtgaataagtctcatgagacctgatggttttataaaaggcagttcccctgcacatgccctcttgcctgctgccatgtaagatgtgcctttgctcctcctttgccttccaccatgattgtgaggcctccccagccatgtggaactgtgagctcattaaacctctttttctttataaattacccagtctcaggtatttcttcatagcagtatgaaaatggactaatacaagatgcttccccagaacctccaagagcgtgcagccctgctgacacttgtatttgggcccagtgaagctgattttagacttccagtctccagaactgggagagcatactcttctgttgtttgaagccatcaagtttgtggtcatttgtcacagcagccacaggaggctaaaataaagggagataaatggcattgccacttttacggtggccatgtcttacaggcaggcaaaagaatgcacttgtggagagatcagaactagaatgcttagaagccatgtgccagcccttggaagaccatgaactggacaacaactgtgccacgcactgccctgtctgctccttcctgccattcacaatgggagtccatgctgggctcctagctcagctctctaggggacaaccctgagtttcaaaaggtggttctttaccatcttcaccacaaagaaaggaaatgaaattctttcaaattgagatgtattttgatgtttttcaaaatttgagagaaagaggaaggaagaggagaggaagaggaataggaatctccagtattgacttaattcttcttattttacatacattcaattaaacagatttaagctccacttacagtctatgttattaaatttgtcgagatgggagatgaaatgcagattaaaaaaaagaagccaatgaaattcagattaaaaatatacattgtatgtgacagataatgataatttctgagactaagtaaccccttacaatgtgtaaaggtgtttgctacgtgtcacaggtattttgggtttagcatgcctattctcgtaggcatcgggtgaagaattgttccacccattatttccctattgggagcacactacacctgtgtttacacagcaagccagtcatttgggaaggttaaattattaatagctgaccttggtgttggtacatcatgaagacacataccgattcaggctctcaattcaggtatgagtatatgtttatgatcagaacatgattttattaattttattgaacaagtaatatgtataaatagaaaaacagtagaaatatattaaattggctgggcatggtggctcatcctgtaatctcagcactttgggaggccgaggcaggcagatcacctgaggtcaggtgtttgagaccaccctggtctccgtatctgctaaaaatacaaaaattagacaggcgtcatggcgcgtgcctgtaatcccagctacttgggaggctgaggcaggagaattgcttgaatccgggaggctgagccgagatcataccactgcactccagcctgggtgacagagtgagattccatctcaaaaaaaaaaaaaaaaaaagaaaagaaaaagaaaagaaaagaaatattaaatgaacaataataatccttttataattattttctcatactgtcagttctacaaccagtccctagatactgtcactttccaccatttctgatttaagtcttctgatatttattcatgtgctttttttttttttttttttttttttgagacagagtctcattctgtcatccaggctggagtgcaatggcatgatcctagctcaccacaacctctgcctcctggattcaagtgattctcctgcctcagcctcccaggtagctggtattacagacgtgtaccaccacacctggctaacttttgtatttttaatagagacggggtttcgcgatgttggccaggctagtcttgaactcctgacctcaggtgatccacccgccttggcctcccaaagtgctgggattataggcatgagccaccgtgcctggccttattcatgtactttttaatatcatgctgatatgtcaatgtccacagactaccgactacgaaggtcaaaatttagctgctttacattttctcccacttccgtctcttcactctgagttacaaaacctataatgctatttcaagtcctctatagatgtgtttcataaccacgtgggaaaattttttcatgtataaatttcttgttccattgattctaaatgcgcctcttgacttgtcactagataatatgggaaagaagcatgcttaaaagactttcttctcaatcccagcttcctactctttctcttccctttaagtaatatttgcaatatttttttcactttaataaaatctctcatcaaataataagttggtttttaaaatcaaaaacacatttacaacattcactatttcattttttaatttttaatttctgtgggtacatagtaggtatgtatatttatgggacacatgacacattttgatacaggcatgcatgaaatgataaacacaccagggtaaatagagtatccatccccttaagcatttgtcctttctttgtgttgcaaacaatccaattatactcttttagttatttaaaaatgcataataaagtattattgactgtagtcacattgttatgctatcaaatagtaaatcttactctttctaactctatttttgtacccattaaccatccccctctgcccacccccaccatccaccactacccttcccaacctctgataaccatttttctactccctagctccatgaattgtttaatttttggctcccacaaataaatgagaacatgccaagtatgtctttctgtgccaagtttgtctttcttagattatttcacttaacataatgacctccagtttcattcatgttgttgcaaatgacaaatctcattcatttttttgtggctgaatagtactccattgtgtatacgtaccatattttctttatccattcatctgttgatggacactagggttgcttccaaatcttgggtattgtaaacaggtctgcaactaacaaaggagtgcaggtgtctgtttgatacactgatttcctttcttttgggtacatacctagcactgggattactggatcatatggtaactctgtttttagttttctgaggaacttccaaactcttctccatggtggttgtactaatttgcatttttatcaacagtgtatgagggtttccttttctgcatatcattgtcagcatttgttattgaatgtcttttggatatgagcctttttaactggggtgagatggtgtctcattatagctttgatttgcatttttctgatgatcaatgatgttgagcaccttttcatatacctgtttaccatttgtatgtcttcttttgagaaatgtctactcagatcttttgcccatttttaattggattattagatgttttcctatagagttgtttgagctccatatatattctgcttgttaatcccttgtcagatggatagtttgcaaatatttactccattctgtgggttgtcttttaactttgttgattgtttcctttgctgtgcattttaactcaatgtgattccaattgtccatttttgctttggttgcctttgctaaatagggtattactcaagaaatttttacctagtacagtgtcctggagagtttccccaatttttttttaagtagtttcattgtttgaggtcttacatgtagtcctttaatccattttgatttgatttttgtatatggtgagagggaagggtctagttttattctcctgcatatggatatccagttttcccttcaacatttattgaagagactgtcctttccccaatatatgttcttggcaattttgctgaagatgagttcactgtaggtatatggatttgtttctaggttctctattctgttccattgctctatgtgtctgtttttatgccagtaccatgctgtttggattactatagttctgtagtataatttgaagtcagataatatgattcatccagttttgttcattttacttagaataactttggttattgtggatcttttgtgattccatgtaaattttaggatagttatttctatttttgtgaagaatgtcatcagtattttgatagagatttcattgaacctgtagactgctttagatagtatggaaattttaacaatattgattcttataatccattaacatagaatatatttttattttttatgtctgcttccatttctttcatcaatcttttatagttttcattgtagagatcttttacttctttagtaaggttaattcctgggtattttattttatttgcagtgattataaattgaattactttctttttttaaattttattattattatactttaagttttagggtacatgtgcacaacgtgcaggtttgttacatatgtatacatgtgccatgctggtgtgttgcacccatcaacccgtcatttagcattaggtatatctcctaacgctatccctcccccctccccccaccccacaacagtccccggtgtgtgatgttccccttcctgtgtccatgtgctctcattgttcaattcccacctatgagtgttttcagattgttcactgctggcatatagaaatactactgatttttgtaggttgatttttgtaacctgcaactttgctgaatttttttatcagttctaattttttttagtgaaatccttaggtttttccaaatataagatcatattatctgcaaacaaggataatatgggcaggtcgagaaatatcatccaagaaccaaggcctagaattggggaccccaagagcccacttagtaccctgccgctttgtggctgagctggtacctaagttgcaacacaaagtgctttttacctttacttctccttttcttttttttttttttttttttttttttttttgagacggagtctcgctctgtcgcccaggctggagtgcagtggcacgatctcgactcactgcaagctccgcctcccgggttcacgccattctcctgcctcagcctcccgtgtagctgggactacaggcgcgcgccaccacgcccggctaattttttgtgtttttagtagagacggggtttcaccgtgttagccaggatggtctcgatctcctgacctcgtgatccgcccgtctcggcctcccaaagtgctgggattacaggcgtgagccaccgcgcccagcctacttctccttttcttaagcagaagaagtctctccctgtagccccacagctgggaatgtcctgggtcacacctgaagccagcctgtctctgagtcttacccaagaccctgagcaagtactgcctgagtaccactgctactgattatttagggcccaagggctccttagtcagcaggtgaggaatcctgccagattgggtttttccattcaaggcaggcacagggtatgtttagaaatgtcatcccagagctaggacctggaatgagggcctcatgactcttcctggtgctctattctactgtggctgagctggtatccaagttgcaagacaatttcctcttttctcttccctctcctctcctcaagcagagggaaagagtctctcctagagctgcaagctgtgctgccttgggtttgtgaagaggtgatgcaagcactcccttggccaccccagctgctgtctcactaggttgtgtgtcccccaagtgtactggctctgagccaagaacagcaccaagacttgcgcaggaattgcagttcttgcggcctagactgcctttcaagttattttaggaccccagaccactttagcccacagtggtgaggcttgctggagctcaggttcccactgctgggatatgcagttcccgaatggctagggctggtctcagtgctccgtccgtgggaattgactgagttctgcctagcgttgctttactctgtgacaaagcaacactgagtttcaatgcaaagtcccacagtcactgcattctccctgccccaagcaagcagattctctgccacacaactgctgccaggggatgaggaaggggaaactcaagactgtctttcccactctcttcagtgctacttcagtgatatgaagtcaaaaccagatactgtgatcattaatctgatttttggttctttacgagctgctttttcctgtgaatagttgttcaattggtgttcctatagagaggatgatcagtgaaggcttttatttggccatcttgctctgcctcctttcaaaattcacaattttatacttaaacaaatatttctgttgtaaatctgaagccatagagagaggaaaaaatatataatcctgtgtaactgaacaacttttcttgaggcattccagtcaagtggacttttcttaaaattcattaatagttacaattggtctattgatattgggaccatgacttacttaaataaattgggttttctcaataattttattggattatttctacttgaaataaactgtccttgttacagacaaaatgaatgcctgcacaaaatatgccaaaataatatatgtatagtagttccccttatctacagagtatccattccaagaaccccagtggatgcctgaaaccatggatagtgctgaatcctacttatactatggggttttattgcacatgtatacctacgataaaatttaacttataaattaggtgcagtcagaaattaataatgataactagaaataaaggagaaaaattataccaatatactgtaacaaaagttacatgaatgtgttatctctcactctctttcaaaataatctcaatatttctagaccatggtcaactgatggtaactgaaactgtggaaagcaaaaccatgggtaaggaggggcctactgtaagtaagtttagaaaggttacagaatgcaaggtctatttacacatattaattgcatttctatgtactagcaacacacagttgaaaaatttttgaaaatacaaattttattagtcagcttgagctgtcaacaaaatatgcagactgggtgatttagaaaacagaaatgcaacaaaagccaaaattggcaagtgggatctaattaaactaaagagcttctgcacaacaaaagaaactatcttcaagagtgaacaggcaacctacagaatgggagaaaatttttgcaatctatccatctgacaaagggctaatatccagaacctacaaaaaacttaaacaaatttacaagaaaaaaacaactctatcaaaaagtgggcaaaggatatgaacagacacttttcaaaagaagacatttatgtgaccaagaaacatatgaaaaaaagttcatcatcacaggtcattaaagaaatgcaaatcaaaaccacaatgagatactatctcactgcagttagaatgatgattattaaaaagtcaggaaacaacagattctggagaggatgtggagaaataggaacacttttgcactgttggtgggaatgtaaatgagttcaaccattatggaagacagtgtgttgattcctcaaggatctagaactagaaataccatttgacccagccatcccattactgggtatatacccaaagggttataaatcattctactataaggacacatgcacttgtatgtttattgcaggactattcacaatagcaaagacttggaaccaacccaaatgcccatcaatgttagactggataaaaaaatgtggcacatatataccatggaatactatgcagtcataaaaaaaatgagttcatgtcctttgcagggacatggatgaagctgtaaactatcattctcagcaaactaacacaggaacaagaaaacaaatactgcatgttctcactcataagtgggagttgaacaaggagaacatatgggcacagggaggggaacatcacacactggggcctgtcgaggggtggggggcaagggaagggatagcattaggagaaatatctaatgtagatgatgggttgatgggtgtggcaaaccaccatggcacatgtatacctatataacacacctgcacattctgcacatgtatcccagaacttaaagtgtactaaaaaaataaataaatgcagaatttcatttctcacacttctggaggctggaagtccaagatcaaggtgtcagcagggttggtttatggtgaagtctcccttcctggcctgcagaccgcaccttcttgctgtatcctctccctgctttttctctgtgagtgcacatatgtgtgcctgaagagaggaaaatagagctcttgtttctcttcctcttttttaagtacagtagtcctaccagattagagcttcaccctctgatctcatttaacttcagtttcttccttaaaggcgctatctccaaatagaatcacattgggggttagggtgtcaacatatggatttgttggtacgtacaattcagtacataataccagtgcacgtggacgtctttgggatggccctgtcttacctaacacagtctgttctctgacccgcaaagattcacatccttctcatatataaagcacattcattcactctaccccaaggtccccagaaatctcaacctattatagtatcaactcaaagtctgtgatctcatcagttcagaactcccaaattttaacactgaaatcatctgaatgagttttgagtaggcctcagggcatactccacccaaagcacaattcatctgtactgtggctctgagaaactggagaggtaaacacagtagtgggacgggtataggatgacagttatagacattcttgttcaaaaagggagaaaaaggagtcactagttccaaacaacttctaaattcagttggggaaactgcattaggtttataggcttgggaatagtatcctagggctctcaggtctgccctctgggagtcatctttcttcttcatgaatggcagcttgagattgtagctgagtagttttataagcatgttttctgcctgagaattttgggggtctgatatggtttggctctgtgttcccacccaaatctcatgtcaaattgtaatcctaacgtgttgaatgagaggctggtgggaggtgattggatcatggggctggtttctaatggttcagcaccatccccctagtgctgtcttgtgatagagttctcacaagatctggttgtttaaaagtgcgtagcacctccctctttgctttctttctctcctgtcaccatgtcacaaagggtgcttgcttccccttttccttctaccatgattgtaagtttcctgaggcctccccagccatgcagaactgtgagtcaattaaacctcgtttcattataaattacccagtctcaggtagttctttacagcagtgtgagaatgggctaatacagcgtccaacagcctttatttgtttcatactccctctctccttttcagtccaagctggcaatgtttctacagatataaattcttaagaatctgcggatcttctatgtatgtcatgggaattcattccattagacaagtggctcttcctaggattcttctagatactttcatctctatgtttgccttctgctgagagaggtttggggtctgtgaatcacacatttaagctcttcaaagggccttttgtgtgactgaatacttaccttttgatctttcaaggtattagcaaaggtttttcagccatgctctcaggatggcagtatctttctcgacagtgaatctcttaatttcagcattttttataatctgaataaagtgacacatttctccaaagaagatataaaaataaccagtcagtgcatgaaaagatgctcaacatcattagcttgtaatattattcatctataaaaaggaatgaagtagtggtacattctgtacgtattacaacatggatgaactttgaaaacacaatactatctgaaataagccagtcacaacaaaatgcatattgtatgattccatctacattaaatgtccagaatagccaaatgtttagagacagaaagaagatttttggttgcgaagagctgaagagagatgtgggagaatagagagtggctgctaattgttatgctaatcttttgggggtaataaaaatgttccaaatttaggtcagtaatggtgcacaactctgaacatactaaaaccattgtgttgtagactttaaatggctaagttttatggtatgtgaattttatctctaataaaggtgtcaagaaaggaataaactaggtagggaaacatatcaacctatccgcatataatcatgtgaagtcacaggtgcctaatgcggtaactcactaaagaaaacaggctgctgaatatattttaaggtttcagtttatttcctggatctaaaagaatggaggtaaggacatgaagagggaatgtatacctttgatgtatttgatttagaagcttaaaataaagcataactacaatttcttagttcataagatgtgctgaataatgctgatgacttagtttctaccatttcaataaaaagtattatgtgactaattttgatgttatgctactagttttcttagactatttgaagacatgtgaatttgtaaggagaagcttttaagataaattagtatctctgtgagactttttatagacataagtctggagtataaccataaataatatactttagtaacacaaagactgcattacaaaaaagtaagcgaaaatacaagcaaaggcacagatttttaaaacaaatgctctcttcattcaaaagaaatgaactgaacatctgtttgctgggccccttagagacatgaagttgcgattcctaactaaaacagaaaaggaaaatatcaagctagtatgggaaatagacttgaaagcaaataactagttcattgatagtagctcctggtagcagaaaagaaagcatgatcaactttgagaaagtaaaacacacacacacacattgtaaagaggtactgactgtacattttcttgtagctcctctagcatcactcaggtaagattatttaatgcaattctcatcccaacaatagttattttgtttcttacatttggggttggatgactctagagagatttcttcagagaaatatgtttttgtgtattttgagtaaatctcacttttgtaaagagagagagtgttcccctgactcacagctgctgccacggcttccttccgtctctagggtttttgtgtatggatgagatgttaccatctcagctctgacctatggattcatatggtgaacaatctgccagtgggacagtttaattcaggaataggtcaaaatccccaaggttcatatggtgatttgcagacgtgctacctggttttaaatttcattgtttctaatctcttgatggtacagcatgatataaatttattctttcattatgataagaatctaccgaggaaataggagtagcacctgcaacacatagcatggattctacctcttttactttaagaaaaaagaaagaaatataattggaagtcttgttcaagcatctgcagtgcctgactcagggcactcaatcaataaatatgctggcagaactaaatgatgtgtttcctgcattctcattgagctttttccttgttactaagcagcatctgtgttaggtccatcgctgacggaacaggctgcagtggtttatttttaagcaaaagtgatctcattggaatttgtgaattaatggtaccgacgttggaaaatggacagcttctttgatttccacctgtttttgtgaagtgttggtaaggaagcaaacaaatagtatccattttgtaggaataacatacaaattgttctaaatacaaagactgctttactctgagcctcagcttgggggtctgtctcccctgtgaagctagccctccataacccttgtctcctttgagttttgaaaacacctagtgcttgacatctgccaaccgattcctcacacatctttggaggagtcatttcacctctcagcagctcagtagctcaatgtaactttccttcctcctcattatggtggggatcaggagagataataaatatcattgcactcggaagactataaagcactttagagttgtcagttattccaaattgctcacaaaagcagaatctcacagaaagtcttggactcttctgggtagattttctttgttaccaagctgagtttgtcagtagcttacctctacctgcagggattgcatgcccctccagcagctatgctcgggtgatgggatttatttctagttttctggtatttaaaatatttagagaaggagttccaaatggttctccaggaattttactatttaacaaatatctgaggaagggaaaggaggctgagaaatttgcattacacattggccaccgtaaagagtaactacatcactgcagatttcagcatgcctttacatgctggtgagctaaccaggccaagtcaatttgaagtgccatggagttttctatagtatatcaagctaaagggctggaaggaactttatttttcagtgatccctgaattgcctttgggatgaaatccaaacagtgaaagccactgccccttcttgcatcgccacctttatgttgccttccagtttaagaaggaagattgagcacagaaatgttccttgttttgatggcaaaagcatgtggaagtgacagcaaaataaataacgaaaaacacagctgcagccgggcatggtagctcacacctgtaatcccagcactttgggaggctgaggtgggcggatcacctgaggtcaggagttcgagaccagcctggccaatatagtgaaaccctgtctctactagaaatacaaaaattagccgggctcggtggcaggtgcctgtgatcccagctactcgggaggctgaggcaggagaatcgtttgaatgttggaggcggaggttgcagtgagccaagattgcgccaccacactcccgcctgggtgacagagcaagactccgtctcaaaaaacaaacaaacaaaagcatagctgcttctttctcaaaaacaagaacaggagttcttcacatacctggattgaaagggaagacatcctcataagaaggaacaggtaaaaacctatggcaggagggaaggccaaatttccatcatcctcaagtcatagagactgaagtcaggcacaacaggagggcttggaaggttggttttcatgagagaccaggggtacatggagtccctgcctgaaaactgggttcatggtcagaaggcctcagatcacatcacccatttgggggaaagggctccagcctaaatgaccaccaagacttagtttagagctgttacctagacagaatctcaaaactgcctgaggaccacccaaccaggggcctctcaagacccagaacacttgtaagacagaagcttacaaccaagaaccacaaagcatcttcagaaaacatccccccataaagcagaaaccaacccaacacacatgaaaaccaaaatccaaagaaatttaaatcaatagggaaaagagaaaatgacattttagatttttgaaataactatcactatgctaaagaagcatgaaactataaaatatgagtagatgatcttgaaaaaagttatttagatatattagatattaaaatgtaattattttaaatttaaatccttagttgggtaatagaacagtctaggtgtattaaaatattgacaagtaggagattgaactgaagaaatcatccaaatactcccaaagtcaaaaaggaaaaacttaagaaaaagcccgaggtgtggggattgacctagaagctccagcacagtccagatgggattctggaaggaggggatcaaatgctgcaggagccatattgtatgagataattactggtagtattcctgatgtgaagaaaaatagtctttaagctgaaaatattactgactgttaagcagaatttttaaagaaaatccacaagtggacattttttctaatggaatttcagaatatcaaatacaatgagagaatctcccttcccctctaggatttcctgttcacattgtctgccacgccaatgccaacacacacaatctcttgaaaatactgcatccaccgacaactttctgcccttatgagccttcctagcttgaatgtttttctctctcctttatcttggctagcagcctctttccttcagcaagtcctcctggaatcaatccctcccactttcttatttaatagtctgcttccatattagcaggacaagccctgttcctctcagccccgtccctgctatgttctgatcattcattctgctttggttccactgctctgtgagcttgtataaggcctttctcttcttcagggctcagcatggtttgtggaatgtggcagtctcctgtgcctgtcattatctcagatgattttgggaatgaatcaaatgataaaccaatgaattagatatcagttgaatgtgcaaatgagccatctaggtacagagaggccagcagtgagtttcttaaggagacagagctaattaaggacagagtcatgtcctggcttgaatggagcaattttgatagcatatatcataatgcctccaccacatactttccctatatagaagtcttaagtgttttaaaaatacctttaaaaaacaaataaaattacagtttttaaaataaaatacatgtatagaaagaaagattttcagaaagtgaatacattgccttttcatcttttatttccaacgtttgtttaaatggcagtcttacatgttttttcttatgaggcacatagataccttaagttgcatggctagaatcattcttgaatagtgaagtttaatcagataaaatgtaaatttcaacatgattattattttctgaccacgtacttaagaatgtctcaggaagttttagacttcttaattgcaagatcagagtgtaactttattagattaatgtctagtaatttttaaaattctcatttattgtcgtgtatatggaagtgtgtcatgtttgaagccatgtgccttttcctgaggctgcttcagccacacctagaaagctcctagagcgaagaaagaacttggtttggtttaatgcactatgttcagcgcccgggatagctccatatacagtcatgtttcacaataaggccaccttgagtcacagcattctgtaattttcaaaagactgctacacacagtaaccctatttgatattcaagagatcagtcaatgcacaaaggaatacatgacttttctgacaatttcagtaatttgtcaacaaccagacccaaaaggaagaaaccaaaagtgacgtaataaaacccatgcaatgcactggggtcctagaagctttgaaaattttatttagagattatttattcctatttgtttatgtaatcctaacagaatttctttctgtttttctaacctgccacagagtttaaaacacaaaattaaaagaggcaaatggttctgtcaaggtcaagaacaacagtccaaaaagcgtaacagccagaaattgaaacaagaaacagacataccaccagacattgaaatacaaaaacacacagctctagagccactgaatgtggaatgcacacagacatatgcacctcagttagcaccaagatcaccccacatagcagcacaacaggaaactgttgaaatgagaaaactgggagtctttgaaaaaaatgtgcaatgatatttagcatcttctatttaagagggcagggaagtaaataagcatcctaggtagataatgtccatcagatgtggtcaagtcaatatacagaggagtttcttattagtatcacagaagtgaaggtggtggaatggactggcctgtaggctcacaggtcaggcatgctgacagccctgtgtcttttcaaagtcaataagtggatttttgtgcctctaatggagagagcctcttctgaggaggagcaaaaactctagaagctttgatctctggaaatacaggataaaagctctcagatttttaaagtctcacccactgacgccattaactaaacatctcatcttgggatgaacattagctgagtgtgttcacaggcttatcccaagtgctttctcctaagccttgtaacagagatgcggcaaggcagaatctggtagtctgtgtacagataattggggtttgatcctgtctgagcaagaactaacccacaacccagagacagccagggacaagtgaagcttatggagaatgaagacctaaggaatattttctgtgtctttgaattctcagcagctaaaatgctgcacttaatgaatgcttcatgattgaccaattacatcatatgactgaggtccattctggatatccgtatcttcctctcgactattcccaccctattgttcataaatcaatcctgaaagaattatttacctctgtgctgagaaatatgatcacttacatgctgcaggtgtgggtgagaaggcgtgatgccgttctactgaatcatgatttccttagcataggttttgatagtttaattaaaaacagaatgcaagactggcttttatccccattcacttatggacgtcatgtgtgttcccatccatactatttataaatgacaatcagaatgtttatggtcctctcattttactaattatgaaacaagcttaactctttgctttttatttttttctagcggaagataatagtctgtctcaaaagaagaaggtcactgtagaagatctcttcagtgaagacttcaaaattcatgaccccgaggctaagtggataagtggtgagtccaggtccttcgtgcacaagacatcgcttccccatgcctcacccccactttcaataggttgggtctagtaatttgcctctcggatttccccctttggccacagaaggggatctacagagcttttgctgtagtcatcatcagattatcattctatgaaaatgtgtatctggtaaaatcaggcttttgtaatggtgttgcctcccgagcatccacacagccttcacttaatgagaaatgggtctgctgaagacgtgtcctttgtgtgccacctcccagagacatcatttctccgggggagctgtggggtgttgcttagcaacaggaacagtgcagggcacggtgagctttccttccttctccacaatcttcattcccctttgttctcttgctctctttccgttaggcagaaggaccaaaagcaactcatggagttcttgtagaatagcttccaaatgaaacttggagtgctgtacacagatgcagattcatttattttccctgttgaactttaatttggattaaatctactttccttgtatgggggattttttttttaaaacaacagaacaaaatacagttgggggcagaaggcatatgttcacaatgcctgtgttggttcataacataatctatttcttctaattgggtctgaaataattcaagtgcatccatggaagatgtacccatccctccacaggccaagttgccagcacctccctgttgcctccattgctgttgcttacatttcatctttgcttcagtggaatacacttgaaggtttatcctcaggccagagaactttatagtgatcaaagtctagttcagatccttgcttttataataaatgaggtccagagaggtcaagtgacttttctgaggtcacagagctgatgagtgcgagctgtggctagcagcccgtcccctgacttccaattcagtgctcttcccaccatcctcttttgctgagtgatcgagtgtcgttgtatgtttttctgtcaaactgcttctaaaatgcttttcatgcttcacaaactctcagaaatcaattaacaatgactcttggctgttagtctcctgcttaggggcaatcacttttctttcgtcctctattgtggcttcagtattcatttctgacccttagattagcttatttaaaagtgaaaaaagtaggtggatctcagagggaatgtattttagaaaactggggagaaattagagcagcagtatatcatgaataccaagggcacacagaaattaaaaaacaaaacaaaacagcacagaggtctttttgtttggtggaggaattgactttgcctttgttttcggctgacctgctgaaatgttcgtgttcgtgttcactgtatgttcgtgtacacccgctgcatcagcaaatgcaagcacttgtgggatgccacaggtagaccttgggaggaaaacatgacaactctccttgaggagctcaaagttgtgttggagacgtatctatgagcagccagtgggaatcctaacacacaagactcagagaggaggatcggaagttctcatccttctcaaaggatgtcccagagacagtgcacaaactcagtcttaaagcgatggctaggagcttgttagagaaagctaagaatagagccctggaagaatgttaggtctagaatgttagtcttgctaaaccctggttgggggaaccaaaaccaagctgagaaacaatgcccagcagttacaaaaacaaaacaaaacacttagacttgtggtatttaagaaaatgagtgagcacagtggctcacacctgtattccagcactttgggaagccgaggcaggcagatcgcttgaatccaggaatttgaggccagcctgggaaacatgttgaaacgtcacctttataaaaaactagccagccatgtgggacctctggtcccagctacgtgggaggctgaggtgagaggatggcttcagcctgggaggtccaggctgcggttaactgtaatcatgccattgcactccaacctgggtgacagagcgagaccctgtcaaaaaaaaaagagtgaactctttggtatttgtcaaaaaccaattataaaggctcagttaatcattgcagagttacttcattcactttaagctattacgtctttagggagcaggtttgtccatggaactgtttctcagtggtatacatgggagtcacaccacccaccaccatgatctcccaccaccaccaccagcagcaccagcaccacaggcttctctttctgctccttctctgcttctccttctccttctcgtggagaggcagaattcaaggatgaatcaagaggccagaaacaagggacaccaaacctgagctctagggttcagagtaggttggaggagggcctgggaagacgccatgatatgttgaaataaagtgtattcatacctataaggtatatatttttattagaaagcccatggcatcagacttggcctaaagcagcattccatgccaaaaaaaaaaagtatatgtagagatgtggagacacaagagcacagatgtttctggaggaacgtgtgccagttcatggtataaggagtttgatttttatgagcaaatgaatggagtctgcccagagaggcactggctttctggccagaggagaccagccggattttctttatatccgcaaagctgggagttaatacacgcaattgagacgtggctatgtgcccagcagaaaatgcccagcctgcctgtatcatcaggttatgcctattcataatgaccacctgcagttctaaatggacctgcctttggtgttgaggagctttcttaggatgattctccctctgtaaatgtacacactgaagaaactttgctgtgaagtaaccaagtggttgggtccccaaatacaggtttgatttggagtgttttggaacctaataattccactcacacatgaccctcagcttccccttacctttttttttttatcttattcctcttcctaaacattctctctcttcccgctccctaaagaggcaatagcttaaagtgaatgaagtaactttgcaatgatgaacggagtctttataattggtttttgacaaatactatagagttcacccatttttttttaataccacaagtctaagtgttaagatctgggaaaagattactacaaatccataggattatctcatgttgtagagctgggatgagccttagaaattattagaacattaattcattcagtaagagatttttgagtgcccacagtgtagcagacaaattgctgggcccaaaagcggtgagcgatttgttcatggaactgtttcttagtgatagacataagaattattacccaccaccaccatctatcaccactaccaccatcacagtctcctcttcctcctcctcttcctcacatcaccgtcatcatcataacatcatcatcaagatcatattatcatcttcattatcttctgggtgtttactgtgtcttaagctctaggctaaatgatctatatacatatatatatatatagacatttaattaccacaactacaatgattcccattttacagatgaagaaactgagtctcagggtattgaaataacttgatcaatatcacaaagtttgtaagtagcaaaattctgatttgaacctaggtctgtctggtttttataaactaccctattctggataaaattcaggtctcctgccaatttcttttgcaaccttagtagttacattgtgtattttaaccaaaattataggttccgaacagttcagaataattgccactttttgaagtctctattctagctttctattcccatagtgaccatgtcaaagttacaaaatacgcaagagatgaagaaaaatggtgtaattctctacagaggaagagacttgattttgttttttgtttgtttgtttgtttgttttttagtacacattaactgctgaagttaacaagtgtaccttgggtttaatattggagttaacagtctggaactaatacgctttatttatcaggaggaaatgtgttaggttggaattgaatttcccttccctcatttttatactgtatgcttaattttttaaatctaccttgtctgaaaatgattggtacaacagcctcacattctctaacatcctgaagaccttgtagacttccttacttgtttgttgcaactactggggcaagccaaatgaggtgtgtaaagccatgaaaaggcccactctgggccaggtgtggtggctcacgcctgtaatcccagcactttgggaggccaaggtgggtggatcatttgaggtaaggagttcgagaccagcctggccaacatggtgaaaccctgtctctactaaaaatacaaaaattagccaggcgtggtagggcacacctgtagtcccagctactcgggaggctaaggcagcagaatcactcaaacctgggaggtgcaggtggcagtgagccgacattgcgccacagcactccagcctgggtgacagagcaagactccatctcaaaaaaaaaaaaaaaaagaaaagaaaagaaaaagaaaaggctcactctgggctccctctcaaagaggtgcacactcccagaagtggtcacagcattgcctctccaagtatttgctccattgagtaaattcttatacctgttataacaaccgcattgcacttcttaaccttttggagcccctttgtgccattctgggactccactctaggggctgtgatgagatattttggttactctttgtttacatggaccaatcatcctgggctcccctggcccattccctctttctcatttctagatgatgataattgcaaatctcaccttctctgcccaaccctgcaaactccctccccatcctccttctcagctgaaactgccagaagagagcttaggaacactcccactgtcctgtcaactggcctcaacactgccgctggctcttcctgcaccactcccaccccgcccctgccccgccccacaggtgacctgtctgctgtctgcactcaatctaaaggaaccacagatgcactcgcttcacttacctgaggaatcattacagcaggcccctcctttctcccctaaatttttgttctgtattggctgattcctatcatgaacgaaatgtggtcttccttctcttaccttaacacaaacacctcatctcaagtccacatgccctgcctggctcggcctggcttccctgttcccctttgcagcctgaagcagtcttctatctgtaacatctccaggtactcttcttccactctccctaaatccactcccgttaggctaccacgcccagcactctccgaaactcctcttgtcaaggtcagagatgacctccaggttgctaaatgcaacaggcatttctcagaccccaacttattttacctgccagcagcattggacaccattgattcctcctctgccctggatacacttttttctttcttgtcagctcatgggcatctcctttgcaggagggttggccggttctccctcttctccctgacgtttaatattgctgcaagactcaggacttgttcctctccttttcatggctgcacgccctcccttggtgtctccctccagtcttatagttttaaatatcctccatttactgatgattcctaaacatatgtcatcagacaaaccttctctcaaatctctcagatgtctgagagacatttcaattttaaccttaatatctccaagtctcagtccttgatttccccccaaaaccaaaaatacaaaagaaaaaaaatccaccctatccacaacctttctgatgtcagttgatggaaaaatttgtagaacaagctaaggaccttcaagtcatcttttattctactttttctctaacatcccacatccgatccatcaagaaatcctgccagctctgccttcagaacacacgtgcccatcctagcctccacgtgatgtttgggtgcatgaataccatggcagacttggcatcagtccactcggagggttggagggctggactcaagcccagcagcagcaggaaggaccgaggctctactccggcacctcaggtactagctcaggtgcaaggagaaggggatgcttgggtgactggggtggaattttaatgtttctaactttaaaagtctgaattcctcaagtttctcacttatcctcactttgtactccctgaggggaaataattcacccccacaatgttaggtattgtctatatgatgatgagtttcaattctctagctcaaatgctcttccgagctatacacttggagagagagagagaggggtgtgtgtgtgtgtgtgtgtgtgtgtgtctgtgtgtgtgtgcatgtcagtcactggctaatttccatgtccactgcagtatcttacattcacctcacatcctcatgcccagcactacatcatcctcccccaacctcttcacagaccccccgctgcccactgtgcgagcacagccctggccccccgaccctccatgtctcagactctacatgatctgtttactctcctgactcatcattggccatctccccagttttctcttaaactttgcctacgtgaacttctttggattgcttcagaagtccatcttcttttcccccagagtggctcttacataggatgttccttctgtccagcccactcgctctcctctccgcgtccacttgtgatcactcctagtcaccaccctgcatgttatctttttcctttaagttgctccctaattcttgctctgccccacattgactcttctggttttggattctcctatatcctgcactgacccttttgttacataggttaagtataattatttatgaatgtaaactccacaaggatgggactcgcatctctgtttactgtggtatccccagcaccagcaaagtccccagtttgtggccgtccacgaagacttcttgggcattttctcatttgatacttaaacagcctagttttaaagataaggaaacttacaagcatgtgatttcacatagaatggtggaaatcttttctgatcatgtgatttgggggcagggacctgaaggtgaggatcatgcagatgagttctctgggggaaagccttccaggcagggtggaacaaccaacgcaaaggtcttggtgcaggaggctgcttggcatattcatgaacagtgttgagcctgagggagaagagccagagataagatcagagtggaggctgggaccaacacctacaggctctgtggcaatgaagggggcaaagggagtatgggggagaatttagagaagctgagaagttgggtttaacttattggcactgaaggttttagaataacaatgacatggtgcaagcttaggctgatatatcaacttcttgtattatatatactacacatttgttatatgtatgtatttattacagtaaattagaaatcagagattaacacaaatttaaaagatactaaaaattacctgtaacccctctaactgaaaatggccactattaaattttcatagctctccttccagataataacatatattgaataatactaagtgtattaagtaggaaaatattcataacctatacatacatatattctcatggcagtaagtatacatcgtcattatctttttaacatcttaatagtatttcacgatattaatgtgccttaatttgcgccatcttctgatattgaaagtttaggctgtgacaggaaaggaagtggcaggtgtaaaaagccatggtgagtgacaaatcagcaggaggtggtagtgtatagaaatggaacaccagggaagagagcactgtcaaggctgacttgaggatctcaggcctgggcagctggaatggtgattctctattcttgacagggagtcagtttctgtgactggatgaagagtttggagtggaagtctatgagcaataactcggtggaaatgttcgttaggtattgagaactggggatgaagccaggtgagaggttggagccatctggaggaccatggaaagcgtgggttgtggaggtactgctcagagcctctcggagggaagaggggaagagggacacggaggtgtctgaggaagtgtggtcagggaggcaggaggagaacttctaccacgccacgtcaaagtcaaggcaggagaaaatgctctaggcgagttagtgtgctgccgattttgtaacggcagatgtaaatgaaaaaccaccccacggtggccacgcacctcttcctggctcacagccccagggacgtgtttgtgtagacaatagtggtgatcatttgagtcatatttaaattgtttatttctttctgttaaaggtaaactgaggcacaatacaatttttttttttttaaaagcatttatttgagcaaacagtgattcatgaattgggcagctccaaaccagaagtggttctggggttctaccaagggaacaagggagaaggcttttacagaacaaagacagaagcaaagcaactatctgattggttacagttatggagttgccttatttggtcaatcctgttggaaagttcttagttacagaagttagttgggagcttctgactggttagtctttaagtttcacttttctttaatataggcatttatgagaaaaagcccaggtgaagtttttgtttcgttttgttttgctttgcttttgagacggagtctcgctctgtcgcccaggctggagtgcagtggcacaatcttggctcactgcaacctccacctcccgggttcaagcgattctcctgcctcagcctccctagtagctgggattacaggtgcacaccatcacgcctagctaatttttgtatttttagcagagacagggtttccccatattgctcaggctggtcttgaactcctgacctcgtgatctgcccgcctcagcctcccaaagtgttgggattacagatgtgagccaccacgcccggcccaggttaaattttatttatgtttgcaattcacacaaggtcaaggttacttacacttacaaggccaactggctttgtctccttgaggattctttaggccttttaacttacttttaacatcactaaccacactaatttatatggcaaataccctcttattgacactgttgcagactatagtaggggaaaggttaattccagaagcagggtgaaagacgcttacatgcagacagctttccaccctctcctcaccgcatctgtgaccaacagaaagtgtctcctctgtcttaacagaatttgtcactctgctcaggtagctgatgccactgcacctggtgagccacctagctcaacaaacatatttgcttttacagatctgccttttatgaaggcagcctgggctaaaccttggaaatggtttgataagccccatgccctgtgctctgagcaaatcgaagcctcctgcatccttcaaggggtcccctctcctcccgtctcctcccagtatctcttggatgcaggcaggcctggagctgattgacagaagctgctcgctgggcctgattaacttgtctgctagctccaggcagagcttggcctcacagcccatccggctcctgcctcctccccgccccctgcagcatgttcaactttagtctgaatatggtgatagaccatgtggctggcaccagcatctctccactgtctgtgtttgtttacgctcattttcattaatccagccacttgttagcagagagccctctgtgtctctaggatgcggtactagagagactgtaaaattgaagaaaattgcttcctttgaatggaggaaaatatcagctggctggttgatactggaaaagtatatgtttcagaagataaaattggagttagtgcacagggctcaaagcaacttgatttccatatgtgctttatcctcttctcttttgttatgctgaaaaaacagatgggttttttttttaaataaagcttatggggttaggtagaggggggaattcaagtttaaaatggtttgggtatttccactgctttttggaggccacatttttcaatcaaaaccattaagccttagaattgcagagagtaataaagtcccctcgagggcacttggtacagcagcctgtatcccatggccagcagggacttcagggaagtacccaggaagggcaggcttcgtaagagggactgtgttctcccacggctctgagagtgtttggagagcataacagtgatcatttgaagtcattacataaaaatacacactgaagcacatcgttgtaccttaatgaagtccttaagaaataaacaaaatgtaattatggtttacattggtgtaaaccaccagtttattttttctctcttttgttgtcatgctcaaggtcgcacctttccttaagagaagagagcctcagttgtctggcattaggaacccaatcatgtctctgactattttcgtgcagtaaaatctgtccatgccatcactcccattttttctgcctaacacagtttcaacagtatcctgtctgcacggccaggcttatccttaaatgcatcttccccatttctggtctctgagctaagacaattatttgcttaaacttctgcaaaagtttcctattggagttttctataggacctacgggaagaactcaaaagacagtatcatttagcgccagcagcagcggaagcaataattgcaacaggaattgaaaggataacagtagctgcatgaaatatctcagttacttcagttcagtcttcactgaaacccatggaggcaggaattttttttttattatactttaacttttagggtacatgtgcacaacgtgcaggtttgttacatatgtatacatgtgccatgttggtgtgctgcacccattaactcttcatttaacattaggtatatctcctaatgctatccctcccccctccccccaccccacaacagtgctggagaggatgtggaatttttacctttactttagaaataagaaaactatgagtcaaagacactaaatcactttttcaaagttaccaagatggctttagagaatccagggtgttcctgcctcagtgtaccttgcctccccggtctcctcaccacccctactcatggcctctattttgttttttttttgagatggagtctcactctatcgcccaggctggagtgcagtggcacgatctcagctcactgcaacctccgcctccctgattcaagcgattcttccgcttcagcctcctgagtagctgggactacaggtgtgtgccaccacgcccagctaatttttgtatttttagaagagacagggttgcaccatgttggtcaggctggtctcgaactactgacctcgtgatctgcctacctcgaccacctaaagtgctgggattacgggtgtgagccaccatgcccggccactcatggcctctattaccacgttcctggccatattaggttctttggcagctttgtgactttattgctcttctctttttctgaaaataccgttgctcatcacttctctgcttcagaaagtctcattaatcctcatggcttgacccaaaatacattctctctgattttccaaattagaattagttgtgtactccacgataccgcagtagaactttacaaaacttcagtcagagcatcagcttgtgaaccagctagggttggaccaccttggggatgcagcccacttcgcagaggctggatgcacttcctccgtctgaaagcagagagaggtgtgtcttggggcagggcagccgatttcttccacaccacgctggtcccttccagaggtgctgtaggtcctctgcctgtaggtcctctgggcggactctagttcctaactgatggatgatgctgggccccgctgttgatgctgcttaattcataatttggggactcaagtctctgcaggctccactgggccaacttgcttcctgcagagatacatgttcagactctactaattacttttccttggcaaacgttgcatccctgggaaatttaaatacaacttccatctttgttgactccagtttagaccccggccaagactgaaatcgcgtttcaactttatttgtttgcagtatacagagggacaggctcttctttttttgtttttgcttttttgatttagggaaataaatatttgattttgtgtgtatatacgtgtatacgtacatatttttttctcttaagtaaagggatctcatgtgagatgttcatgtttttttcctactctgataagtagacagatattctccaggtcattatacggttgtttccagggctccaaggatctcaagaaataatcctgaagaccccgccgtactcagcccctccatcctcctacctaatagagcagatgacaggatacgccgtgcagcgtgccttgtggccagcctggtctttcttcaaggtcaagctcaaaatcaaagcctggggcaggcggttttctgcctggcaacgcagctcagccccagcagcccacagaccaggatgcaggagtttgttttactttagttccgttccaattaaaagagtctgagagctcaggtgaatcccaatgcactgtagctgtttggcccaagggtgagattctgccgcgtcctctttttagagtgaagcgcattcagaagacccattaattagagactattcatccttcaacacgatgatattcacatgagcactgacaccaccatttattgtctcagttaaattacttcacagagtccttaaccatggtaacctgctagggtctaattaattatcattgacatcttttcaaacatcgatcaccttcttaattaataaaaaagactcacttgatctcttcggtaactgagcaccgtcccctgtgactcatcaatcttttgcccacagcatgtctcacttcacattcaggtgtctgtctgcatctctgtctggctcttgacagcaaacatcttgggggtcacaggtatgttgtagtaattatcatagttccctcataggtcacagtatctggggtgggataaagtctcaataaatattaactgattgaatgattcagcaaatgggcaaattgagtctccagagaagaggcctctgggaactgaatttttggttaattgagggctggccaggctctttattgtaactcttcgtgttttaagaaagtagacacacgtgggcggggcgggacgcagtagctcacgcaagcctgtaatcccagcactttgggaggccgaggctggcggatcatgaggtcaggagatcgagaccatcctggctgacacagtgaaaccccgtctctactaaaaatacaaaaaaagttagccgggcgtggtggcgggtgcctgtagtcccagctactcgggaggcagtgagccaagattgcgtcactgcactccagcctgggtgattgatagagcgagactctgtctcaaaaaaaaaaagaaagcagacacacccttgtaataagaaacgcacatctgattctattttcttgctttaactgggactctctaacagatgaaagagatagctcctgctactcctcatactagatgtgttctccatcgtaagtttgatacttgccacttattgatcatgtgcagaatgtgccagacatgatgctaagttcttaatcacttagcatcccgtgaaagacaggcgaggccatcgtctctacacagcccacatatttacaaatcttccaactggatggggccatccagaaacacaggcatgaagctatgtcctatggaaggtactgtggccttttaaatatttggggtgtgatatcatcctggtctcttttccacctaaatccccgtccctcctccatcctccatcctgtgcatcactgggacctcatgacgtgtttatctctcagcgatactttgctaccagcactgcatcttctctgttttccaaaatacactaacacaaacatgcttcataacagacatttacaaaaagtgacaggatgacaaaggagaactgtgggtaccacagaagatgaagcaacaccgatatgaacagcacggcttgctcttcttaaagcccctagacattcttgcttaagagaacctttccttgactgcccctttttctcttgtttatggggtcttccaacaactgcatggcctggttgtgctgcggttgcttctatcacagaacttttccgtagcccccattgccctaaactgttgccaataaagaccaagttgggattcagggatatcgaagtgaatcagagttctcttcaaacttagtgtgaatctcatgttcacatttaaaatgctttaggggcccttttgtgcagggctgacacccatatcctatgctcccttcgcaagctgagtatttgcaggacgctgttctgagattggtgtagacctttctaatatccggcactttgcagttgaaatggaattcgtgctttgtggtgtcttttctcatatctctttagtgtaaaagtggtagaaatgtgtagaaatagatatagcatctggatattgtgatgctgagcaggttctgggcttttaaacccagatttccaaaataagtgccaacctcacatctgatgcttctgccgagtgctccctggaacccagcctagaccgtctcttgggtcaggatcttctgttctctctcaagaccccttattcattccccctcttctctgaatattttgggatcctctgaaatgtcctccctccagaaaaaaaaacaggtgatagctctcagattccagcaatttatgaagcagattaatctagctgtgctggtcaggcctctctcctgtgctcctgcctcaggtacctttctcaaggatcaacaaaaagccaaatgcaggaatttccccaaacgaaagatacgtttctggaatttctaccctttgcgaggcaaggaaccgacatgtgcattcattttcttaacttctcccagatcacattcttacacaggacaacccaaagaagggaaagatggaataaacctcggaagttcaaagtagcagaatgtttcttatttacaccagtgttacagatcaggggccctagaatcagagaagttaagtcacttaccttaggccacacagctaataggtgacagagctagtctttactttgaaaatgcttctgacaattctgaaaacatgcccaaagtccagtggaaagttatgttcactaaatacaacggtaccaattaagtcttcatagggttgaacttgaatctgcaatggaaatctggaagtatctgtgaaggatgagacaacacccccaggtgtctcttcccccggctccctcgtgctctctcaagatcagcccagctcattagtgcagcccgtggctacatccaaagcacgcagccctccttgctgcagtcttttgcaagccaggcatcctgaaggtcacagcagaagtgctgtggggtaaaggatgagtttgtcagcagtgccccgtggctgcctggggctctgaagggcagccagatggagtgtgagctttgccttttccaccagatgttatttacttatttttgctgttagcttctcactcccatctcaaacacctctgggcaccaaatacttgaaagtagtttgtgatccgcaaagacaaattcctaataaaagtctgaaaataaaataatgttgctggagaattatttgggatacttaaaagtgttgtgtgttgtatctaacgtgttgctggtgttttccatacatccatgctagctgcttgggaattgccgagttctgagtcaggaattttaatgggcacatttattcagaccctgagcctctgctgcttagttctcaccagtgataacatagtttacagagtgacagccggagaccaggaatgaagctttataagtcattttaattatttgatattacttgtaagttgccgaaggaaggagactcctgtatgactatactgtaggtgtctatttgcgacacaccagtgaacacgcacgtgcgatatacaaaggacaaaatgcatgtgtgatggtcagcgactgagaatgcccctttctggctgacatcagaggggtgcatggcaacaaaatgtcatcccaatctctcatgggatgttttcttttccaactttcttctcaatggcttctgacattaaaataggtttttactgaatataaagtacttatgttcctcaataaaacccaaattgttgggttttaaaaacttaatgttggattaagatctcctaataagcaaggttaaacaaacaagggggttggaaataaaattagggagtgccaatttaccagctgctgtgcgttagcaacaatggccctgttagcgctcccccaggttcttcattaagctcggaaaatccttactccctgattgctcagatcccacagatgagcctagaagaaagtattaaatgtctaagaaaagacacaacatattcaagtctaaaaagatgtttctatttcactttgaggctcaagtaaacccatcccccgccccttgttctcttcccatcatcttcctttgccattggagcctacaattcgtccagaatcctttcctcctccctcttttgaatcagtccttgagacagcataaaagaagaacaaaagctccaccttatcccatcgccatccacctgtcttacatacttgaagaacaggagaagataaataagatggcccagcatggtcattttctaatttttatggagggacttgaatttgaaaccgacaccactgactgtgatcatgcccccagcatacgaaggaggattttcctttgggctcccaggcagatttaggcaagttcctcttctctgcctgccgtgacctttagaaatcatccactaatgtgtcttttcatgacttcccttccagcgttaagttccaggaacttaatctctttaagtgatttctgtccaagctcagtagctcaaggatcccataatgttaccaaaaaagactaagatctccatggttctagctgcatccaacaatgtaaacaggtaaagtagcatccttggagcatcttttattcactttataaatatgataaaagtgctgctaggtgcctaaagctctgatttgttagatgacttgggatcacaaaggcaaataagacaagctttgtaccttgtatttagagcagaaggtatattttaaatgttaaaagccatcgctttatttttatttgattatgctgggggctgaatctgtaacaccttgtatagcacccaggaagtattagttaagtgaatgcatgcagacgcacaccacatggttccagaaaggattctgggcaactcagtgcaaacatcagatagcaatatcccaaatcccaacaactgcaacagaaagaaaataggagaaaagatgagatttgtgcccgcagtgcatgttgatttaataggaatttcaaaagaaaaaaggacgtctgtggccaggtatatatccaaagcctgctttctccttctcgcctcacctctgctggcttctggagctcacactcgttcacctcgtccttccctcgttccacccattccctattctggtgggataccgcaccgggtgttatgagtacatcagctcatttgatattcacaaccattcctgctggctggtggtatctccattttacatatgaggaaactgaaggttagaaaggctaatgaggatcacaagtctcatggctagtgtcataagagagcagatatgacttcaggcttgtctgtctccaaaagccttcgatgtggaccctacaccatcctacaaggaggtggttctctaatccgggatgaagctcttgttcttcctgtttttccttttcctcaacatatgaggatttgttctgaagatcagcagtaaaatctcactgaagggttgaggcttgttttaaacgagtccagaactaagatgtaacccaaatagaaaaacagtcagtaaaaatccacgaagctcccgcatccctcttcttaaacatggcccagtgacccccgtgtgcgggttaaactcgagattcctttagaagatcgtgcttcttatataactaggactaatgaaagcagcctggaaatgagtgcacagtttgatatgggacccatcaaagatgtcattcagcctgaggataatgacccccaaggctgctgcaagagccatgtttgagctagagccagatctccttgaagtttatgcttcaataacttcgttaagcctccttggtgcttttgggtcaagcatgactttagtaaatgaattatacgttggataagggtcattttgtaagtgaaccaaatgatgataggaaagtcattctctgcccatacttatggtgtcatctgtaagcacagacctgcaactttccgtggttcagtgagactgagaccctgggtaggtgcactcatcacaggcctcacagggagattttatttaaattgacacaaagaattgaggattggtggcccatcgttttatttgaagatgtagacagcaaaactaaaatatttggatttcttttgttctgtaaaagatttatttttatgttttgaatgcctaaagagagaaaatagttattgtatgatgatggtcatcttacataaatgaaaataccatttaatgacatgaatcttattcattctaagaaattaaaatgcctgtaatcattcatttatattgttgccttgttatttggctttcgtgaactgtgtaaaaagttgtgaatttttaaagaattcaagagcaggattccgtttctggaattcaatatcggtcacactgtgattgcgaaacctctgtatacggatgcaggcagggagttttgttttgatttggtttggtttatgtgtgagcaaaatgtgtcatagatctgtagaaactatccaattttatagatcctttcaaacatggagttgccagacttctcctaggaattgtagcaggtaagataagccaagaagtaagaggaccatctgatagttcttatcttacttagatggaaagtggaaagctcatggaaactagaaatttttgtgtgtgttggttcttatttattaaaagatatattgccggatattgtggcttacacctgtaatcccagccctttgggaggccaaagccgaaacatcgcttaaactcaggagtttgagaccagtctgggcaataaagtgagaaatcatttctacaaaaaatttgtaaaaattagccaagcctggtggtggacacctgtagtcccagctactcaggaggctgaggcaggaggatcacttgagcctgcgagggacaggctgtggtgggctgacatcgcaccactgcactccaccctaggcaacagagaaggaccctgtctcaaaaaaatatatattatacatattttttattatatataaatatataatatatgataacatatatttatatatatatgtatatcacttgtaagcctcagtagtttaatattactaacaaacttcacagtgacacatcacacaaatgatctcagcatcctagaacttaaaatctaggatgaatatgttcttataatttttgtttctttctatatttcagataaaactcagatacctaaatttcatgatagctttctccctgggaaattatattctcttcttattgcaagcaccacattattgatttccctgatacctcattaccaagactcttttctgcaagagaaaagacgctgagtactttatccaagtttcacatcaggcccagtgatccccaacccactgtctttccatcaatttgcctcctccaagtcaaccaaatgcattcagttaataattgaaaaaatggtataaaaataaatcaggcatgtatagacgttgtcctcaggtacttgcagattaagggagggagtcaggtaaatggttaaagacataacaaagcatgggtgctttctcgagatacagacagaggagggagaatacagagaaatggcagcttcctgctgtaggagcttagagagagtctcgtggaggtgacatttgaaccaaagtaacatttgcacataactaggacattgccatgtagaggcgtctggtatgaggagggagcagggaatttctctaaatattgcaggtaaaaaggtttaggaaaagagttgtggcatatccagaaactgatcagaatatggatttggcttaagcctgcaacattcagtatctggtaggaaatggggccatgagtgtgaggagaagacagaccctcagggcgtttctgcaggcccctctctagcagctggggccatggtgggctctgagtgatgagagctttttatttcttaaatgatgagggtggagtgtagatagtgggctaggagaaagacatgtatatgtgtttggctttggggggtttgttgtggtttttttttttttgttgttgttgttgtttgagacagagtcttgctcagttgcccaggctaaagtgcagtggctcactgcaacctccacttcccaggttcaaacaattctcatgcctcagcctcctgagtagctgggactacaggcatgcgccaccatgcccggctaatttttgtatttttagtagacactggatttccccatgttggccaggctggtctccaactcctgacctcaagtgatccatccaccttgatctcccaaagtgctgggattacaggtgtgagccactgcggccggcctgtatatatgttttaatgagtcactttctacataaaaagttatttgcaggaaccagtgcggggaggtaagaatgacttaggcaaatctccttcttttaataagcttggagtccaacaacaagtgggcgagtcacaaacaccaacagctgtgtgtgtacccagatgcaggaagggacacagaaggaaaaagacacactgaacatttggcacagcagtgcattgagccagggactgtcagagctgagtgctgtgggcctctggtaatgaccattaaacaaacacctgccagaaagaacttctcctccactgggattcaacaatagggaatacctcatccagtctacctattcgtaatagacaatttagtaggcaaaatcttaaattttcataaagaagaatatcttaagagttggaggtttcacacatattgtatatcttaattttcaaggagatgcctatgatatgtttctaagatctttttttttcctctctggaataaatactagtgaacttaatttatttcaagaagaatacagatgcacctcttaaacatactacatacactccatagtctcagaatccaagactgcaaatctcctgtctaaaaggaatgagttaatttttgaaaagcagagtgaagatgttatgacataaaagctataaaaattcacttaatttaattaacttgacccgaaggggagctatgtgagtccagagacttaagattttttttactatgtgagaatatcccattaccaagtgtcatatatttatcccataattttcagcatgttttactgtggggttactcctcaatggcaaatgttccctgagcacaatgaatggcatgcgcccgtggctagaccccacaagaaagtcaagctcctttgaacccacagtgtgctgggggtcttcgactctctggaagaggttttgtgaaggggcctcttcaacagaaaggggaaggagtccttttggatctgccccatcgttaccatccagcctgctgtggaacaaaggagaacagacctaacgcctgtgcttggaagaacttggaaatgtgtgctgggaaacaggatcgaggccttccttagtgtcacttcataacatagaagtgttcacgtgacacctgcttgtttagatgactggtgtagctcaatcttccatgattacagctacagaattttggatatgcttttattgtttagcctagaatacatttagagaatataaaaaatttactcccatctttaaggaggttacattctggctcatccattcactcatgcagcattgtgttgaggacctactatgtgacagggactatttcagccactgggataaaaaggtaaagaaagcaaactccctccctccccccatgaaccattgtaggttaaaatagcccagtggtatttttcagagctcaataccaggcagaactggatgtaaccttcacaaacttggaattccatctcacatctgacagactaaaaaactaaaatcactcaagtaacctgcccaattagagtctcttctagtttgtactataccttcaacctggagttgagactgaggaaggcggaggaaggtgagaagaagggagtgttggtcaatcctcagaaaaagaactaggacaggctgggcatggtggctcatgcctgtaatctcagcactttgggaggcccagttggttggatcacttgaggtcaggagtttgaaaccagcctggccaacatggtgaaacccccatctctactaaaaatacaaaaattagcaggatgtggtggcgggcatctgtaatcccagctacttgggaggttgaggcaggacaatcatttgaactcgggaggtagaggttgcagtaagccaggattaaaccactgcactccagcctgggagacagagtgagactccatctccaaaaaaagaaaaaaaaaaagaaaagaaaaaagagctaggataaattagatcatcattcacagcagcatattcacaatagtatcaaataaaaaattttgaaaatagaataaatgtatgcccattttttaaaattggcatgcatttcctgaatatgcttagaggaaaaagcctgggaaggaataaaacaaagggtcgtcaatatttatcttctaggatcaggcatgctttttttctttcatctcacttatctccttacagcatccctgacaactggacttacctgttttatctttataccagaaaccagcccactctaccaggccatgcaaggtctttcctgctcagcaggatgatgggggaggacgcgttgtgtctctatcatggcaatcagaagaaggagaagatattctgtcatcagggaaggggtgaaaccgagcatgggagagaataatatcagaggcagttgcctgcttcatagatagttacagaaaaacatctgaactgacatggtgcttacatgagattgccacagttgatacagctcagaatacagccttttgaaaagtctaagcttagaagcagtcgagaacacaaaaggaaagaaaggagagtgaggtacttggactgagcgaggtggaaggtaatagaatcccaaataattgggttaaccaaatacgcaatgaattttcctcacatacaagcaatcagagatagaccatctttttattattttttattttattttttgagatggagtctcgctctctcacctaggctggagcgcagtggcatgatctcgggttactgcaacctccacctcccaggttcaagcgattctctgcctcagcttcctgagtagctgggactacaggcacatgccaccacacctgattaatttttgtatttttagtagagatggggtttcaccatgttggccaggctggtctcgaactcctgacctcaagtcatccaccctcctcagcctcccaaagtgctgagattacaggcgtgagccaccaagcccagccagatagaccatctattatggctagtgtcattgccctcaaatatcaaggacccaggcttctagagtagggtgttccaacctcagcactattgacattcggaccagatgattctttgttgcagcagctgccctgtgcactgtaggatacatgcctgccctctacccactcaatgccagcagcacccaccacctacgctgtaaaaatcagaaagtctccagacattcccaaatgtcccctgagagggcaaaatcagcccttgttgagaaattactattctatatccctgctctgccatcagtaacatatggcttttatctttagattcacaaaagaaaagtaggcaggtgagtttgttggcagtcacagctctacagaagccttgtggtagctttcagctcacatctgtctcgtggccctgagcttggccacgtgactaaccctttgttacttgcacagaagtcggggaggagaatatttttatctggacatattgaatccctagccaacattagggttctgaggaggacagaatgggtttggggcaggtgactggcaggctctacaagaagacattagagaagaaaggagtaaaacagatatttcactgacctcaatgataaggcatttcatggatacaaaaggagggcccccctgcggtacaaagcatggccattctagcactgcccccctgccttctaggagcacagagtgtctgtgagcactgcagcagcccattcccaaagaaactgggctcctgttcatattccacgaggcaagtcttagaccataggtgtgcctgcagtcactccaaattgcatgtccctgcagtgtgaggccaacattaagtcttgagatggagcagcgttaattggccattgcttaagagtctcttcattttctcatctcatgggttttaaatattttttaatgttttataggtcctttaggacaccacaccttttcatttattttagtatattttggttaaaaaaattctgtgatgtttaaaattagggaataataaaaaaattccctatgaaacctcacccttagcttgaagaagtaacaagtcatagtgaatctctgtttcctctatatccccaccacccaccaacccccccagatcccatacactatatcattccatctacagatatttcagtatgtgtgtgggggtcctaaagacaaccaggtttcatgagtcactgggaggactcataagagtcagcatttagacacaattacagctgtgagttattatcgtgaaaggatacagaacaaaattatcaaaaggaaaaggcacatggggtgacatccagaggaaaccaggcacaaacatctaagggccctctctaaacacaatacatgcttagtgcccctggcgagttgtatagcatgggcatgggcggactgtcatctaccagagaacctcactagagactcagttcccgtgggttttataggtggctcgtcacactacattctagactttcagaaggaaagcaggtgaccagccaaagccacagggaacaaaatagtttaggcacagaaagccactttgatcagtgatcagtttgaagaaaaatgtccaggaattattatagatagtggtgatggttgcacagctgtgtgaccattctaaaaaacattgaattgcacactgtaaaatagttaaaatgatgacttttgttatgggaattttgtctaagagaaatacatcccagttggcaccatttctataaaaaggaatagtgagagataaagcttataatatggtttcgctgtgtcactacccaaatctcattttgaatggtaattcccacaatttccatgtgttgtggcaggaacctggtgggaggtgactgaattatgggggcggatctttcctgcgttgttctcctgatagcgaatgagtctcatgagatctgatggttttaaaaaggggagtttccttgcaccagttctgttctcttgaccgctgccatatgagacatgccttttaccttccaccaggattgtgaggcctccccagccacgtggaactgtaagtccaataaacctctttcttttgtcaactgcgcagtcttgggtatgtctttatcagcagcctgaaaatggactaatacagtaaattggtaccagtagagtggggcactgctgaaaagatccctgaaaatgtggaaatgactttggaactgggtaacaggcagaggttggaacagtttggagagctcagaagaaggaaaatgtgggaaagtttggaacttcctagagacttgttgaatgttgaatggcttttcccaaaatgctgatagtgctatggacaatgaaatccaggctgaggtggtctcagacagagatgagaaactagttgggaactgcagcaaagatgacttttgttatgttttagcaatgagactggtggcattttgcccctgccctagagatttgtggaactttgaacttgagagagatgatttaggttatctgcttgaagagatttctaagtagcaaggcattcaagaggtgacctgggtgctattaaaggcattcagttttataagggaagcagagcatgaaagtttggacaatttgcagtctgacaacatgatagaaaaaaaaaatcccattttctgaggtgaaattcaagccagctgcagacatttgcataagtaatgaggagtaaaatgttaattcccaagatcctggggaaaaatgtctccaggccatgtcagagtcatcacagcagcccctctcatcacagacctggaagcctaggaggacaaagtggtttggtggactgggcccagggttcatgtgctgtgtgcagcctagggacttggtgccctgtgtcccagtgactccagctgtggctgaaatggcccaagttagagtttgggctgtagcttcagagggtgcaagccccaagtcttggctgcttccacatggtattgagcctgtgggtgcacagaagtcaagaattggggtttgggaacctctgcctagatttcagaagatgtatggaaacacctggatgcccaggcagaagtttgctgcaggggtggggccctcatggagaacctctgctagggcagtgtggaaggaaaatgtggggttggagccccgacacagaatccctactggggcactgcctagcggagctataagaagagggccactgttctccagaccccagaatggtagatcccttgaaagcttgcaccacacatgtttgaaaagctacagacactcaaggccagtccatgaaagcagcctgaagggaggctgtcccctgcagagccacaggagtggagctgcccaaaaccataagaacccacctcttgcatcaacatgaccgaaatgtgagacatggagtcaaaaaagatcattttggagctttaagattttactgccctgctagattttggacttgcatgggtcctgtagccccttggttttggccaatttctcacatttggaatggccgtatttacccaatgcctgtacccccattgtatttaggaagtaactaacttgcttttgattttacacgctaatagacagaagggacttgccttgtctcatatgagacattggactgtggactttggagttaatgctgaaatgagttaagactttgggggactgctgggaaggcatgattggttttgaaatgtgagcacatgagatttgggaggggctaggggtggaatgatatgatttggctctgtccccacccaaatctcatcttgaattgtaattcccacaatccccatgtgtcatgggaggaacttagtgggaggtgatgaattatgggggtgggtctttcctgcgctgttctagtgatagcaaataagtctcatgggatctgagggttttaaaaaggggagtttccctgcaccagctctcttctcttgtctgctgccatgtgagacgtgcctttcaccttctgctgtgactgtgaggcctccccagccacatggaactgtaagtccaataaaccacctactttttaaaattgcccagtctcgagtatgtctttatcagcagtgtgaaaatggactaatacaacttatgagttgaatttggggtgaatttacattatattgaatgtcaggtaaggagactgaactctattttgtagttcgtaggaaggccagcctagggagttttcatggagggaaaagttaatggagactgctctgttgacaggatgtaaatagcagctgggaaggaaaatgacaacatgcaaaagagtcttttaaagactctagtgaaaatgtttcacatgcctgtgactcagttctgatgatggctgtgatgctcatcatcaaaaaacttgaacttgtcttttaaggtctctatctggtcaacagcagaataacggctaccatggacggttctatgtgtggtcctggatttcctaagaattctcctgatccttgcttcctctgtttctgctctagaagggaaaattggagatcagagagttgaagctacaccttgcaatacagtacagcctttatttacactattaaaaccccttggccaaatggacaaagtgacaggcttagccctttgtatgtttgtccttatatttgcttattcaacaagtattcacagagcatcttcacttgccaggccaggtgattcataaggaaacagagcctcaaggtaaaatccaaagagcatgtggtttgaagccaatagacaggtactccagtcccaggttccatgcttactacccaattgattgctgcctctcagccattcctttcttcacctacacgatgtacctgaccaggcttttcttatgtaactactggaggcaaggtgggctctcttgactgaaagcactctgggaacacacaattttggccaccataaatgacattaaagaatacaacttttgctttagaatctgcgattattgtttgactttagctaagtaagcattttgtcaaatctaacagcaaaagcttctcagtaaaggagcatttcaagaaacctgtgaccctcatagccacaacatttaagatcagcatcaaatattttgtgtaaaggttccacagatgtttgattttttggggtaaggaaactgaggcttacagatgtttttgagacttaaagaattgacacgtcagtctctaaatgaaaaactgcgattaaaacccaatgcttctgcatcaggaggactagctaatggttgctgggcttaatatctgggtaatgggttgatctgtgcagcaaatcaccatggcacatgtttacccatgtaacaaagctgcacatcctgcacatgtaccctgaaacttaaaagttgatgaaaaaaaaccaatgttcctgatttatagataagtaataaaaacaacaaagtatccttttagctgaatgatccctgcttgctaacattgatgaatttagaaatgtgtcttcagttgacctctactcactattatttttaattagttttcttaacagccttaatagtgtttagagcattttatgaaacagtgccctctagtggctaaggatacacttttaaattgcaataacaggtgctatttttagctagctggagaattgatggcgaggctggcatttaaagagatgtattatcttgtggcagatgtgtatattgtacatgtgtagcaaataagcatgaagacagttactgtctggcttgttaactaggtgtatgatttcttgatcaccgacctattaaatcacttattaatatataatcttatcgtgagtgtaaatttagctgcctgtcatttataataacattagcgatgtgacgtatgatcatttgagcaagagcactgctttctgccaaagccaagagcctcaataattatttttaaactgtagttaggtatgatttaaaagagatgtgagtacaagaatagataactcaaggatcaacgtatgggacctaatttttatgaaaaattactcctgtctcattcttcttttcttgtccaacagatcattacaacccaaaagctcaataccatattcctcaaaatgcaaattaaatactgcctctcaaaatagcctttcttaactaaaaatatccaagtttatcttttacaaatttaggcagtttttggttaaaaagacaaaacggtaatggaaaatatacagtatcagggtgttttttttttttgctgtggaatgctattaaaattacatgtttttgaaacttgtcgtttgtggttttaaatcctcaatcatgcattacctaatatatgcatatctgggtccatgcagtcaaagttaccatgttgaaagagattttgcagtttaggaaagtaaggatcataaatgtttagtgaattaagctgacaaaaactattccattttgtaattgcagaatcagaactaggagactgtctcttgactacctggaatgtatgatttacacttgtgttctggacagcagcatctggaaagtctaaatactgtagtctcttcagagacttccaactcagattcctgggattccagagctggcaggatcccctgtagtctggcacagacctctcagcccatactaatccttggcttaattttattctgaaagactttttaaaataaactttttatgttttagaatagatttacatatatagcaaagttgcaaaggtagtacagaaagtttccacatgccccaaacccattttcccctattattatcatcttatatattatgcaacgtttgacacaatgaattaatagtattgatataatgcatcactgttagacaaaatttatgcttaattcagattttcttagctttcacctaatgtcccctttatctcccaaggatcccatccgggacaccgcagtgcatctctttcagttcctcttgctgtgacagcttcgcagaagttcctgtttcttgatttgggtgaccttgacaaaagggtacttgaggaacatgggtcacgtcttttatagaatattcttcaattgcatcatttctgttttgttttgtttcattttccctcctaagtagactgggtttatagggctttgggaggaagactacagaagtaaaatgcctttctcatcacatatctaaggaacaggctatcaacatgatttatggccattggtgttgaccttgatcacctggctaaagtcgtacttgtcattttctctactgtaactacatttttttacccctctttctatactgtgctctttggaaggaagtcactatgcatagccctcacttggagtggaaggcaatgctctttcttcttgagagcagggtatctgtagaaattacctggaattcttccatatggaagatttgtctactctcccccatttatttatatttatttatctataaattatgtatttattatttatttattgaatcatttattaatatcagtatagacttagagatacttatttaagactgttggaagtcattgtttaattgccaagatttgaaaaagttgattttgacaatgtttgcaatctcattgcttttctggaagagatttttggagatcttaactctgctatttggatgtagctcctttttttgtaggattttacacacagttttttttttctcagtttttgttgtgttcagaatggcctgaactctgacacagttgatattggatgatattcttatccctttcaatgctctcaagaattttcagtaaagattttttaagtttcacaattttttgtgctaccaggagaaatgtgtctttagagggtgactattgaatatatagaaacccacattcctgagatttttttgtgtttaatggtatatttcataataatacaactatcttaaaaagaatcacattggcatatttactctgcattattcaaatggctaatgctttgagaaggaacatcctctttataataaaatgagtgctgtcttgtttggcttatttagtatcaaattaatgtgatactcagtgtttcattaagttcctccaaataaccaattttaaagcaacttcttcattctttcatggatataatgctaaaggcgtaaaaagatgatgacccatattatctgaaagagaaaaacatgatttctcctttctctcttaaaattaagatctatatttatgatagcaaaagtcaggtgcttctctccccaccttttagaagctgcttagtgtgatcaggggataactacagagaagcgctatcaaacatttctttctgcactttcagttaggaggatgatgaatgcatacatacacattttccctttctagtagcaatagattaacactgttgggaataattcccctagaaagttttccgagagcctggaaatttcacatcatacttttctagccctgggtcactgtgagtttgccaaagcctccagcagatagataaattggtttccaagtgaacaaagtatattagtcaatctcctgaggcattttttctttgatggccattgagtgtgttaagcagcaactgtatgcccttcataataaaaagcactttaagttgagtgatggaaggctcttgatacttgtggaatgacagagaagttttgaagaaatgaacattagtgcaagtagacaatatttagaaagcataatcaaataaagagttttaagaaaccataatttttttttttactttaagttctgggataaatgtgcagaatgtgcatgtttgttacataggtttacatgtgccatagtggtttgctgcacccatcaacccgtcatctatgttttaagccctgcatgcattaggcatttgtcctaatgctctccctccccttgctccccgccctgatatgccccagtaagaaaccataataagttttaagtcaaagtgagatggaaaatacagagaagggttagtctttgaagactttggagaggtgatttgaaaatcagatgttaaaggaatgcatgggcataaattagcaggacattccaaaccagggctttgatgtgaacataagtcagttatgtgaggaagcagcaggcaagagcaggactggagagggtttgatgtcatctcaccaatcatccacccaataaagaaatctctcagcaacccctggcctgtggtcagccaatctgtgtctgaatgtatcgatcaagtaataatagttcagtgctcttagtgaggaagccagtgatgattgttacatggctctataatattaagataaaatttgtccccagaatgttctatgcttgggttcaattattccttttggagcaactcagaatcaatctaatattttggggaagtgacagtttttcagatcttggaggaagaacttattattaatctctctcccccattcaacttaattgaaagagtctccgattagaaatttgagaaaagatgttctagccccaactctgctatgtattatttgctttgtaagcaaagaacagttaaactgtctcaactatatatagcgtctatttccctctgttccttccctatccagggcttggctctatgaaaagcaactcgaactcttgccttccagcttgggatactgctccaagatagcccccctttagtgaactcctgtctcctatgcagttccatcttgttatcttatacctggattctccatctctgcccagacactacactaatttggatagttttatttctttctcacgttgcaattaatgaggatgagcctggaggtgggggttcctccatggagtccttcagggactggggttccctccagctggtgactgtggtatctataagggctcaaattcctccatcggatactctgtatcttgatggcagactcaagaagagaatggtgaggctgtcacaggaagttttcaggggctgggcatgaaagaggtatgcatctcttctgcatatatttcccattaattcacagtcagtcacttgaccccatctaactgccagagagcaggggaaatgtagcctagttgagtgcctaggaggaaaaagaccaaatgtagaaccagtgcatgtcacttctgcctccacttgtgctagaattcaggcacacagtccccaactaacctcagaggaatttggaaaatgtagtctggttgaaggctaagaaagaaaaggcactaattagactttccaagcttatcagctttagagaagagaaaatagcatagattttctatgttatggagtaaagttgtataatataataatgcatgtgaaaatgcttataatctggtaatgtggcataaaaatgaatgttaatatctttttttacaaataattctggacaattagacagccatgtgcaaaataatgaagttggacccttacctcacaccatagataaaaattaactcaaaatggatcaaaaacctaaatgtaagagctaaaactaaataatttttaggagaaaacagagggataaagctttataactttggatttggcaagattcttagatatagtacaaaaagcaaaaacaacaaaagaaaaaatagataaactgaagtttatcaaaattaaaagcttttgtgtttcaaaggataccatgaagaaagggaaaaggcaatctatcaagtgggagaaaatatttacaaataatttacctgttgaggaacttatatccagactatataagaatgcttaaacccaataataaaaagacaattattccaatttaaaaatgggcacaaaatctgaggagacatatctccaagaaagatttacaaatagcaatatgtacatgaaaagatatttgacgtcatcgttcagcaggaaaatgcaaatcaaaagcacaatgagacactactcccctcttcctagaatggctacagtaaaaagtcagataacaagtgttggtgagaatttggaaaaaacagaaccttcacgtcctgctggtggtaatggaaaatggtgtaaccactttggaaaatagctgggcattttcccagacaaataaacatagagttatcctttgacccaacaatttcattcccagctatatacccaagaaaaatgaaaacatataaccatatacaactaattacactaatgtttgtaataatattcataatagccaaaaagtgcaaacaacccaaatgtacatttgtgtaatggaacattatttggccataaaaagcaataaaatactgattcctgctacatgctacgtactgattaagtttgaaaactgtaagacagtcacaaatgactacaatatacatgattccttttatatgaactattcagagcagagaactctatacagacagaaaatgggatagtggttgcttagaatgggggtgaggggcatgggggcaaagaaagtgatagatcaaagttaagggattcctttttgagattctgagaatattctaaaattaattatgatggtgggtgcacatgtctgtgaatacgttaaagaccattaaattgtgcactttaaattgatgaattgtatggtgcgaattctatctcaatgaagctgttaaaaatgaaaggtaatatatgcattattgttaataagatactggcctacccagatgaaagactgtgcaacactcatggcaggtccttagaaaccaagttctgaccactcaaccatgagaaatactaatgaggaagaaatagaacaagcatctccagcaaccagtgtactagtctggacagctttctgatgatcttgactttaagaaaaatgtatatacaaatggagctaacctcagaacttaaaaatcatgccaagatgaccaagatccaagatgatgtaaagcttgtaagaagtgtaaagggaccaggcacggtggctcatgcctgtaatcccagcaccttgggaggctgaggcaggtggatcatgaggtcaggagttcaagaccagcctggccaacatagtgaaaccccatctctattaaaaatacaaaaaattagccgggtgtgatagcaggtgcctgtaatcccagcgacttgggaggatgaagcaggagaatcgcttgaacctgggaggtggaggttacaatgagctgagatcacgccattgcactccagcccaggtgacagcccaggtgtctcaaaaaaaaaaaaaatagtgtaaagggcattgaacagaactgccaggtaatattggagcaagtaagagggtaaggaggttgaacaactctgaatacactaaaaaccactaaattatatacctaactgggtgaatttatttgtatgtgaattatatcttgataaagcatgtgcttgctcttgctctcactctcgtgctctctctctctctctctatgactctcttacacatacacacacacatgcacacacacacacacacacacacacacacacacacagagagagagagagcaaggaaaagatagaccctggcgtggaggaggtatgcaggataaccatgcagtaaatattcttgcatgttctccagtaaggaatgtatttttcaaaattgaaaaggaaaattcgatatcactttcttaggaagggagggaagattgttcaggaaatagtgagaacaccgagctgctcagggagattcacctcaatctaaagtaaatttgagatgggataacataaaaataactaggtttaaggtactaggacaaaacatctagcatgcattatctcttttaattgctcagtaacccagtgaagtaggtaatatcattatcacccattcagagaggttaagtaacttattcttagtcatgcctgtagacaggatgaacaccagtttgaaaaaccctctctctggctctgggggcaaggtgaaagcccacgccatgtgtttgagaattcagcgcaggtaaagaaatgtttttttgcattggtgatattttatttagtagtaacactttattcctaaggcgtactagttgacttgtcaatgaaattacagaaccattgtaaataatctgtagaaatttgcaagcaaatgagaaagcagctgaaagactgggaaaaagagatgattgttttagttgtcaaaaaaggtaaatctataggactagttcataactggcaaaattctagagccatttaataaatacaagtatgtcctgtaaagcggtttgcatcctggtaacacctaattgtaagccatacaaatactccattttcctaacttatttctagagaatcaattatgatcttaccatagtgttatcttaacagcttttatactttcaaatgaaatggatttattcaaacattagttggtgatatactttttatcatgctgtaaatgatcctaatagaatttgttaaaacatttaagttacgagtgaagcacagttttctagatgtgtgctggactaacatttgccataaactatcacataatcagttccttgattctttatggacctgaagcctacttacataaaattggtctagtaactaatgataaagattaaataaaagtcattgaggtcattgacagaaggctatgttttcctctaaaatcatggcactcaattcataaacattattcatttttcttctaacttgtatatacttttagatgtaattgtgtttcaattttgattgcccagctaatcggaaaagctttaaacctcttaaacagtttctttataaaagcataatgacgtatataatggctttcagataatcctgtcacagaaatgattatttttctctattcctggtgaaccaaagtgcccccatgtgcttctacgtgtaatgttatataaagcactttgaagcacgctgtattatttttcatgacagtatcattgataattctaatggtaatttttccttcacacttggtagcttccaggcataatgacacatcactaaagctttgactgttaaagccctttgctcatgggtgaagaaaagagaatggcaagttaaaaataatgacttaatcctcatttacattgcaatgagttattctcatttgtggaagagggatgtcttcgatggggaggataatgaaggcgatgagaactatcagaccttttgtgcccgatcaataggtcccataaataaaatctcaaatcacacactacaaagtggaaatcatgtgtaatgggaagggagtgaaatcatcatcttagggatggcaagttcttactgagaaggatgacttcatgctggacctcttgtggtttccagagctgtagatgaataaattttcatcccttgattgataataaattttttgaggacaaaaatagttctagattgagaattcagtcattagactagactcaaggggacatactctagggacaactgtgggagaccatagactagacgatggctttcttacctgcaggaacaggaaaaaccatcttcaattttgtggtctgggagggactgtgcctaagcaatgagaataaaaatacaatctattctattgaaaaggtctttagagcatccttccagtaatctaaaagtgtgacaccccaaatacactagttctttcattattttcttcttccttctctttatcctgaagcccttaagtctactcaattatagaatttcttcataaatgacttatagggccatttttgctgggaatggaatgattttccatatcttctattccatcctacctaattttagtcaacctgaaaccactgctttttgtgaataacgaatgtccaacagaactcccaccaacctcacagtcccagacatctgcattactgtgggtagtcactcaaatgtagctagaggaggctttaccagaaaagctaattgccccaaactttcctcttggaattagagttgagtttttgttggtttgttttttaatgtgcccaattaatcttttattggtgtgggacaaatgttgagactaacaagaagattttggataagtggataacaatctcgcaccctacatccctccttcatgggggaatgtaagtgtggattgacccaaagcaggaactctaggggtgaagcaaggactcagctctgccttttcatcagctctgatcatccattagagatgtccaccctgggaaacatgggaaaattttcacaccacccaaagccctgcactgattccaccacaagctcccagtggggtctgggccttgtatgtcaacacagcaagatagctttgtatgaggacagtttccttcccaccagacgttagagtcatcctaggaacaactgtccaaccctgggcacgtgccacccagcagcacttctgaatatgccactgaggggagagatgaaataaacacctactcaaacccatacatctttcttaaattagccacaactaatttctttcatgctgatttttatttctaaagctgtgatttccaaagccataaactttgggtctgaatgaaattaagaagggttagagggctgggcacggtggcttatgcctgtaatcctatcactttgggaggccgaggtagtggattacctgaggtcaggagttcaaggccagcctgatcaacatggtgaaaccctgtctctactaaaattccaaaacaattaggcaggcatggtggtgggtacctgtaatcctagctgcttgggaggctgaggcaggaaaatcccttgaacccgggaggcagaggttgtggtgagccaagatagcaccactgcactccagtctggccaacagagcaagactccctctcaaaaagaaaaaaataaatgggttagaaatacagctagacgctaattcagaccctctccttctcatactttccatcaaacccatttttctttctcaggaattcttttttttcaattgctgttaaatatataatataaaatccaccattttaaccatgtaaaagtatatactttagtggtacattcacatcgctatgcacccatctcctccatccatctccagatccttcctactttccaaactgaaactctgtccctattaaaactaactccccattcccccagcccctgcacccaccattctacttcctgtctctgtgaatttgactaccctggggacctcatgtcagtggaatcacgcagtatttgtccttttgtgactggcttatttcacttatcataatgtcttacgggttcatccatgttgtagcctgtgacagaacttccttctcttttaaagctggatgatattccattatatagacagacaacattttgtttacccatttatctgtcaatagaatcttggatggcgcctactttttggccattgtaaatgatgctgctatgcacatgagtgtacaaatatctgttcgagtctctgttttcacttcttttaagtctatgcctagcagtggaattgctggatcaagtggtaattctatgtttaatcttgaggaactgtcataacatttataagaagctcttaatatttccagaaaccatcccaaatagtggatgagccaagaagacaaagtcatttcaatgccattttgacactcaagaaattaggccttaaaatgcttaatgtacaaaagaacaagcaatatacacttgtctctcttcaatggaaatagagttatttctgtgtgagagtctgttactacattctgtggaagtggctggagagtttacctggcttacaaagtctgttttgaatggcctgtcataaaatttgcatttggggactctggcgtggcacttcaaaaggtcagccaccattctctggaataccatgtgattggagaagcagattgtttccttcctcatggaataattgtcctgtcctccctggtgtgctttctacaacaatcagggtccaccgtgcatgagaggccagaggacctagttctgggccatggactagattcctgacattgggcatttactgtttctgagttccttcctaccttccttccttccttccttcctacttttttcccttccccttccttcctgtctcccaggctggagtgcagtggtgcgctctcggctcactgcaacctctgtctcctgggttcaagcacttctcctccctcagcctcctgagtagctgggactacaggcacgtgctaccatgcttggctaattttttgtgtttttggtaaagacagggtgtttcaccgtgttagccaggatggtctcgaaatcctgacctgatccgccctcgtcggcctcccaaagtgctgggattacagacgtgagctattgcgcctggcctgtttctttatgagtaaaatgaataagcttgcatgtgaagacaaccccaagtctcttccagctctaagttcccacagtgcacggaggcccagatgatcactgcaggaataggaaaaaccatcatcaattttgttgtgtgggagtgtctgtgcctaaacagtgagaacgaaaatacaatctattcattgaaaaggtcttcagagctcagtaaattttgccaaattcgatccatggtatacattacacctactaccttttctgatttcttttctctctttttcctacaaataatcactcttcctcaggtctggggatagtccagtgaacttgacagagtcttcaaggtctttcctggggccagactcttgcggcaccagctctgtttaatgtaacttcacaaaactgctccatagcctgacttcctggaagggtgttttcctgctttcccagatgaccagaaggacttcctcaatacctactccgaactctgctttttttttttttggtccagacagaaacataaaaagagaggtgcagcattccaagatgcagggagcgcaaaggactgggaatgtcaggagaccatgcttagccacgcaggaaggcgctgaggaaccgtgctactgaaaggagaatgagagctgagccccaggggaggcatctgcagtctcccaggagaaatttctcacatgcactgactcaagaaaatgtgacgtataatcatgaaagacatatattatacacaccatggctgattcctacgaaagaggaaaacaaccaggcaaatctatctgggaagcacaattataatatttattcacttgagtaggactctatcctctgatttaacacatggagtgaggacataagactcaggactgggatgagaaatgtaaggtgcatgaatttcaaaaataataaaatgaaaatatttatttgcttatggttcaattacgtggaatagaagcataagcagaaatcaaatggtcaaacttacaaaatctgctcttctttctgaacagtgatcaatggcctcactgaaaggactcagggcttggatgtctctgtggggtagtttattctagcacttgtgtgtgttttgccttggcaacacggaccaaggcaccagaatagcacacagcagctgaatgccatctcgaattttctgatttcactcccaggcttccagtcttttctgttatctttttttattttgaaatcctcattatgtgtttgctatatgaaagcacaccaaaatgtagcatgacacagtccctcccatgaaagcagaatgacacatggggaaggaaaaacatgatccaagggctgggagatggtgaagaaagtgctgagtgtggaccaaggtcatcacttgcctctgtagctcccctggcaggactggacatgtaggaggcacccccacagtcagtatttatttggtgttctaggttggaataatagtgtgattccattcaagggaaaggaacaaaatcagatcccagttgtaacactcattgcagcattttccttgagtctggggcaggtgtgtccagcgattctgcttggagaaggagaagatcctacagatgagcttctccacagggtgagagttgagcacccagcacggtgtctgcacagaggatgacaaaaatcttgaatgaatgaatggagttgaataagcaaacctaggacagggtgtggaaggtgaactcatggttcataaagtcagatactttggcattagtgaggtaggcctgtgtatgtgagtattcacacgcagttgtttctgtacttgtatgagagttactaatgttgatctagttgacattgtttagttcctagcataaataaagtatcatgacattgtttaagggaagaaaatttactttgtaattctgtggtgttgaaagtagggaaagaaatatgttgccttttaaatacacagcagcgctctcatggagatcacatggaaatgacagcggtgttgtgtccggaaagcaaaagcaaaacaaaaacgagaaaaaatgaaaccaacagaacttgggcacttaagaaatccatttcctaatggagtaaacagatatcgcactgcaagttacaattttcaacatcgtttaccctacacctccaccattcggagaggcagctctaataaatgagatgcagtgatgacctttaccggctccaccgatagctataaattgagctgaacattcccatcagctaacaggacagaactcattactgactgaagattgctacgatgcctttgactgagatgtgtaccattaaaatgaatgctccttcactcgtaaaaacaatgtcttgtaccgcagaagacctgatatgccattcattgatttttgtggatgactacaagaacaacccgtaaagattagctgagtcttactgtgtgttagttaaattatgattcagatcaatttgttcttttttgagagagttgattttttgtttcttaaattagaacctttgtcgatggcatgcatggaatataattgtcagatttacagtcctgatgattcaagcttagataaacacttgttccaaatacattaaagtaaaacttatatccattaaactaagtcaggattttgaatttttaaagctttgggtacatagaaaaaatttggttttgccgatttttttggcaaaatgactctgactttgagaacaaaccagtgtccatgcccaggtgacagcacttgccctgctgtgattattaaagcagccccttgcactgccaagtgtcctagtccagatgatgaattgcacagtcttattggaagtatgtgaaatgggaggactgtagccatacttgatctctaggatacacttttatcaggccctacaggtaaagtattcccataggccttgtggattttcacaggaaggcctaagttactcagatgtctgggagttgtccctggttggtttctgctaataacattagtagtcctgacgcttcatacttagcaggacctaataggtgaacccagatatggttctaatgtcatttaagttattaattgacattattaatatccccattttttttcagatgggagtatcaaggcacagaaaagccatataacctgtctgaggttccacagttaatagctagtaagcatgggaatttcctaggactccaggttagggaactacatcagacacgggttctcatttcaccaggaaacaaatgcgaggacattcttacttccacttactacaatatattaatgactagtgtgtgatgatacctccacccactcggagcttagagtgataacccggttatcctgcagctttcagatgatgggttctacctctctaattgactagactttctctaataatactggcaaagtctttatgggtcaaagtcagaagggaaagagtctctagtcagagccagagtcataagacacagtgaatgtatactaatgatgccacttggtaaacttccagcatgttatgctggaggaggctgggaggcagtctgtccctctgtccctctgtccttggtggcacagacagccccctggagccagccaaattcagactcacattctgcctaaggcagagggacacaggcagacacacgctaccaggagacgtctgcctttgacatcccacgtttgtgacacatgccagatcttctcagaaagaaacagtgcaccacagccactgtgccatcaggcactttgacactcacagacataaatgggcaagtcggaaggagtagatgattccctctaagaggacctgcctacttttcctgggagagtgaagaaacctctaatcattggtttctctgtttttccaacccaatgagtagacagaattgttccatgtaatgatttttcttctctctgtataagacactggccttcctgctgtttgcattttggattattttgtttgcttttaagtcagaaggacaagagttgtgtatagacaagctttatcatagattctacctaaaattcttctggaatatgattcagttttttcctttgtaaataaaatcataggtgaatgtgtggtcaaaaggtgtagttggttttcccctttcagagatctgagtgccgctgggggaggtggcatctcatatttataaaacatgttatttattttcttactttcaaaatgctaaacatagctgatctcaattaatcagcacagtaaccctttcagaaaaataaggtattctattactgaaaatgaaagactgcaaggtaaagtaactgctctcaaaaaacgctgcaatgggattagaaccaaattctcctgattccaaagccagaagttacagtcagagtatgattgtatttctttattaagattaaagtcagctctcagcagcagaaagattaaaataatactagtttaagaaagatggaaatttacttgtctctcaaatttatttattttccacatataagtccagaggtggaatctacactgtattttgcttttatcttccattttcatcttttgcttttatcttccaagatcacctaaaggaacaaaatggctgctctagctccagccatcataaaagccttcctgctagcagatatgaaagaggagaggggactatcatgctctatccctttcaggactctgctttagaggttgcactgcatacttctggcatagccagtctgtggcaaagcctaaaatagaggccaaatttccagatttttggaccaagctctttccaacaatctgtcccttacgcctggagctttttgtcaccgttgtgttgatgtaatctttggtcaagtttctgtctctcagcctatccattagtctttgctagtaggaggtgatttttctcagggatgcatagataaggtaaggtggaggcttggctccattggaaatgctgaaatgaatttactgcaaaactagtgttttctatgggagtgggatggggcaggaaaatctattgcatctccaccagccagaattcacttgcgtctagtaagacctcctcacatttccatcagtgtctacaacttacagagtcacaaaaagctcggagacaataggaacagacatcaaaattatcagtaacgcaaaatataagtgcccatataatgcctaatataagtagcatgtaccggacaatgcctcgtattctactgaagaaatagccagtgatcttctggcggcccatttcaaagtcttaaatttttttgacaccttcagtaatacttgttattgatttgctctaagtgaggttttttaaataatagaatcatcataatccctttagagatccttcaaaaaatcttagatttatataacagctaatcataagaatccttaacaatgtgtatatgcgaagtccttttgttcgttatcaggaaagggcttggctgataacacatttctgaggatattcattcctggataaatttttaaggatttttattctttgctgatctttatttcaccttcacccctctcaacatttgaaagcctacttaactctatattttcttttatgttaggttcaagtgaaaaaataatttgcaaaaacaaatcctaattctacaaataaattgtttttttttttttccttaaccatgtagcaggtggttgacaatattaaatacagaaagagggccttcgttgtttcagtggggtttcagtgtatcaagctgtttaaaagtctaaacaggactctgttaaggcacataaaaattgaatagaaaataatggaaatgtaaaagattttaaaagctatttgggcaatgcattaatcaaaggcaaattgggcagtctcagatcttatgattaaaaattaagtgaaattgaaagccactaaagtcatctttgaaatgtagctacttcccaaataatttccaagctgtgattatttttttgaaagtacgaaagtacttatcaatgtcattactgacgttgtaaaaatagatattgtggtatcattttaccgtagtttgaagtccacagaatgtaataaccctcctctcagtctatccacacacgcttacccatttcagccccagacaattctccacctttgtttccaaggtttagggtttctaaagcaaatgcctcctaataacctcagacttacaaaatacagtacctggttgcattcttgaaagggggaagaaaaatattacgtggtctttctaactcttttttttttctttgagacggagtcttgctctgtcccgcaggctggagtgcagtggcgcgatctcggctactgcaagctccacctcccgggttcacgccactctcctgtttcagcttcccgggtagctgggactacaggcacctgccaccacgcccggctaatttttgttgttgttgttgtatgtttagtagagacggggtttcaccgcgttagccaggatgatctcaatctcctgatctcatgatccgcccgcctgggcctcccaaaatgctaggattacaagcgtgagccaccacgcctggcctcattcttattctcaagatcctgcaggaaaatcaggtgtagtgaacctcccagtcaggttatcccgccacgtatgttaaagttgccagcgtaagttggaatcaagaggcctgcgtgaggcccttgagccagagggagctcattaaccagccagcaattctaatgttcacatctcacttagggtcttggagaagctgggaaatctccaggtctcgggagcacgtctcacaaatgtcaaggctgtaccaccttggttaagcgcttactggcagggccgctgaatgctgtttgtatttagaatggaaagaaatattactagaaaacttgctcttttgaaagaaacctttgtacctctttggagcccacattgccttcctctgacaatttttgtgaggtaaaccagaaagcagaaaacccagacacgagaaaaaaaaattggaactctgtctcctccctccaggcctaatcctacgtactaaactgcagccccgctgtagagcttcccagcgtctgctcaggagccccctgaactgtcttcacctgtacaattagtgggtgttatgggaacgtgcacctctggcttcccaccttcggtatctcccacttcctgtacttgttttacctaaacacgagaatagttgctcacagtttagtctttctcaattctaccctcacccaacgttcccccaaaacccacctctggggcggggatcgccttcctgatcatccagggagaagcatctaggctgttttgagtcactgctcctcactgaccgagtcattcccaagtggtgcctgcactgtggacaagagctccaaccctattgtacgtttctagaaatcagggattatgtggtcttattttctgctccattttttatgaaatattttaaatattttcttgaaagggggaaggaagacattactgtggtctttctaactcgttcttttcttttttttgagacggagtcttaccctatactgtactctacagaaaagtagaaaacatatttcagtgaacacctatattaccagtacaaatgccaattaatttcaatgccttggccatttttgtgtcctccatcagttctttttttgctgaaaatatgtaaacataaattatactctcattttctttcatccctgaatactaaaacatgcatctccaaagtgtatcttcccatacatccacaggaacatcattgtatctgacaaaaacgaccataatccccaaatatcattacattcccaggccatattcaaattcccttattcagtctcaaaatattttctgtagcttttgttttctttaagcctggatcaaattaaaaatcataattgtacttgattatgtcttttacatttctcttaatggtagaatggctcctcttttttctgtgatatatgctatttcacaatacacctggattaggccagttgtattgtaggccctcctgcattccgcacttgactgattgctttcttgtgaggtggtttcacaggtttatctataatgtctacttgtcccatgattggtgattcgaaggggagattaatgggcaaaagaggtgaccaccaaatttctctattataaacatgtttttcccattgagaatggcgtattttctgtgggataatatcccattaacttttctccaaatgaggttagcatccatcattgatccttacctgcaccaagttttacgacaggggctacaaagcggtgatgttctgaattaatcacctcttctacacttacgagttgacagtcttctgaaaggtggaactctccttcataaacaggctatttggtgtacctgaagtaccaacaaagcaggcagctgaatccttgtctgtttttaattattagttttcagattaagaagttgatatcatagttatgttcagctatggaaaataaatagttttgttttctttaatgttttgtgagtatcactattgacttgtgctttctaaaatgtattcactgtgtcttcatcaccgatagcattattcttttggtgtttggattgtcctaactttgaccatggagagcccctccagagggttattctgtccttgtgtcagttatctaatgccacagagtgctgtgtaataaacaactaacaaccttccagaacacatagaataagtcatttttcacaaacctggctgttggcaggtggtggttagggaactccacgtatctcatggctgatgtgctcacatggccagacacccagctggatgttggctgatctggagtggcctcttcttggatgactggagcaactcggtttgttcttcatgcctttgatccttctcctgggccaggacactagaccaggcatgtttgtctcatggcaatagcagaacccaagagaaagcaagtccactgtgtaagagctttttaagcaccagcccgcttctacttactgatattccattgcccaattctagtcctgtgtctgagcctagagtcatgagaaaaggcccggaaaaattagatggaaaagggtggggtgaagaattggagccatttacaatctaccatggtcttattgatgtgtccttatcagtcacttgtctcccccactggtctttgctttctggccagtaagatattttagatttataatatactttgtgtgcctcagacctggaaacatccattttttcaaggatccctggctcattttggggagaatggtactcagagacaaaaatctgggtgtctaggataatcatgcttctagcccgttttcatggacaaaactagcaagtgtgtagttttgaacaataaagaaacattggttcctattgatatttctgatgcaaattcaacatcacagagttttaaattttaactgaatttccttttgtttgttaaagacagggtctcactctgttacccaagctggagtgcggtggcacaatcatagctcattgcagcctcaaactcctgagctcaagaaatccttccacttcagcctcttgagtatctgggactacaggcaaataccaccatacccagctaacttttaaattattttttttgaagagacggagtctggctatgttgcccatctaatttttcaggctctcaaactcctgggctcaagctattctcctaccttggcctcccaaagtgctgggatgataggcatgaaccactgcacctggtctgaatgtccatgattaaaaatgtgggtctcttttctcttgtacagaaaatcttagctcctaataacattaacggaattgtttattttcttggaatgatgtctgagagcacaatgctgtgattaacacggaatgctaccacagctaatatgcagtaactgtcatatgattatcagtttcattaaagtcagagaacgtggctaacacatggtccataccaaatatctagcagagcatcccgtacattgtaaatattttttaatgcataaaatgtctattggttttgttgttttgttgtgtttttttttttgagttttgcttcttgtacctatcatttctctttttggaaacacctaccttttctaagcatattctcatgcaaatgagttactgatctactttaagcagaatgcacataatttcttttacatttcctcaccgtctctatgtgtagtatttccttgatatgctaaagggctgtgtgcagttctcataatcccaaagaaaaggatgtagttatcatgttgcgtactttttaaaaatatcatgagttttaacaaaacctaaaaaccagaagaggctttggcatttccatggcattcaaactcctactttttaatccattgattctgatgacgattactgaggctcctgctacaatataagcctgcattcttttttaaggtcttgtgacatttgggttatgctggaatttgtttttaactatttaaagatttcctattttgtcccacagtggttgtcttctttatctttaagataatatctttaacactgaagacattattggcaagaggaaggtctggaggtctgctcaccacctttggtgttctcttccatagccatggcctgagaagggtgatttttccaggtgaaagataggctgtggtgtaaactaagacattccaaatgaaacataatcacttaatataacctcgtagatagtgctgtccaaaagaactttctacagtattggaaatattctatacccacagcatccaacacagtacccaccagctatatgtggttactgagaacttgaaatgtgtctagtataaatgaggagctaaatttttaatgttatttaattttaattaattttaatattaatggaaacatgtggctagaggctacatattagcagtacagttctagattataaatatggtccaactaaaatatttgcatttgactcatgtttcctgaaagaaactggcagtaggaattaatgtcagctttctaatcatttttgattcttcttataacttgccatacacaccttattgcttaagagccaaaggaaaaatcactcttcatgagaggcagtgtatctacatctggactgaagaccttcatttggctgctgtgagttcataggctcccagctcctgactttgcagcgaaaaatttcagaattggagcttgtggcccagtgattattggagaaacatggtgaaaacacaatcactaatagcctgcaactgaaatatcagattaattctataaacacaaattactgcagaagcccaaaagggatgaaatgaaagacaggtgcaacagacctttatttacgttatagctgcatgatgtttttaaaacttcttgaactgtaaatgttaatagaaaatgttaaagtagaaagaatagtaaataaacctccaaatctgtttgttttttaagtatcattttaagttcaagaacttatgcatagtcgatgagcttcaatcttttgcagttattagttttatcaatgctccaattgttttattcttggccagtgggagcctctccaagatggcttctgagtcattttgacatggtcctaataaactttgacctttgggctcagatattgcctatcacagacatggaattagccatttacagagagaatctgggtttcatttagtgggaaatggtatttctagactgcagtgtggatactggagattacagattaatattttatgaccataatattgatgttgactgtcttaagatatgtgtatgttgtatgctatttgttatcagaacatacataaatacaagtaaattatagatagaaataaaataaataatagaacactgtttctattgctagttatttaaaactaaaagaagatgataggagaaaaattaaatttactacattcattgtgtatactctttgtttcagaaattaaaatctattactatgtagggattctttgtgatatttatacaatcagggattaatgtactcttcaaaaccaaacagcatatataaattacacttagtaatgagatttgttagctcaattgttaatgaatctacagtaccataagatgccataacattatttaaatttttaacatacgcatggtcttcaaaagcctttttaaaaatgcattattgtcaagcaaaagtaaacaacatataaaatcagctgatctatgatactatgagtaaataactggcattttatctaattgttgagagagttagaaaaaataatttgttattgttatatcagtttgaaaaaaaaaacaaaaaaggaatcatcttcctagtcctagctaccaatgcaatttttttccatttctgtaatattttcagcttgaagaatcgcataggtacacaggaaaatgagatgagtggcatattttaaatgcaaagcactagatatattgcacatgaaaagtaactagcaattggtggtgctgtaagctttccttttggaaattttctcctaggaatctgacattgtatgtttcttagaactcccattgagcatggcttttcaactttatctccctatccatatagcgttaaaatgcactctacactcccctatgtaacatcttattgctttgcaattataaggataaaataacgataattgaatctcataaagaggcacaaaaggtataatttgacaaaaaagaaacaccatgcctacgcctccgtccttactccacctctgtcatggcctcctcattctagagcagttactcttacactagtggttctcgtcattgttttgtatgtaaggtggatatttggtgacttagacttatgatagtattaattggctcaattcctcatacatatatttttcatctaactttgtaccagtcattatgctaggtattagagatagaaaatcaggaagctgtggcctcttctctggcgaatcatgtactctagtgcagaagacagagagttattacaaacaaataactctatcatgctgtgatgaatataaaataggatgaatgaagtatggactgaaagcagagagagattaattctgcctggaaaaggcatgaaaactgtacaagggagttggcctttatgcagatcccaggaagatcttacccggccatagtgggagaaggacattacaggtgcagggagcagtgtgagggagtgcagaggattgggagacatggtggtgctccagatgctttgttggggtgataggcattcaaatgggaagaggggccaaggccagaatcggaaggaccttaaatgtcaggctaagaaacttgactaaaatagtttctgccaaagggataaaaaggagttttaaaagagagatatggctttgtctgcatagagaatggaaataaggagagcgacccattaggaggctgctggagtagtctatggtgaaggtgatgacaatcagaaccaaggcagaaacattggaaatgaagaagacaggtgatttgagaaggcttcaagaggaagaatgggcaagtcaggaaataatccagagaggggatccccagtcactgccttcccacattgctgaatgacctgtgaatcatatctgtggcagggaatcaaggcaggtcagctaaagagcttaaacatcttcactaacaacactaacaacaaagctgctacccaagaaacaaacttggctgtgtaagcctagcaaagaaaattgcctgctagaacaaaggaaatcacatttatcgggagataatatcaaaacccagaatgtccagaaattaatatccataatgtctaggatataatccaaaattacttaagatacaaataaccaggaaagtggaacacatgctcaaaataaaagaaagctaatcatttgacctggaaatggaacagatttctggaactgacaaagattttttgaaagctattataactatcctcaacgaattaacataagcctgttttgcaatgaatgaaaatctcagcagagaaatagaaaatctcagcagaaaacataaaggaaccaaatggggacttataaatagaacaataaaaattctgaaattaaaaaattcactggatagacttgataatttaattaccatgacttaggaaagattaaatgatagatcaatatccaaggtgaggctgggagtggtggttcatgcctataatcccagcactttgggaggccaaggcaggtggatcacttgagatcaggagtttgagaccagcctggccaacatagtgaaaccctgtctctactacaaatatgaaaattagctgggcgtggtggcacatatctgtggtcccagctacatgggaggctaaggcaggagaatcgcttggacctgggaggcagaggctgcagtgagcagaaatcacaccactgcactcagccagggtgtcagagtgagactctgtctcaaaagaaaaaaaaaaagaaaaagaaaaaaaagaaggaaattattcaaaatgaacagggagaaaatttgtttttagtgcgtcagaggcctgtgaagagatatccatctgcccaatttatgtgtaattaaaattctaggagagaaaatggataaagaagtagaaaaacaatttgtcaaattaacagctaaaaatgtgatgaaagacataccttggcaaatacaagatgctcagtgaacatcaaacaaaataaacacaaaacagctcaatctaaagcacatcacatcattagaggaatgcaaatcaaaaccataatgagacaccatctcatgccagttatcccagaacttgaaaaaaaaagtcaagaaacaacagatgttggcaaggttgcagagaaaatgtagcacttttacaccttggtgggaatgtaaattagttcaaccattatggaagacagtgtggcgattcctcaagatctagaagcagaaataccatttaaccttgcagtccaattactgggtatacacatgaaggaatataaatatttctagtataaagatatgtacacatgtatgttcactgcagcactgttcgcaatagcaaagacatggaatcaaccctaatgtccatcaatgatagactggatcaagaaaatatggtacatatacactatggaatactatactatgcagccacaaaaaggaacaagatcatgttttcttcagggacatggatggagctgaaagccattatcctcagcaaactaacacaggaacagaaaaccaaacaccgcatgttctcacttataagtgggaagtgaacagtgagaacatatggacacattgcagggaacaacacacactggggcctattgaggggaggcgttgggggagggagaacatcaggaagaatagctaatggatgctgggctttatacctagatgatgggtcgatctctgcagcaaaccacctttatacctaggtgataggttgatctgtgcagcaaaccagatttacctatgtaacaaacctgcacatcctgcacatgtaccccagaatttaaaataaaagttgaaggaaaaaagagaccaaaagaataaaagcacataacagtcagcttcaaaagccaaaggcagcacgtaaatcttaaaggcaccaaaagaaaaataatacgctctgggaaataattcaattaatggttgacttctcattaaaaaccatggtgaccagaagagagtggaacagagtttcaaaatgctgaaaggcaaaaaacaaaacaaaaaaccctataaactggaaatctatattcacagaaaatattcttcaagaataaaggttaaatgacattttcagataaaacaaatataaaataatgtgttttgccagcagacccatacaaaaagaaatcctaagggaatttcatcacggaagaaaatgatatacaatggaaactcaaatcttgataaagaataaaacacatcagaaatggccaattgtggataaatgcaaaagacatttttttctttttgactttttaattttaatttctttataaaccatgttgtgtcataaactaaaactataacattgtcttctgtaatacgtaaattatgttgatgtaatacacataacaagtataattgcgtggaagtggacacggacctgaaagcttaacaggtttctatagttaataagaagtggtacattattaactgcttctggactttgaaaatttaatggtatatattataacttctaagacaaccacaaaaaaagctaatgcaaagaaatgcaactaaaataggaaaattaaaattctaaagatatttaaacaataaaatgaaagccaaataatgagagagaaacaagacagaggagacacttagaaaacaaacaaacaaatgataaacccaaacccagccatataaatggttttcttatatgtgcatatggtatatttaaaggttagactatattattatccataaaaatgacgtttcaaaagactgaaatatatacagagtattctttgatccagtggatttaaattttaaaaatctataacaataagatggtcagataaactttaaatatttggaaattaacagatttcaaaatacctactgggcatatgagacatttgagggaaaattggaaataatttgaactgaataataatgtaattgagcatatcaaaatttgtgagacgtcactaatgctatacacacaggaaaaattttagctttaatagtttaactagaaaggaaaaaaaatatcaaaccaaagacctaggctttcatcttaacaagctagaagaaaagaagtaaattaaaagtgaagcaaaaagaaggaaggaataacaaagaaaagaaaataactttctgaagtagaatacagaaataatacacatgataatgccaagagcttgttctttgaaaggtcaataaaattggtaaatatccagtttggtcaagaaaaaaagaagacacaaatgaccaattcaggaaataaagtagggagataaatgcagatgccacgatcctactaaagcataacctgttatcttactaaaaagataatatgttattaattaatagaaaatgcatgcatattttttaaattaatatttttaaataaataatttatttttaaaataaaacaaaatttatactgatggggttcaggatatactaccaaaaaatatggcaccttggcagtggaggaaatagcagaaacaaaggtctctctgcccttcctccacacttctcccctaaagcaggtcatgcaagaatcctctgactttcttctgaagaaggttacaagactttcattctagaagtgtcattcttgtactcagaagaaaggaatttccttatttcacaagacacagggacacaaagaagaatgtcaaccaacaggccttgctaagttccccatttattaccattagatcacatcacctttcttcaattatacttctccataaatgtccaccattcatcaaaccaaagcataaaaatacacaggtttccctgtttctttggatgttcctgtctgaagtttcccatatcacataaaacttatgttacataaatgtgtatgtttttctcgtgttgatgtgtcttttgttgtaggtgcctcagccatgagaccctgatggtgaatgagaaaagatcttttctctcctacaataccaatacattttacaagctagatgacatggacaaatcatcaaatgactcctattttcaacaccgacctaagaagaaataggaaactgaagcagctctatttcggttaaagaacttgcatctgtaatttaaagccttctcacaaagaaaacttcatgcccagttggcttcattaattaattctatcaaatatttaaggcaaaaataataaaaacccaacataaattttttcagaaaatagaatagaatggaacacttcccaacttattttatgaagcagaaatactctcactctaaaaccagataaagaaatcacaagaaaaaaaagaattaagaccaatatccttcatgatcatgaggcaaaaatgcctggcaaaatattaacacataaaaatcaacaataggcctggcatggtgcctcacacctctaattccagcactttgagaggctgaggcagaagaattgcttgagctcagaggtctgaaaccagcctgaataacaaactgagacttaatctctacagaaatttaaaaaattagccaggcatggtggcatgtgcctgtggtcccagctacttgggaggctgagttgggaggatttcttgggtccaggagttcatggatgcagtaagccatgatcatgctactgcacttcagcctaggtaacagagcaagaccctgtctcaaaaaaaaaaaatcaatactatataaaacatgataatatatcatgaccaatgggtttatcttaggaatgcaaagttggtttaacatctgaaaatcaatgaacatagctcactgtattaatgacaataaaagagaaacctcataagataattgcaatagctgcacaaaaggcattttataataatcagcgttttatgataaaatctttcaacatcctaagaatagaagggaacttcctcacttattaaggtcatttatgaaaaaaaaattacacctaagttatattcaatgatgaaaagttcaatgctttctgcctaacattgggaacaatgaaaagatgtgttctaatgctgattttatttagcattgtaataaaggtcctggttagtgcagtaaagccaaaaaataaataaaaggtacacagatttgaaaggaaggagtagacctgtccttatttgcataacatgattgtgtatgttaaaaccctaagaagtatattttttaagtgaactagaacaaaaaagtgcattgagtaaagttgcaggacacaaaatcaatagacaaaattaactttataattacaaactaacaaataatgaaattaaacagtaataccatttacaatgaaaaaatattgggaaattttgggattaaattattaaaaagaaattcaacatctgtacatgaaaactactaaaattccaaaatgaagctaagaacgatctaaacaattagagatatgtactatgttcatggattggaataagcaatattttttaaatggctgttctccttagattgaattatagattcaatgtaataccaatcctagtcccaaatacttgtttgatgaaatcaacaagataattaaaaaatttatattgaaatacaaaggacctaaactatccaacacaattttgaaaaagtaaaacaaagtttgaggtcttatactacttgatttcaagacttactctaaagttacagtaatcaacacagtgtggcattggcataagaatagacacagatcaatggaatgggatagaaagtccagaaaaagaaatctacacatacattttcaattcatttttgacaaaaaaaaatgctgaagtaattcagtgggaaaaagacaatcttttcaacaacgtactggaataacaaacgagttatgtatctgaaaagaaaggaacgttgctgcttgttacatatactgtctaaaagataactaaaatttgatcgtagaccctaaatgaaagagctaaaattattagaattctaaaagaaaacatgagataaaatctttgtgacattgaggtaggcaaaaatttctcaggacactaaaaatatgaatcataaaagaaaaatacaaaaaatagatttcattcactttagattttttttttttattattatactttaagttctggggtacatgtgcagaatgtgcagttttgttacataggtatacacatgccatggtggtttgctgcacccatcaacccatcacctacattaggtatttttcctaatgctatccctcccctagtcccccatcccctgacaggccccagtgtttaaaaaattaattgggaaaagaataaggaaagccacaccctggtaaagaattttaaaaaatacatctcagacaaagactcatatccagaatgcttaaaggactcagtaataaattgtaaaaaaaaaaaaattaaaagtggacaaaatttttcaagatagtttgcaaaaaacctgcaaatcacccataatcacatgagaagatgttcattattactatgtatcatcaaaatgcaaattaaaacctcagtgagataccactacacacctgctagagtggctaatgtttaatagactgattttgccaactgatagtgaagaaatgatgtgcatgtgactcttatacaattgatggtggaaatgcaaaatggtatagctactttggaaaatagtttggcagtttcccataaagttaagtgcaaacataccatatgacccaacaatataatagctacaacctggcagcaatctaaattgtcactaatgcatgaatttgaatgcataaaaattgaggtctgtcagtcctatagattactcctttgtagtataagggaatgaaacattaatacatggaataacatggataaatctcaagatcattatggtaagtgaaaggagagaaacacaaaagactatgtaatgtgtgattctatttgtaagaaattctaggagaggcaaaactacataatgacaaaacagagcacttgttacctgggtctattgatggaatagatgatccacagtaaaggggcatagaggtctttcacatcccttgttagattcatttctagataggttatgttttgtgttatttttgtcaatggaaaaatataaaaactcatggaaagatgctaagaaaaatacctaaataaatggaaaggcagaccaagtacgcagaaggaagactcagggttgtaaaggtgtccagtttcctccaaatggaactttcaattgaatgaaatctcaatcagtttcccaggagaattctttactaatttaacaggctgaatgtaatgcatataaggctgaatctgacacatataataaacagcaaaatcctaaggaacaccaaacccttcgtgaaggaaactcataagggaaaatttccagatagcaagatgtactacaaaggtacataatttcacagtgtagtatcaatgcaggaatgagtcaactcatcaggggacacataaaaaaagtcccatgtgacccaatgactgcagatattcttgctgaaatattattgatcacatcacatcttatagagcgaataatgaccttctcaaattgtactgcaacaaatagttgcagatataaacatacaaaattagattcctacctcacaccatacattcatgtcatttcccagtgaattaaggctttattttttaaaggaaaattcaaaagtgtttcagaaaatatataggagaacattactatgaccatgtaatgggaaaatatttattatatatgtcatatcaaacacaaagggtaaacatttttactatattaataatttctgcttatcaaaatattttatatataaaacgaaaaccacaactaagaaaatgcactttcaacacataaaactaatgaatatttcatatgggatgtacaaaaaatctcttacaaatcaattagataaaaacattccaacagaaaaaagtgggcaaaataaataaaccaatgaattttataaaataagacaagaatagtaaataagcacatgaagagacttttaaactgattaacactctgatgatgcaaaataaaatcagagataccatttttacacccactgtattggaagatagtaagaagtttgaaaatagcaagttttagagaggatgtgagttatgagatctcattcactattggtgcctgttaaagtgtcataaccacttttgaaaataacttgtaaggttaagattcccataacccaggcaaaaccccgtctctactaaaaatacaaaaattagatcagcgtggtggtgcaagcttgtaatcccagctactgggaaggctgaggcaagagaatcacttgaacccagcaggcagaggttgcagtgagccgagatcatgccattacactccagcctgggcaacaagagtgaaactccgtcaaaaaaataaaaaaagaaaggaaggaaagaaggaaggaagaaagaaagaaaaagaaaaggaaaggagagaggaggggaggggagaggagaggagaggagagggaagaggagaggaagcaaaagtcttgtacatttttaccaaaagatgtaaagaagaatattcatggtagaatggtttgtaataacaataaaactaggaatgactggtatccattgtaatatacactagaatcgtgtacatcagtgagaactaagagccaagacagcatggactattatattcacctcagaaatatgatataatataaattactgaggaacacagtaaatatcaccttattaaggtcaaatgcaaaaaaaaactaaacaacatagtatttaaagatacataaatatgtgataaaactgttaaaagtaccggaatgataaaattcaggaggaaaaaaaagtaatcatacgttctaattctgaaatggtctcattggtttccgtagaaacaagcaggttttatgtacctcaaatgtagtacggcataatcttttttatgtatttatttattttattaagttccgggatacatgtgcaggatgtgcaggtttgtagcataggtaaatgtgtaccatggtggtttgctgcacctatcaacccatcacctaggtattaagccctgcatgcattagctatttatcctgatgctctccctcctcctgacccctgcaacaggccccagtgtatgtcgttcccctctctgtgttttcattgttcagctccccactgcatactcttaaacaatcattatgtttcatggtgatcagtaatgtgggggcggggtagaagcagagaacttggaactcgtgagggggtgtcaaaggtagtaaatcttcatccattgaaggcaaacttgatatttagaaattcattcagagtaaaagctaatggacgaagggagataaggtgacaatcaaattaagtagtaaccttttttgcaacttatataactaacaaacttaagtgctttctaaaaaaaaattctaaaatttgctatataagggcaacttcactgaaatgattgcagagtcttccatgtgagttcttttaatgtgagatagctcattcaatagatgcaccttggtgtgtttgcttaagaaacagaaaaatatgactcatttgatttgttcatgaaagtattaccaggaaaataaatgaaaacaatttcacctaaacatctgttaactttagcactgaagctttggatgtaatttacataatgcataaagtagattgatctaggaccatgtcgatgatgaaattttcattatattgatagactttcattttcctcataaaatctacacatacttaaattataacaactctgcttttgaattaatccagtctgcataatgtttttcagtcatcaactattatagtgtgaaatgcctttaccatcaaactggctcaaggttactgccttcactcagaaagatagtgttttccttctccccactgtgggccctgcctctcaacctgcaaccctacatttcagaaagtagtttgcctgtatgaaattttcttactctcttctaaggtagtggctgcaaaatggtacctatctctgattttaatttgcatcatcagagtgttaatgactttaagagtctactcatgtgcttacttactatttttgttttataaaatttcttggtgtacgcatgttctcactcataggtgggaattgaacaatgagaacacttggacacaggaaggggaacatcacacaccagggcctgttgtacggtggggggcagggggagggatagcattaggagaaatacctaatgtaaatgatgagttaatgggtgcagcacaccaacatggcacatgtatacatatgtaacaaacctgcatgttgtgcacatgtaccctagaacttaaagtataatacaaaaaagaaaaaaaaaaggcataaaaattctagaagaaaacattggaaagtgtctttatcatcttggagggtcaaagatctttctaattatggttcaaaactaagatgtcgttaaagatggatacatttgatgaaataaacatttttttaaattaaaaaaaattattggtgtatttattttgcctatttttttctgttggagtgtttttatctcattgattttggggagttgttttttatacaaccctacctttcagaaatacaccctttcattcataggagatatatatgtacatgtccatatgcataccattttgagtaagcgtttttactaattttctaaggggatgcttgaaatcttggttgttcatctacaagaggccagactcagcatctatgagatgtatagattcaaaggtattcatggcagcgaagagctaattcctccaagcaagagcacctaggggagctcgtggagcagatgaaagcatgttttgcaggatgtggctatgggccacaagcattctgcatacagatttactccaaagttggatataggaaattagtccctttactaacagttgtctttggctccttggagtatctgctttcttaatctgctctttgtgtcctgcccaagaacattctagctgttccaaaggttttcggtgtgtgcgcctgtgctttctatgtcaatgtgtaaagtaggagagaagcatcatgtgaggctggattaagaagagctgggcatattgcaccatattgaaagggccgtttgatgagtgggagcctatctttttttcagaactagtgattttactttacataagcattcgtcaaaagttgaggagagttccttgatgtttcatgtggtttttttctacttcctctcttacagatacagaattcatctacagagaacagaaaggaacagtgagactgtggaatgttgaaacaaatacttctactgtcttaatagaaggcaaaaaaattgtaagtactctctttaatgaccgggataatttcagtttttcttcctgcaagtcaataaaacagaaaatgacttttggtttcaacttttagcatagccaaggagaagcaataaacttgtaatactacaggctgagcaaccaaagataatgtgaaattgaaaccacgctaattcaataagatgaaagcactgtttctttcattgtctgggaaatttctctgcaggtgttgggaacaagtgttgcatatcatatataattaaaagataaagtcctaaggcttttacacatttacagaacaattgcaataatgcatgtagaatacttcaggagaatttgctcaatcctgtttaaaaaaagctcgtctccgcatgcataggaagtattaacttaggcactgtgactgtacttaccctaattatattaagtggatgcttatgcctcaaagtaaatactgagtcaatatgaatgccactgctttatgatttgggaaaacttgttttcccaaatatatgtatattttttgagacaggatctcactctgttgcccaggctggagcgaagtggtgcaatcatggctcatttgcagccttgacctcccaagctcaggcaatcctcccacctcagcctcctgagtagctgggactacaggcgtgtgccgccgtgcccagctaattgtttttgtttttgtttgtagagatagggtctcactatgttgcccaggctggtcttgaactcctgtactcaagcaatcctcctgctttggcctcccaaagtgccgggattacaggcctgagccactgtactcgaccccaaagatttaaatggcattaagatttgatgttcatgtacggttaaagatatgtattagaaatattgactggagttatacaccaaaatcaatttaaagagaattaacattttgtttgtttacaaaatgttcagactcttattagaataaataaatctccaactcaaagcagttgattcttttcttgtttgagacactggggaaatcaaaggacagaactaaggttaaagctatgttaaaaagcaagaattgaaacaggctgtgaatcccgttaaagcgatcataacagggctctggtatgaatcagaaacacagaaatcctagaatcctataatccgggattagaggaggttgtaaaaaaaattaaccggttccctggttttacagataaggatcctgagcgagacttagagcatgagcttttgagtctcacagctcagtgatggctgagggagcattcaggtggtgtcccagaagcctgtgtcccagggagaaggaaggatggcttcatctttaccctaccccatccccagatccacagaaatgctgtgctgccttcttttccctcctaaagaacatgtaacttgctatttaaatactttcatttcttttcttttgcataaagatacctttttattaaaaggtttgctgagatttagtattaaatgcatgctgcccctaacatagactgcaggcgtaagggaggcctcacgctgttggatgatggcatagttccaaaaatgatcactttattgaattaaatagtattctgcaaagtaggacctaggacaaatgaatgtgcctgcatttttgcattaaaaaaatcatctttggtagaattactcccctaagagaatctgattcaactcacttagaaatactaacgttgtagaaatggttttctaatattaatagagaggataaaatgatcagactgttgctgagcgtcagtgcattttaatgtcggaatgttatcattatttcctgtgaggatgtcagtttagtaaaggctgggtgttgtacataacagcagcacttagcaatgaaatacatgaatgtgaaccgccttctctttctaaaatcaatagcttgtgacagatcatatattttaactgaagttattttagccaagtcgcctttaataaggtgacttcagaaaccaccatgggtaaagaaaagttctcatctcagaaattcgctggcttattctatataatgcaatcttttttccttaaaatgtcacttttccatccattttataaacatttattaagcaccaaatatgtacagcctaatggattcattattcctttctcaaagctacatttaaatgctcctgtcaacagactcaaaataaagaagacaaaaaatgtcatttagaggtctgcatcctaatttaatttaatctggatttaatttccgcagagccacttagtcatttaaaattatcatgcctcaattgctctatctccaaattaaagctgatttcttctgccagcccagaacctgggtactctgtgagatccagcaatggaatatgtgtatgctctgtgtgttttcatgagcaagtatggagaaggtgaagcctggtgttccacaggggctggaggttggaggatcacccacagcctggaggaattgggaatggggagcagtagctcttccatattctgttctcttgccttcctggtgactgatcaggtgttctcttctcatttgaattccagaagctgtgagcttgtataaatgataaaaagcaatctgaggccaactgtaatttttaagttgggctataaaacagccttaaacaagttgagaaatggaaaggaattggtaaattctgtggtcagcagaattttaaaatattccctacaaccttgacctctaataacctcattctctttcccgagccaataaaaacagaccctcctcatagctggtcactgcaaggtaccaaagcctgtttgcctccagcttcttctttgctcctgcgcttactgtgattggctcttacatgggacaggtggatggaagggcctgcaaatcactgcaaacattttgtcaatccagcaggaaagcttttaagatagctggtgattaagcaaattcagagcttgtgctaagttctgtatttacatggatgtatttcacctttccttcccccaaacaatttcttttgactaaatttactaattcagtcatcctttattgtgcttttaaatggtagaaatcatgaaatatttcacaataccacaaacactttagattgttgagttcagaccaggtgcggtggttcatgcctgtaattccagcactttgagaggccaaggcgggtggatcacttgaagtcaggagttcgagaccagcatggccaatgtggtgaaaccccatctctactaaaaattaaaaagttagccgagcatggtggagcatgcctgtaatcccacctacttgggaagccgaggcaagagaaacgcttgaacctgagagttggaggttgcagtgagtcgacatcgttccactacacgccagcctgggcaacagagtgagactccatctcaaaaaaaaaaaaaaaaaaaagagtttctgtatgtgtaaacatttaaaattctatgatgattatattatggttcacaatttggggggcattcttttgttttatatatatatataaaacaaatatatatacacacaaatatatgtattttatatatatattttatatatatatatatagtgggctatttcctgatccttattatttgatagcatatcatatttgatggtagctaagaactgctttttagaaaacatttatcaaaatgtcttgatccatttcctcttttgagaatttttgaagtgcttgtctacatttctacagaaaatgaatcaaataaaagcacagttgtccccaaagcacaagtgcatcatctctgaagtagctctcctcagctgtaaaggctgctgcccagttctaagctcactggagcaggttctgtttgggatttaattttgtctcccacatagtgctcagcaccatgacctgcacatagtagatgctccactgctatgtgttttatgaatgaccgctctagaataacaaaacaatagagttgagcagttttccagaaacatccatgtgagtgacaggtgtggaggggcattcagcactggggtcatgactttgagcttcaggtctaccttccagccttggcattgtgctctgctcaggaacaacaggaccccagccggttgtgcaagttctgaatgtccagtcttatccctcaggagtgtcgtaggactgaattacagttgtaacagctggaatgtgggtatatgccacatgtggattccagagcgttaggctagaccaaagagcctgggccaggctcagggctcaggcaggaggagtgggttggttctatgaaggaagagacagaggatgatgatgtccaaaggagcatgacaaggatgctgccgcatgtgggcggctgcgtgggtccaggcagcagtagcagacagtggaatccacgccactttagttttgaggtccatccctcatgaagctggatgtagcctgcatcccagagtgaggcagaggcatccagagctggtaattacagcaagaggcactcgcagaactctaaacatcaataaaaaatcaaacctaagctcacttttatttgaattacatgtttgatgtcacagaaattccgggaccttacactttactcttttaaacacaattttaaatgtcaatgttattttacgtttcatgctccttataagactcttgtcaacaagatagcacatcttatcaaatggcctttgttctattatgtatcttgtttttttttcctaaaaaatgaaccaccacaaatatatctcatggtccaaaattggatctttggacatttggccaatggttgcctggttcctaaagtcctcatgaatttttatcttctgagtagaacactcctttttcctttccctccctccctccttttcttcatccttcactcctccctccctccctcccttccttccttccttccttccttccatccttccttccttccttccttccttccttgtagaaatacacttaaaatagccttaatacattttgctgaactaaatagatttcttggggacttaattcttacaaaaatttaacaccatctctccaattcttttaaaacataatagagcaaaaattatcagaagggtgaagtgtttcaccagtgcttaatatttagatatttaaagctgaaatagtctttagagactgtgtctttcaaactcttcttttatgaggtgaggaaactaagaatttctaagaacagttctctggcttaacctccactgatagtgctatggatgtaacgcaccagttcagaatgagtcactgtattgacctgtgtcactcatactgtataggccctttttattgacaatgctatcagtgacaagaagcattaagatttatatagtcattcattgtatcacttaaattctgccaggtgtttggaaagcaacttagtgatacgtttcaggagcagtaacaatattgatgcatttttatttgctctggggaatgcttctgtacaaagttgcagcattatttgttaatacaatagtgaaaatacttgaaactaggaaaatgagataactttttaaaaaaagataaaatatgatgtattcattaaaataatagctatgaagggtatgtagcgatacaaaaaatatttatgatatattttaaaaagatacaatatactaggctaacaactatatatattgaaaggctagaaagtgaacactgaactatgaaaatacttaatcttgttgggtggtgagattttgtgtattattttctagtgtggtgatttccataactgccatttcaatgccatttattcaataattttaatcgggatttaaaaattttggtttcatctttcaaaaaacagcagactgccttctcacaatgagtatgtaagagctgtagacagttcccggaaattcttgaaggagaaaataagtcgattatttaaaaaaaaaaaaaaaagtattctattgttatgcttatgtcaggctttctccatttttatgtcttgttttaattactaatttctttgttttaattgcttattttaatgactaaattaacatctaaatgaaatgtattttctctaagctgtatccttcttggttttatataatcatagatgtagaatttgaatttttatctctgtctctaaaaattaattaattctgactcctcacagaaagagacataaataggcaagtattattagacccattccaaaataagaagaacaaataataggcctgtttgtactaccagaggaactccagaatgtggctgagattagaactcgagactactttctttttacttcttcaaataaactccactggatacttgacccctgcatcagtaattctcactttattctatgtcatttaatttctgttaagtgctttatgcgctagtcctctcagccctgaaacagggtaaatttggaaggaaacagaagcccactttcttacctctttctcttttctgttctgcacagagcccagtgcactgttgaatgggaagcacaggatgttctgacaggtgtcatctcagccaggaacaggctggcccccgggaagtgggctcagcctcggtttcagctcctgttgtcctgagttcactgaccactgataaccaggacggtggctgcaacttcagtgggccagcaatggcccatgagccatctctaatctgaggctggatttcacttagcatgtcagtgaaaaccatgaggggaaacagccgtgtttttgtgtacggttgagagggcataaactggcagctcgtgatgcccactgaaatgttttgtttggcccacagagtggtttttacaaactaacccagatttctggcgtctcttgaaaaatacaaagatctggcagcagcaagatcctcatttgctcacagagagcaaaatttggctggagctaagaggcagctggcccctcagacaggacatgggccgaccagccctgcagtgacccacatttgctgacttctaaccagactggtctctgagtttgaaaccccttttagttcaggaacaaaagggtggcataagaactcaatgtcttctgcaagaacgttgcacattgtgagaaatcgtagcacaaactgtcttggtattatctgtattcatttctgtctgtaaaattccctggatcctctttgtccccctatgtcattatttcatttttctcctgtgtctcagagggtctctctctctctttttttttcttttgtctttcttgtcctacttttctctctcctgccttttctgtttctacttctcttactacaagatagaacagaaaacaagtatattttacttacttttattctaacttttaccacatagaccatgattttactttttaaagtggatgaggctgagcacagtggctcacgcgtgtaatcccagcactttgggaggccgaggcgggcagatcacttgaggtcaggagttcaagaccagcctggccaacatggtgaaaccccatctctactaaaaataaaaaaattagtgtggcgtggtggcaggcgcctgtaatcccagctactcaggaggctgaggcaggagaattgcgtgaaccggggaggtggaggctgcagtgagcagagaacacgccactgtactccagcctgggcaacagagagaaactccatctcaaagtaaaataaaaataataaataagtacagtagatgagtatttatacttatgtctttaaaatatctgaaaagaggccgggcgcagtggctcacgcctgtaatcccagcactttgggaggctgaggtgggcggatcacaaggtttaggagcttgaaaccagcctggccaatatggtgacaccccatctctatgcctgtagtcccagctactcgggaggctgaggcagacgaatcgcttgaacccaggaggcagagggtacagtgagccgagatggtgccattgcactccagcctgggtgacagcgagactccatctcaaaaaaaaaaaaaaaaaaattctgaaaagcagtacagtagtggtttaatctttctggccccagagctactgttccctgcaggctaagggctgtgtaccatcactcctccatcacacgtatactcttcaagtgacagtcagggaaggccttctctgtgcaaggccctgactagacatggtggtgggtggatacagtgattaataaaaacagatttctactcttatgtagctttcagcctgcatataaaagaagtagttgttttaacataatatattttgcaacggaggtattaatccaatgtgcaatgagaacaaggtgagaaagaaagaggattgctgggaactctagatagaggcttgcagaaggaacatttcagcagtccttgaacatgggagaaaagtcggaaatggcataataggcaaaatgaaaagggtggataattccacatttcaggggtagacagtgcggttagtaggttgttttgggaggggcttgaaaagttgtggctggaaggtctggggaaaaggtggagagaggtcttcaggaagcttccattgtgtgtagtctttagtctgtagcacatggaaaggtgtcaaccaaaattaaagctactgaagcagaaatgatgtaataaaggtttattggaagccacaggtgagaatcgatctgggaaaacacaccaacaaagttggacatgttccagaatctgttacaagccagaaggctttcataagaaagtttaggagaagtgaaggggactcctcatatcagagttgtcctttatcattaagaggtacaataaaaaggttccaatcactgacaacagattgcaacacacaggctaaaatgcctacgtgcaagacaatcagtaaaacttcatgattcagaggcaaatcagcatccttttcaatgtcagtagatcacacagtaatcagtacgtcaacaatttgaagagctcacagtaagattgtttacttagcgacaagatgacacacaagacttcttccccaggtgacttaatttggaagtttgccaaatgtgacctgtagggtattatttccctcttttgattaaaaaaacaacaacaactaaccatggaagcattgatgatcagtctctgcttacgttagaagggtagacatccttctttccttccttggctctgcgaaggctcattcccaagaagtcatgtccctgagtggggagaacaaaccttatcatcgcatgtgggccaggttgctagcaacatggggtagatcatgacacgaggttacatgccaatctcctgaataatgaatcaacctccagtctctggacgatcattattttggccttaactgtggaggcatagtttacaaattctggagaattcaggtacagagaaaggtaaatgttttaattttattcacaaaagtatactttacctgattgttttaaaatacaaatagctcctttatttataatttttagaaatatgttttgctatagtattgttattttatttggaaataaagaatgagtattatttaaattgaacataactttaagattgaaaattatgtaacaattatttataaaagtttatcccatttatatttacctaatttatttatttttaacagtttacctggattgctcatgaaaactgagatattggacaaagttagtcattatttcaagttacttccttgttaaccatttttatggcctgtgaatatcagatgttcacttaaggaaggagtttaggttaaatatatgggtattttgctaataactcagaagatacagctttttttcatttaaccaacaagattaaattagtcttacccttcaaaaaattacacaaaaatcattctggttttggctgggcttgtagttctataacctttgtgccaaaccctgacatttaaaaatatctagcagagacaaatataaaattgtcttccaagtataatgaggcaaaagggtatgctgacaatcttgaagacatttctacttttattttatcaataatttaaaaaccagcttgtttattaagggtttacttaagtcatgtgaacttgggaaatatttgtgtttactaatttatgaatgctcatttatttatgttgatttggtaccaggtagacataacatataatacatctaagtaagtgtaaacacatctaaacatacacaaacacaaataaagattgtacagctttcattttagaattttagttctttttttttttttttttttgagacgaagttttgctcttgttgcccaagctggagtgcaatggcgcgatctcggctcactgcaacctccgtctcccaggttcaagcgattcactggcctcagcctcctaaatagctgggattacaggcgagtgccaccatgcccggctaattttttgtatttttagtagagacagggtttcaccatacaaactcaccaatttataaaagacagctggatccaagttatatttctgacaaaattgggacctattcatatggctaaactttttttgcccctatgggtaatctaatgaaagctacagaccaaaagtttgggtaaagcagtttccatgtaagtttgatttttacaaacttcttttaccattttttataagtttcaaatgagttcaattttcaatgtttacattttacctgaaaactgaccaaattgcataacaaagacaaaatctccaagtagtcttgaaatagtaacaaatctatcttttgtttgctgatcttgtttgattagcaaatgcaggtggggaaaaatttttagcagtttctctcttttttgggggaggtggcactttttcctttcagcctttgtagcagaaaaagcaaaatttttgtgctagacacagatagatgattgctctgagctcaagattctgacttattagacctgagggcctaacttttctaaacatttatctttttcttttagattattaattgttcaattaagcatttcattttaatacgagtggctgaatctattttaccaatgccagtggaagatcgggatcataaatggtctggcaaagcttacaataaatcaattggtatcattcattagtttcagtttagaaaaaaacttgttggatctgtatttttatcatctcagtaatttcattctcatgctgtagtcctttcatttgctccttttgttccaaattcatacatttccctcttttgagagagaaggaaatgtgtgcattgtgaaattccaaaaatctctgcctaagaaatgtatgggagctgagggaacaagcagagaaggatgaggaatgaggagcagttggaggtgaaagggacaaagtctctgaagtctttttcacggcagagatagttgcgaatatccttttgtttacctcttgaatggaggcaattttttctttcaaaattttttatggaagcttctaggtgctattggaagtaagtcttccattcaatttgtctaattctaaatccagctttttccaattgtgtgcccaagtaaatcattttaggcatttcaaagggtccccattttgggtgttgctgcttatgaccatgccaagttaggtggatccacttatctaagcacttgcaggtaaaaggaccaaaagtattgtgcataaaaccagctggtgttgattagaggcagtgcactgtcagtctcagaagacctgctttccatcgtgattgttttgagtgagaccagctatgtagtggagcaaaagtgcccctcatgccatcactaaggaaaagtgctttcgccccaaacctccagggaaaaattcacagagctactttaccttgccctaaaattcaaacaaaaacccttaccttggattggtaagagggatactcgttctgagaaagacattgtattttctagccaaggagaaagccagcttcaaaaaaatcacaactttgaccaagacgggaagtttgttgatttcaggaagaactcatctgtaccacccagcaggggcgtccaagctcacaatgggtttgttgccaggatctgcatgaaggctggaagctgtgctggatggtccatggaggtcactccaaagcctactggctacaccataatgttgacagaaattaaggctgaaataacgtgataaaaggtgtattggaagccaaatgtgaggatcagcccaggaagacacatcaacaaagtcaggagtgttctagagtctttaacaagttggaaggcttttataagaaagcttaagagaagggaggggactcctcatatctgagttgtccttttcattggagggtatgatacagggcttataatcattggctacggattgcaacatacaggctgaaatgtctgtatgcaagaaaattagtaaaacttcttgattcagaaacagatcagcattttttcaatgtcagtaagtcatacaaataatcagccacatcaacaatttgaggaactcaaggtaagatactttactcagggacaagatgtcaccatgcatcacaagaccttcccccaggtgggttagaatttttgagctggttagaatttaaagccaccgtgctttaggaaaataactgtaaccaataagaaaggggtttgtagaaggtaaagattataaacaaaacatcgacagtggctgcttcaagtccaggtgaatgtgatggaggtcttaaattaaggcagtggctttgaagacacaggagaagttggtttaagttacatcacaggagtagaattgataacacttggcttcactttgtgtacaggcagatgggattaaacaatagtctatgttgtctggggtttttcgagacttgctcatgggtggagagatgtcaaattcagaaactgaaatggggagagaaacagattgtgaagtagaaaaccaaagccactttgaggaataagctactgcaaggtatatgcagagttcattaactaatagttgatattttgagtgcttacggtgtgactaaagaatcctaaacactctacgttcattatcttacttaaccaaaatccttaggaactctgtgagcttcagtactttattattattttaaaactcagaaaaaagaggttaaaaaaccttttactaagtcacacagctgatagctgatagtcctgagagctgaagtcagctttgtctagttccaaactaaattatttctagactgcatacataatccagctgtagccttggtcgctgcagttataagatagggctgaggccgccattccattactgagaaggaagccaccgcttcaaacactgtgttcatatctgtgagtccatcattacatatcacgtggttactcctggaggccactacatttgccctaaaatgaagactagagatgcaaaacattgagtcagtttagcctaatgccaaaaaaaaaaaaaaaaaaaaaagtgctgacacagctgagtcctggggaacgatctgtttcaaggttagagagaaccgagctgtaaaccatctggacgctttttcgatgtggctatttaatcatctttccactctgctctatagcatctatgttttcaggttttctctgactcagtaaatgcagtgctgggagcagcacccgagtctgtctgattcaaaattaaattattcttaggtgaattcagggcccagaggcaggctgtggccactatcattaacattatcgccaggcccaagggttctgtctttctcattgaccaggaagggagaatacaatcatctatttatgttaaatttgatgtgtgcacccacagagttgcacatagcatcctcctgtaacaatcttttcagtatttgtcttttgttgatcattactcatcttgtatatttagggttttttttcattatgagtttcatgaggaggttgtattcaaaaaagcctctgggtatatttatgctttctaccattcatttcccttccattacttgacaaattgggggcattctatcattttatatctcttttttccctaacaaccaccttttcttctctgcatttattatcacatatgtatttatctactacaggaaaaacaaaccaatcctttagttagatatgtatctcctcagaaacatgcctagaattttatataaatgggatcatcatacatgtagaccaatatttttaaagtcagcataatgttatttaaacttgtgttattgatataactggtagccccagataatgcaaaaggtgaaatactgtatatacccatctctctagtaagtataaaagttatgagcaaaatattaacaagtggagttcagctgtgtaccaaaatcataatatgctaaagtcaggtttaatgattacaacagcatttaaatatcaggaaatcaatcaacaaaatttattagaactacaaaatgatagaaaaatccttatgattaagtcactaggtgctgaaaaagggatctgataaagtttatcaacagctcctaataaaaatccttgctaatgtaagaataaataattgcttaaatatgctaaaggttgtttaccaagaaccaaccatcagtgaaaaccattctaaatgacaaacaataaaaccatttcaattatagccaggtatcaggcaagaatactcaccatcaccattaatatttaatatgttcttgaagaaagtgcaaccaaaccaaatgattcaaataagaactagaaaatagaagaaaaaaagacaacttttttctcataatagaattttatttctgaaaaacctaacatatattagttttaatatacaccatggaatactatgcagccataaaaaatgatgagttcatgtcctttgtagggacatggatgaagctggaaaccatcattcccagcaaactattgcaaggacaaaaaaccaaacaccacatgttctcactcataggtgggaattgaacaatgagaacacttggacacaggaaggggaacatcacacaccggcgactgttgtggggtgggggaaggggggacggatagcattaggagatatacctaatgctaaatgacgagttaatgggtgcagcacaccaacatggcacatgtatacatatgtaacaaacctgcatgttgcgcacatgtaccctaaaacttaaagtataataataataaaataaaatttaaaaaaatccaaatgtcaaaaaaaactaataagaacatatcttaatatggctaaatacaagaaatatattatgaaatcaatagcttttctcttcaccaatataaataccttgaagtgaaaatggagaaaatattccattcacaataagaacaaaaatataaaaagacttcaaataaatctgacatgaactccagaagattgaacaaagcaaactataagatcttgttagaaatttgaaaacattaaaaaaattgtataatattaaataagaaaacaatatttaaaatgttaattatttgaaagttgatatcaaactttaacacaatcctaattagaactctgaaactgctttagtgtaaacattttgcaaaatgatcttgattgtcatatataagaataaacacctttgtgtagccatgaagcatttcaaaatgcatagtaatgtatactcttttacctgcagtgaaaacacacaagaacgacgttatattcaactcaatgacaataatagctaacgctttgaatacttattatgtaccaggtattgtaattactttattaaatttgtgtatcaattatgaggtaggtacaaatattatctacactttacagaggcataaaaaattgagaaattttcagcatctctcatagtgaatggtataaacaggatatgaatcacagtctgtctgaatccacagtccaagcttaaaactatcaaattttgcatagaagtagcaaagagagtgctgaaaaactggagaatttgaaagaagcttccaatataaacaagtatttgacatgagaaacactagggatagggtgacacacttagaacacagtgctggcataactaactcttcatctacaaagatgtaatgtaagtctcattgtacaaatacacaaaattacgttccaattggattaaagccttaaatgtttttaaaagtctataatttggtttcataaaaagagagaaatttttaatcaaaataggaaatcctgaagctataaaagatagccatatttaatttgccatatatgattttaaattttaattttaagaaaggcaaaattagtagacaaacaatggaaaatatttacaatccaggtaacaagtaaaaggagtatatctacaactgataaggaattcttccaaattgagcacaaaaagacaaataaataatagaaaatgaacaaaaatattttagaattagctcaatcaagcctgaaaccaaggcctgctttgtttgggaaattgatacatagagcaaacgttcaggaatgtgttagatgtttttttgcattcactattggcacttggtgagaaggtagacctgcagctcaaaatttgtacaactgctacaggatcccttgaatttgtaacagggccactcgttctgagaaagacattgtattttctagccaaggagaaagccagcttcaaaaaatcacaacttcgaccaagacgggaagtttgttgatttcagggagaactcatctgtagcacccatcgggggcatccaagcttatccaccagataagtggagccacctaacctggcatggtcacaagcagccaagtccaaaatggagactggggtggtcagaaatgcctggaatcacacctaaccatggcagtggtgagtttctcaaagagaaaacaaattctcactgtctccggcagcatcgttagcaattgaccctccatcaaggaatgtgacccggactaatttctaagtgtaaaagttgcattctttgctggtttcttttggtgttattgcgtatcagccccactgttgccactcttgtaacagctgaggatgtaatcattcatttcttcagcaaacatctagggagcatctctattataacccagtcaccgttaggcactgggaatagaaccgtggcaaaacaaactaaaatttgcttcttggcatctggtcctggccatgagactataagaggattggaattaccctcctaacataaacaactataaaatgggataaaatgtggagagaaaaatcagttttcatgtattggacagcaggcagtgcacagctgtgatccccgagaaaagaaaaacaaatgaatgaaccatgccatcccgtgggctttctgcgtgaatgctgtactgcagcacgaaggggaaaaattcaagacctgcagtcttgccaagttaagaagacagaagtcagagttcaagaaaagaagatggctacagtttatgagatggagtacccaaaaggaggaaactagagaatactcacaaaatctatttaagtaattccttttaatggcaaaaccacaattactttattattattattatactttaagttctggggtacatgtgcagaatgtgtaggtttgttacgtaggtatacacgtgccacagtggtttgctgcacccatcaacccatcacctacattagggatttctcctaatgctatccctccctttacccctccacccccccacaggccccagtatatgatgttcccctccctgtgtccatgtgttctcaatgttgaactcccacttatgagtaagaacatgtggtgtttgaaaaaccgcagttacttttgcaccagcctaatacatagatttccctttgagacctcggttaattattgacctttatatgtgaataatgaaacaccaaaaggcagaacaaaataaaactccaaggaaataacaattacagaactctgttagatgaagtattcccagagctcatatattgtcaggaattatttaagtttattctaaccatgagacattaaacagagaccccaggaaagtagtttcttaggatgaggttcaattagcactcaaatatagtcatgtgtcacataatggcatcttagtcaacaatggatgtaggacattggtcccctaagattataatatcatatttttattgtatcttttttatgtttagatatttttagatatacaaaaattaccgctgtgttacaactctctacagttttcagtagagtaacatgctgtacaggcttggagccttggagcaataggctatgccatatggcctaggtgtggagtaggctgtaccatctaggttcgtgtaggtactttctgtgatgtttgcacaatggcagaatcgcccaatggtacatttctcagaacatatcagatatattgttaagtgatgcatgactaatggccactatggaataacccttaaaacatcttttttaaaaaccttgaataagtcaggttaatccacaaataattaattgcctgtcataaaaagtccaatattctttgaaggaaaacaaaaagtcctaaattcaacaagagagaattaaaaatatctggtgttaatttaaaaataaaacatgatatatgcaaaggagcagggaaatgtgactcctaatgaggagaaatatcagttgatagaaacagaactcctgataacaaagataagggaattagcagaaaaacacatgaaaactgctaagataaatgtattccaaatgctcaaggctataaggaaaaccatgaacatgatgataagagaaattaaagattataagacacccagataaaatttccagagattaaaaaaaaaaaaaattctctagatgatcaccaggttagataccacagaagaaaaaaaaaaaacccctaaattgtaagcagtagcaatagaaaactatttaaaaccaagaacaaagagaaacttgaaaaaaaaaaaagcctgaacagcatgtcaataagctgttggacagtataaagtagactaatatacctgtcattaaagttccagaaagtgaagagagaaaagaagataaaacaaacttttgaagaaataatgactgaatttcttccaaatttggtaaagaactcaataaactccataaagaaaataataacaaagaatatgataatcaagttacttaagatgagtgacaaatagaacatcttaatggcagccaaaggagcgagacgtgtttggaagaacaaacctaagaaaacagctgactcttcaacagaggtgctgcgagccagaggacattggaatgagatcatttaaagtgctgggaggcataaaacactgtcagtctacagttctacacaccacagaaatatctctcaaaaataaacattaagaatttgtataggcccagctactcaagaggctgaggcagaaggatcccttgagcctaggagtttatggctgcagtcagctatgatcacaccactgcaccccagcctgggcaacagaatgagacctttttctcttaaaaaaaataatatatatagatatatatataaagatatagatatatataagatatatataaagatatagacatatataaacatatatatataaagatatatattttcagagaaaatcagacagtatttattggccataaacctatactatgagaaacttaagggaagttctttggagtaagaaaaattacaccagatgaaaagttacatctacatgacagaaggaggtgtgccaggaatgataaatgttgtcaacatatggccaggttttgggtggaaatttttgtagaattagttaactagttctttaaaatatccttccttttctcaaagggtcctttaaatataataaaatatgtccagctcctctgaatgtaatctcatgtaagacttctgtctgaacctttgtcctgctctaaacactgacatggaaagtgaaaatataaacacataaaacctttggaacatgttagaactttcttggacaatagtggcaataataaatctgatctaatatagggtggactataactgacagtttaaaggacagatttcctatatcattatgcctacaagctccccttaatactcctggaggattttatattttgtttaaaaggaaagatccaattataagctatctatgttatctaattttaatataaagacatagattaaaattaagtgaattttaaagctgggcatggtggctcatgcctgtaatcccatcactttggaaggctgagactggcagattacctgaggtcagagttcgagaccaacctggccaacattgtgaaaccacatctctgctaaaaatataaaagttaaccaggtatgatggtgggcgcctgttatcccagcagctcgggaggctgaggcaggacaatcgcttgaacccaggatgcagaggttgccgtgaactgagatcatgccactgcactccagcctgggtgacagagtgagactccgtcttaaaaaaaaaaaaaaaaaatgaaatggattttaagagatataccatccaaaccctagtcaatgaaaatcttgaatggctatattaatattagataaaatagacaacaaggaatattaccagaaataagaagaaatatttcataatgataaaggagtaagtttattaagaagacttaagaatcctaaagatgtatgcagctagcattgagctacaatatttgaagcaataattggttgaaccaaaagaagaaatagacaaatccataatttaagttgtagatcccaacaatcctctctgagtaattgatagactatgtaaaaacatttaataaggatacggaagtcttgaaaacactattaaccaagtcaaccgaattgacatgtgtgcatcacatcactcatcaatagaaaaatgcacattcctctgagtgcacgtgaaacattcaccagagtagactatatgctgggccattaaacaagtctcaatatattgcaaaggatggaaattatacaaagtatgttctttaacagaaacaaactagaaatcaataccagaaaaaatatctggaatgtatcttgataattggaaattgaacaacatatttctaaataacaaatcagccaaagaagaaactgaatgtattttaagtgaatgaaaataaaagcaataatatcaaaatttacggtatgcaacaaagcaatacttaaaggggaatttatatctttaactgttcatattagatctcagctttcacttcaataaactaggaaaaaagatttaaaaccccaagtacacagaagaatagttaggagcagaaatcaactacacagaaaacagaaaaatgttagaaaaaatgaccagctgttttttggaaaagatcaataaaatcaatcaagagcaaagataatggaaaaaaaatcagacaccaagcaaacatattaataatttggacaatataaatgaaacagaaaagtccttgaaagacacaaagtattacagttcaccagttaagaaataagtaacctgaatacctggatattggtgtaataaattgaattcgtagtttaaaagccccacatattaaaactcaaggcccaaattgattcacttgatcaattctaccaaacatttatgtaagaaatagtaccaattctgcacaaacttattagacaaatagaagaggaggaagatatatttccaaaattcatttcttagggcagtattaccctgaaataaaaaccaaacaaagaagttaaaagaaaataaaaccacagatgacattccctcatgaacacagatgcaaaaatcctcaacaaaatattagcaaattgagtccaacaatatataaaaaggggtaatacatcacggtcgaatagcttatcccagcatgcaaggttggtttaacattagaaatcaaacaatgtaatttaccatattgacagattaagactaaaaaagcaaaataacataatcatctcaataaatgcagaaaaagcatttgagaaaattaaacatacattcattataaaaactctgagcaaactagaaatagacaggaatatcttcaacctgataaaagatatctattaaaaataccataaatatcatacttaatggagaagaatgaaggctttctcctcaagattagggaaaaaagcaaggctgttcactctcactacttctactcagcattatactagcagttctctagagtgcaataaggcaaccaaaagcaataaaaagtgtctagatagaaaagaaaggaaatacctatatacacaggaaatatgattttgtagaaaattctaagaaatatacagaaaatatctaccagaacaaataattacatgtatcaatgctacagaaaataaggtcaggatacccaaatgaattttgcatattagcaataatcaattaaatatttaaattaaaatatacatgtacttttatatgtacaaagcatcaattatagtacatccttgggaataaatttacaaaatatgggcaaaatctgtattctgaaaactgcaaaacattgctgagagaaattaaagattaaaaccatcttcctttcaaggtgtttacactctaatgaagaaagcaggcaatatttaagataaataggttaaaaaatataaaatatgtattaatatgattagacctagagaaacaaatcagagaaaggggtataaaaagtcggaggcaaggcagttaatatctagatatattagctattgaaggacatggaaggcctcacttagaaggtgacttgagataaaagccaaagaaatgaaaggttgagagcatttcaggcagaagaaagaggagttgcaaaggccttgagaatggcatgtgcctggcttgctttaggatggacagagactggcgtggctgcagtgaagcagatgggactgaggggagaatactgggagatggatgcagagagctaagagggaactaggtccagcagggctgcctggtcagtcaggactttggcttttcccacaggtgagatgggaagctgtgggagggtttcccaggggagcgatgtgatttacatatttgagagatggccctggccgcctgggaaagcaggtagaaggccactgcagtacctcaggaaagaatgcacataccttagacaagggtaatggtggtgggaaagagaagaaatggttccaaacctattttgaaggtaaaccaatggtattttctgaccacctagatgtagggtgtgtaaaacagagggaaagagaaaagatagccaagagtttgacctaacaaccaagctaatggggttgccactatctgagaagaggaaaaaggttacaggagctggaggtgtgggagtggagtagaagggtctcagcttattcccattgacttgaggtatccatttgacactcaagtacagatgtcagggaggcagttggccagacaagcctgaagttcaaggtcaggtccagtgcgggttcaggtggtctgggctggagacatgaatgttggaatcctcagccagactgcgcatggtttttagaaccatgagactggataacaccacctaggaagtgaggagatccaaatatcaatccttgagcactccaacattcagagctcaagaaaacaaggagaagcacaaaatagcatgaaaagaaccagcgagggaggtaggagaaaagcaggtgatgagtgtccgggaagccaggtacagtcagggcttcgaggagtagagagactggtcatctgtgtcaagtaagaggacagctgagaaattatgacatttagcaaagtgagtctctgataaccttgagaagagtaattgtggttgagtggtgggggtgagagcatgacaggcaggagtttaagaatgaataggaggagaaaaatggaagcatggagaatattttcaaggggaagtagacagacagttttctaaagataaaatcaacattgtctaaaacgtggatagtaaggatcaaatgtatccataagcagggaaacaaaaactaatgaggcatgtttacatctacaggagggtcaaaattggagaaaaaacaccttatgcttccagagaagggaagaaaacatgcattcatacatctgtagtgggagtgcacattccaaaaacatttttgaaaaagaatttggcaatacctatttaattttaaaatttgtaaactgttcacttcacccgtggatatctattctatacaaaaatgtgaaaaccacacatatatcaacaaagacatagattgggatcttcattacaacattgtttatagaaagagctcactagaaatgcttataatctatcctcattattcacagcttctatatttccaaattcaaccatgtgataaagtgtacctgtgagccccaaggtgataatcacagcacttttgccatcgttctcaggcatagtggcagaagattcgagttgtccaatgttggcattcccaactgcagcagaacaaagcactattctgctttctcatttcaactttcatgctgtgaacaactgtccttttctgttgttctatttggtgctccatttttttgcatgtttgtaacttacactggtgatctcactgttgaaagtgggtcccaggcatagtgctgaagtactgtatagtatcactaagggcaagaaggctgtgaacgccttatggagaaaatgcatctttgagataagctttgcttaggcacaactcatgggttgttggccatgagtccaatgtttatgaatcaacaatatatattcaataaggtgtccttaaaaagaaagacacataaaacaaggttatctattgatcatttgactaaaatgtttagactagaggttcaaaggaagctaacgttgagtctctcctagaagcaatggttcagtatccactagttgcacatgaactagtgttcatgatgactttatagaacaaagcaaccataaataacaggaatgaattgtctccctttgttgagaattgtgtgagtaaattaaagtatatcccaaggtgtgcaccatgtgatattacgagccctttaaagatcactactcaatcaaaggaacccaagtccttggagtcatttccttaaggtactgttgcatgagaaaactaaggtgcagaggaccataatatgatgtcactttttttttcttttggagatggagtgtcgctcttgtcgcccaggctggagtgcaatggcgcgatctcggtccgccacaacctctgccgtccaggttcaagtgattctcctgcctcagcctcctaagtagctgggattacaggcatgcaccaccatacccagctaattttgtaattttagtggagacggagtttctccatattggtcaggctggtctcgaactcctgacctcaggtgatccacccgcctcggcctcccaaagtgctgggattacaggcgtgagccactgcgcccagccaatgtgatgtcatttctaacctttgtcatctctctctgatttcatgtggttgcctgagcatgcatagagtgatgtccaccaagtcagcaatgtgggctctgggggtgggtgtgggtatctgtggagcaatgtgcttgcagtgcagagggcaggggcaattaaaagaaaacagcacagttgatggtatcatttatgtcggatgatgtttgtactatgaagaaatttgaaggaaaaagtcacagttagtcttctatgtactgacttgtagggatgaccatgttggaaaaagagcaagttgcaaaataatgtgtgcaatgtgattctattctagtaacaactctgcttattatatgtgtcttagaattagtgagaaaaaggtttctaaacatatcaagaggttgagagttttgtagaaaagtttgctttttaacgcttatttctttttcttttcttgctctctctatttttttttctgagatggaatttcactcttgttgcccaggctggagtgcaatggcccaatcttggctaactgcaacctctgcctcccaggttcaagtgattttcatgcctcagcctcccaagtatctgggtctacaggcatgcactaccacacctagctaattttgtattttttttcttttttagtagggatggggtttcaccatgttggccaggctggtcttgaactcctgacctcaggtgatccacccacctcggcctcccaaagtgctgggattacaggtgtgagccagtgcacccagcctttaatgcttatttatattggcttgtctcagtaagtccaataagtatgttttgttgaaatttgaaaaaaaatacaaataaaatatgaaaaaacatcaattagctaaatattattcagctaacaaagaaaggatatagccattttaatagctaattaattttgaaaatggcaccagcagatacaattttattataagattctgacttgttgtatgtaatgctttaaaattctttgtctattttttcttttaggaatcattaagagccatcagatatgaaatatctccagatagagagtatgcacttttttcatacaatgtggaacccgtgagtattatcctttactgcctacaaaataattgtttctttattctaatatctcattaagtatatttccttgactcttctatacttagtgatctttgaatccagaaatactttgtacatcctggaagtctcttttgcatatcatactgccacctaggagagaggaaaggtataaatatctgcttggcaggggaaaaaagtcacatactttagaggctctttcatagacttttcttaggaggatggtaagaacttgtctcttcatagacacaaatcttgcccttttgtgcaattatttttctggctgttttctcagtgaaataatagattttatcctaagaacaaaaagcaactgccaggttctccttaaactgaaataatatgttaattatctcctggtcattgtagtgttctagtgaagagctgaagctatcacttccactatttaaatgcctatttttagcacttcctgtatatatgagcctcccataaaatttcaccagaattttctgtaaaatctcactgtgtattagtagcagtgtaaaacttcctaggccaggatcttccttcttcttcttgttttttcatttgacatgctcgtatttcaaatttcattttggctctttaattttaaatagttggaaggtgaagtttatttgtataagtggagaggatgttcagtttacaagagataagcaactttagaaatgtatgttttaagaactttcctctctggcaaataagatatagagtctactactgcctccctggcatttctgagaccatttgaaatagagtttcctggtgcttctgtgaggtgtaatgactcctgcattttaattcaggtcagaatggctctgtggtgagtttgagagaatcttttctggcatgagacagtcaagctttttggtttatatccactgggaaagctggggtattggtttgtatgaagatgcaagttcaattctgaattcttaaactttcttttagaagttgattggacaactggattactggagatttcaactttattcttccaactgtagatttttttggactctgtttcagtcttccatttttctatttttaaatgtccattctataaaggttttcattttttccatccaaattctttgaaacaatggggcatctttgtctctttgattgggatcagttggtgaacttgacattctaaaaggcttgggactctgcattacctagacacagccttaaacttgcctctttcagcctcaggcacctggatgtgatgttcacgggtcatagaccatttcagcttccttcatcacccttgaaaaccaccagaaatacaatctccacacctgtataaaagaaaaatgttagcagatatttgaaagccttacatggatgtgttctggtttgccccaggaggcacagctaacacctgagtgagaaaagcctagaaagacaaattgatttcaggttatcctcctagagaatctttaatcatcggagcaccccgacagtgggatggaggtaatgagcattccgttcccagaagcctcaaaacaaagtgaggtattgttctccggaatgtgacagaggggttcccgcagccgtgtgatcggaagaggcgtgctctagtcagtggtgctgtggttctgtgcatgatacaattctccaccactttcttcggcttcccagcgctctgtttggaagagtgccctgggatcccattgaaccagaaaccattttgataaagatcattttgctaaagatgagtcttcaccatgtggagcactggctgtaaacaggaaccttgaaataaccctttctcactgggcagcatctgtcggtgtttggagtaagactcttcagtttgtcttctcaactgaaggaaaacctaggaagtttgaagtgtatttacagaactataaaaatgataaaattgaaaatgtaaaaagtctatagaaacagatattttaagttgaataaaataagtaatccttaatagttttcagcactgagcagttactgtatacatgactattcaagcaagtattctctgttcttctggaggaaaaattataagggaaattataacctataggttatgagtagtgtgtcttctctctgaactccttagcgctataccaagatacaatccaagttcttgaaattctatcaaatccacaaaatatgtaataaaaggattacatatgggattctgcatgagaatttggagttagatattaggaagatcttcctaactagataaactaaaatgtaagtaattttagaaaagggaggggtaaatttcaaaggaagagtctaggtctgtgattctggaataagtggaatagaccaggacttcctaatcagtatttagtatcagtaattgttattgctagtattgtattaatagtataatcaattaaaaatattatccattggtattctttaaaaacaattaaaggttccatattcaaatacatttgagaactctagttaaacagataagtttcttgaagttcctgatattctcatgttggttacatagtacttcccaagtgggtattacaacatgtgattccaatctaattataatgaaactagaatttgttatttggattcatgctcaacatattcttatgtgtgtatctcaaaggcagctagtgtaacttgtttatatgaaccaactcaacttttcattaaaaagactatcataaaattgttttagtgtaaaccaactgtccaattactagatatctgtcatttatttcagtatatgtttcatttgcaataaaattttggtatattgggttaccactgcactaaaaaaaaaaaaaaatcctactatcccacatttcgtcaggataattataatctcttcaatctctgcttctctttgttgcctgcccaaagatactggacttggaagtcaaataatcataggttcaagggctcattccgatgctcaccagctatgtttgcttgagtaacccactaaaccttatgcactgcatcttggagccatcttcctgggtgaccctgggcttctgtttctcagtggtgaagggcgacccaatgaatgtcagctctcctacacttccagggtatatgtgtttgagcacagagtagttccgtatgtatacccagggccagatttaaggctctatccaatttcattggaatggagttgatggatgcctacatgaaatcagctgtcttggcagtggctcaagtagaagtgagtaagagctttccagcacagcatgggtggtaagagaaatgaggaaacagatcattaaggagtttagacacaaatagtacagcaacatcctgagaataagagttgaaggaaagatgtttaagtttaatttttagaatatgcattgggtatctcttcttctcatttattcagactaattgcaatgttatatcatttcccagttgtttggcatagactaatttaatttgtccatttttatattgtcagatactcaaagacagggacaggtctttttatctcctatctgtccccacctcagaggacccagcacagggtgatctgcgtacatttagtactgagcaaatatatttgtggtgtgtgtatattctctccgaaccccttagcgctataccaagatacaatccaagttcttgaaattctatcaaatccacaaaatatgtaataaaaggaaaatacctcagttgtgaaatatcctaataacgttccatgtttattctagaaatgtgggatcatgctaattagcatgctttttcctactaaactcttctaatattactaaatgtatagcttggctagcatccttgaacatacacaagttagctcatcttaactatgccaaccctatgtttttttgagagctttaaaagtagcctttaaaaaggtgtttgaaatatcaattatcaagtaaatttgagaaacagcaaacccaattttccactttttcaagcctcagacacctataggttataagtagtgcatctggaatgttgaaaataataaacagtattgtgtttgtatttatgtggcaccagcattatagtttgcaatgtgtgcttatttacaccaccttattttatctcaaaagatcattcctgctccaaagagacaacatgtgctaaatgagttttattttattttatacataaaatttcataacatttctcagtgtacacttcctgaatattctcttgaaattaagttagacattggagaaatagcaattttttatttttaatttgaaaactgtattaactatactaataaagaaaaattgccttaaaacaaatgtatctaattagagcagccatgcttttttatattgagatatatttgacaaatatgaaacatttccaaatctctttggggagagggaaaaagaatgtaaaatgcattatctaagatcatttaaaaatattaatactttttcctactaaactattttaatattactaaatgtatagcttggctagcatccttgaacatacacaaattagctcatcttaactatgccaaccctatgtattattgagagcctaaaaagtagcctagtattaatatcttagatcatttaaaaatattaatttcaaagacctaagagaaaaatattcttccttgaagaatcatttctgaaagagtcactgaagatttgtgaggaatttcattgcaatatttaaaggagttagttgaaatgattgttcttagtcagatcattgccagtggaacatcattctggtccaaatgaaattctgtccaaaatctggtcagattttaagatttttttcctaaaatcccaatcacacagtcattcagtcagtaaaatgggttgatacactgatctgtttataaactgttcatataactgaaacacataaaccaatccgttttagttacttgccactgcatagcaaattatccccaaacatagcagcttaagacaaacaacatgtatcatcccagtttctgctggtcggaaatctgggctcaagttagcaggatccttgcactcagggtcttctataaagaagactgtggtcaaggtgacatccgggctgcagttgcatctgagagctcacctggggaggagtctgcttccaagctcagggcatgggtgttgacagggcccaaatgccatccttagagatgggttctgctcagtcctgagagaagatggtttgctgctgagcttttcatggcaggaattggaagcagttttcatatttgataaatttctactattttcctgccatcgtggtgagttgatagagcccattttgctctctaagggactgtgaaatttataattcatataaagcttgaagaacaccctgatgtggataatcctgatcaaacctgcttggtgaggtgaaccccaactatatcccagaatcttctatgcacccatctggtcgagttacctatttatctatatcttaattaattttaaaaaataacttgaggctttataaatgtaatataagggattgggctataaattattgaacccatattgtggactaaattataactgctggaaatcaattcaggtaattctgagtatatgagtttctttttttttcttttcttttttttttttttttttttttttttggtggtgtctcactctgttgcccaggctggagtgcagtggcgtgatctcgactcactgcaacctccccatcccaggttcaagagattctcctacctcagccttctgagtagctagcattacaggcacccgccaccacacatggctaattttttttttttttgagacagagtctcactctgtcacctaggctggagtgcagtggcacgatctcagctcactgcaacctccacctcccaggttcaagtgattcgcctccctcagcctcccaagtagctgggattatgggcacgcaccaccacacctggctaatttttgtatttttggtatagacagggtttcaccatgttggttaggctggtctcaaactccttacctcatttgatccacccgcctcggcctcccaaaatgctggggttacaggggtgagccaccacacctggccaattctgagtatatgagtttctttgttgcaagaaatatagctattgttataatatggttctgatgtttactgccatcccttcttcattacaagaagggatgaaatcttcgtccaggagtggctaagggaattgtgtttcttgattctcgtgctcttggactggttctttctgcactgtctacagagcctttcctgggcccacctctgggaaccagttgatccaagcgttttctgctggacgaaggccttgcacattctcatgtgtgggggctgctatcagaattgcagggagctctctgtctccctctgcagtggcctcagagggcaaactgaagagcagggcctgcgtgtgccatttctaccacacctgccgccctttctgcatcagcccagtagctgctgcagcagcaggaggcgagtctcaccttcagcacgttctccttctgagaaggcagtggatgaacagcctgtccaccacccactgagaccagaagctgccccttcactgcctggaagtgcatcctgcacccatcagcatcactccaagcccttttatcccgggatgaattccttttaagtagaaggagcgtaacagtggctaggcatcactccataatctagctctccacctgagcaacacgtgcagagcttcaagaggctctgaattctttctggctgccagagataaccaattatacaaagaagaaaaatctgccaggtgcagtggctcatgcctgtaatcccagcactttgggaggccaaggtgggcagatcacctgaggtcaggagttcgagaccagcctggccaacatggcgaaaccccatctctactaaaaatacaaaaattagccaggcatggtggtgggcgcctataatcacagctactcaggagaccgagacaggagaatcgcttgaacccgggaggcagaggtggcagtgagctgagattgtgccactgcactaccgcctgggcaacaagagcaaaactccgtctcaaaataaaaaagaaaagaaaaagaaaaatcttatgttttcttactcttggaatgaagaaatatgcaagtacgaaaattcatgaggagattcggtaggtatctagctctgattaaatgatttattagaaataagaattagtgaaatcaaccactttttaagttacaaaatattacaatgatcagttttaacctcaccccctgccctgaatgaactaattgtttttcttagagccaggtaagggcctgccattggcaagcttgcaccttgagttagggttagagttgtcatgagtcaaatgccagccatgtcctcttctgccccccatgggggggcccaaagtgcaggagtgacagagaggaacagaggcagatgggcagcagggagatggactggcaggtacctgtgtcctcacaggtaattacgtgtcattccctctggatggtttctgaactgtgggaactcccccatgtgcattgatgggagaagagccaggcagagacacggtaaggagggcaagttatccatgtgaccttagggatacttggggcaaaagtaggctaacctccgtgcacaccctggaacaaaatctttaaaagagagagcacagaagagagagagagagcactttgcccggaatgagccccataatcagacaccacatctcccaaattagcagcacccttggtttctgggcaggctgagtttcccgcgcgtcggaggggataggatgtagcggtgaataacagtaagactccaaaatcaagtgggtatgtctgacgatctgcctctctctcccccttacacacacacacacacacacacacatgcacacatactctccctcccccttacacacacacacatactctccctcccccttatacacacacacatgcacacacacattaacacacacacacattcattgctcttagtatatttcctccctacctccttaactttgaccattgacaaatttttctctcttaagaagtcttgaggcagtgcactcgggcataactcccttccttgtgatacatccacgtctttgtgaatgatgaatggaacgttgctcacttgttagtaattccaacagacaaagacgtggcctgagactgcccctcacctgctctataatggcttcttgcagcctgctttcctccctccagcgctgccgttagagcctgaggggtccaagggagtcagtctgcccccgtgagtcttcatgtggtgtagatgatgtcagggtcagaaactgacattcaacacgagctgaggcccatggtcccaaaaatgtgtgtgagctgtagttgtccaaagacgtgagaggacaagaggcttgagtcagggaaggccgacggagaagaaagcctggaaggagaggaggatccggggtgaagaagagaggaatggggagaaccttcccggtgcgatcactgcagaggaacagaggccgccatgggaaacacctgcagcgagcatcagcgaggagctgaaagtgctcaggtatcaaaagaaggcagaagaaagagcagcaaaaaggagagaaaagtcaacataaaaatttaacacgggtcccttctgctgacagaagccttcccagtgcctattgcggccaccttcctaatgtgacctcagatccaaatttagaaacagcctctgttccctccgctcccagactgttttttctgcttgccctgcattcatttcttggaagttttttaagtatataagagcccaggttggccagggcaggggttagggaagcaaaggaactggaaacctgtgtccgctgaattgcagagcaggaataagggactctgcagaaaagagcatgacaaagagccgcggatacaagcgagggtagcaggagaaagagctaagaaggcagaggttagttgtttgatcgtgcacttggggaaggtggagggagaaggggccgtgaagagatggaacggactggcagaggagatttgtgtggggaaaaggagacagaggggacaggaagaaggggacagaagagtaaagagcctggaagggccagggaaccctgcctgccatggtcctcccccacttcctcccacacaccctgatgcaactgtgactgccctggcacctcagcagcttcagaacagggaaaggaggagaacacgggtttcacaggaggagaagcaaggaggacccagggagctggggtgccctgtgattctcaaccctgtccacatgatctgacctgggggatgagagcttattagatccaacttgagttgacaacaaagaacttctggagcctttcaggcccttttgaaacaggcagatcttctctgcagtcatgtctaatgcagcaaagaaaacaacagtgtcccctgcaggtgcagggacttctggcctgagacagcagaataatcgctcctggagtgggaaggttggcttgtgtattgtgcgcggccatcagcagcatctcatttcagactctctcatatccccggaatgtcccggggttaccgaaaaggccccattctccttccacctgccttctcctgctgctagaaaccaggatttttgactattgtccctgcatccccacatgtcacccagaggcagccttaggccccctgtcctgggccacccttggcataactggagtagacccgggtgcctaccacagcctccttttcctcaagggcagctgccctctcggtgccctgctcactgtgagcaaatacatatttaaagacatattctgctacttcccaaagggaccagccaccacctgcactcctcgtcctggtggaaacagtctgagtgcttgctttggtaatcaaaggtttcattgagtgcagatgtagtgatcctggcaaaaccctggaaacagaaagtcagctgaaggggtgtttctggagatgaggaattgtgctggttagccacgggcatgtcctgaggataattatttgtttacaacatttctgtgaacaaagaacatatagggacagaaataagttagtttccaagaatcttgtgatgggctccatttatctgacccattgggtttgtagaagaggacagaatgctgctttggttctcctccttggacagtggaactagagaacgggaagctgagatggccgagctgagtggacagaggagggaggaagcccctcacctcgcctgcttcccacagggtcccttcctcctcctcctgtttcctaagcttctcagctgggcttcagatgtcaaggtttcctggcttctgccacttcaccttctcatcttagctgccactggaccataagcatttcaggttgctcagatctctcccaccgcaaaataaagcaaagacaaaaaagttctctctctctcaacccatacccatgtcctcctctggttcttcccttcacagtcaaatgactaaagaaagaagcagctgcactcacctctctgtcccctccccactcactcttccgtgtgtctcccacagagtggaatgagtgctcagggctcagccacccagcccctggggaacagtatgagtgtcttccccatgttatacccccgggggaaggtatgagtgtcttccccatgttatccattaggagacgggctttgggagattgcaaggtttctgcagtgccagggatggagggctgtggttccaggtattcctctctgcaaacacctgctcttgatgggggctctgctgcccctgagcccactggtaactgtacttggcccccaccacacagcaaaactctcacccatcttaccagcagtcttctcgccctggaattcactggtgcctgttttaggctgcctgggctgccatggcaaaataccacagactgggcagcttaaacaacagacgtgtgtatctcagagttctggaggctggaagtacaaggtcaaggtgccagcaggtcggtttctggtgacggctcacctcttgtgtaattttgggtggacacaaacattcggtctatgtgccaatctcctcaggcctcctgtggcagaatttgaggccgctcacccctccctcttcctcagtccttggttccacaggccctggctgccctctggctgcctcctggccacttaggaggtcctcaggtgctcagacttgattggatttcccagtcccacccaaggtcatcttctcttctcttgcgcactcaccctgggcaacttaacctactacggcaactactgcatcggctgctgccacccaaaacgcgatacactgagtggtggcagaagcctccccaggaagcctgttagaaacactgactcgggacccagcccacaccctgatcagtcagaagcctcgcgtggaggagatctgcatatgattcgtgcgcacactgctgagacacatgaacctcaacaacaaggctcccgcatcacatctctgttctggacctctgactcgggtgtcagacctgtgtgctgctgtctccggggaacgtagagggccctcagacacagtgtgtgcaactgatctcatccgtttaatcccacgttggccccacgtcctgcctgcaacatcagcactttaggaaaaacaccattgtcccctccttaccaggaccctggctagagaccttctgtctccctggcccaggcagcatcgccatccccctgcctttgggatatgtcccttccacttccccattgccactgcccagttcagcccaccttacctgttatctaaaaaaccacctctgcctccagggcctctttgcctcagcctccccgccccacacttcttcaatctgtgctggccacgctgccttcagggtgacctttctcagtgccaatcaggtaactcattcccaatctgcacctcttccctaacccccttgctgtcccacctgctccttccctctcacctctgggcctttgcaggcgctgttccctctgctgggagcacctgcctcctccactgacctcacagttctcccacgcccttccagcctcttcagcagcaggccttggactccacaggagtgggctcccatacccgtgcacacccacggggaccacagcactgctgacggttttccgatttcctgcctatgagtccccgcactccaagggactttgagatgcttaaaggtggcttgggacatggctgatccacaatagagcctcgagaaatatccgacccattgcaaaatggaccgtcccccacccccatgcggtttcagggccgctcccaggctgtgagtgtttatgtgaaaggagtgtttgccacgtcgctcgggacgcccatcctggcaatgagcagctgcagcttccaggattttaccttcttaaatgcacttctgttaagctgtgcatgtaagaggtctgttctgttgaaatatttcccagagactttcatactaaggagggctttattgttataaatatttaaacctgctttgcagccagtcgctacgattactcagctcagaaagcatgcacaaagcctgcctctagtggacgatcctgtgctattcatcggcctctcattttaaatgtcttcctgatttcaatttaaaagcgtatctttatataacatatacaatttaactttttctttttaaaaatatgtatagctagtttttgttgtgcaattctatgagctttaagacctggatagacttttgtaaccatcaccacaaattgggatatggaacagccccatcaccccaaaaaactccccctgctctgcttccttcagggcaagccctccctccacccctagtccctggcagccacagacctgtctacagtcttgtagtttagccttttctagaaggtcatataaatggcatcaagcagtatataaagactagcttcaaagtggagaaaactttaggcctctaaggcattttaatgcccgcatagtcttcatctttagggtaattttgctctaaaaacgtttttgctgttttggtgaaatatgtaatactaggatagactatggaagatgtgcttactgagttcttaccctcaatgtcaaaaacccaacagactttcattactgcatcccctctgtacaggatcaaagtgcccacccttagaaagtctgatgagacagagaagaatgacttgcgaggatcaagaaagacaggctgagtgagcagtgtcctggcctgaagcctctgagcactgcggttgtccctcagcacccctggggagtggttaccagaacccccgtgggtaccaaactccacagaagctcaagcgccttaggtaaaatagtgtagtatttccctataacctacacacatccttccgtgtacttgaaatcatctctaggttacttgtagaatcaaatacaatgtaaatgctatgtaaaaagttgttctactgtattgcttaggaaataatgacaagaaaaaatctgcacatgttcagtacagatgcacccatccttttctttcttcccgaatctttttgatccttggtggttgaatttgtggatacagatctcacaatactcagggccgactgtaattctgaaggagggggctttggggcgggagcctacaggaagctggaggcagggcactggggacttgaaagtgaaaaagtcagtcatgagcatgggagaaaggagaggaaggcaggggaaggcactccagatgaaagaaccccctaagtgcaggcttgaggtgggatggcacagtgagggcaggagagggatgatagatggtccacctggagcacagtatatgcagtggaggggcaagcaggcaggccaaggtggggctgagtgtctggagttgaccctcgttgccaccgtcttggagggagctgaatggttccagagtagaggctgatgccacgtgaccaggtgaggtgtcttgttgagaccgggcacagtgattcatgcccataatctcagcactttaggaggctgaggcaggaggattatttgaccttaaaaaaaattgttctgttgaacttattgccttgagacagaggagctttcccaggatggccatttcctacctgccggcctcagctcccatcgcctgcccttatgcccactaaacgcgcttgtccaatctcatggttaaggagccacgggttatggttttggccccatagatgagggagaaatttgctggagggcctgtgggagtctttggctctcttgcaagaggaatacagagttggcctttctcttccccactgtccttgccttcatgaagctgtgctgcccaggctgtcacggtgggacacggagcccagcccctgatggcaccatccatgtgttgctctcgatccctgttctctagattagctaagccagaaaaattagcctgatttgtctaagcgtctgcccatcgggttttcccttacttgccactaaacgagtcctgagtggctttgctcgtgctgtttcctccacctggatctccttctctaccttgtccagctggtgatctcttccatccagaaatttaacttcagtctgagtgagcacctccccagataccccaggcatcaaacacaatcattgcttacagggctgtgtccctcatcaaggagctgtgagcccctcatgagcaggaactgctccttacttctctttgcacctggaaggtcataaatgatcagcaaatattcgttggataaatgaaagaacaaatgaattccatagaaacaagcaagggaaaaatgggaaatgatttcatcaattcttgctaagtcacaggctttcttccttcacaaaaggatgcgcaagagagttgaggatcttgagtctgacaagcagagaggtgcttcttgttgtatttatcaaagcttcgctattaatccctgcagggtcagtgaacgcatgtcagctctgcactcagtcctgctgcacttcggtggactctcaccagaggtcaaaggctatcagctcactccttttgtctgaccaatgccttgggtggctgctctcatcctgacttgagctaaattgggtgatctgcctggagacttagaaccttattcctccccccaaccattcccactgcctttgccttgatctggactcttctctcctcttgccaggaccaatgctgccgctttccacctgtccttccctcctgtgcatcccacacagcctgcagctaagcatggttctgagcaagacacagcttcatgcaaaatattgtacctctgcttgaagacccaatgtgaacattgcccattgatttttgtttctcgatccccaacttcccatgccccaaaatagcatcctgggaccatagaaatggaattgagctttctaaaatgattctgcccatctcccactttacagatgaagaaagtgaagtccaggaagttgacattgcctcattcaaaatcatgtgactcattagcagtaagtcaagcctgtagcccagcttgtcaccagggctgttttcttcattacatcaccatgtctcttcctcttcactgcctgcgtgactatgtctcggcagtcaatggatacagcacagcattgccagcttgccatgtacaagggggacctgtttcagatattccatggagaccctggctggaggattgcaggagagtcccaggaggcaggactgccaatggcaccaggcttcgcagccatgcacctgcagccctcaggcagcactgtccattgtcatacgagtgtggcaggtgtgaggcatcgcatctgctcaccccggggataatgcacagcagctacaggcagatttcgggccagagagcaaccgagtgagccttgcagcctctgctgccagcacaggcttgttccttcaacactggtggagagagacacgctgtcatcaggcccaagaaatactgccttccccatcctatccctggtcactgggtgcccgcagagtgtcccagaggagggagggagggaccctccactggttcaaatggcctgttctcagagatgcagcaatggaccctcgtgaatactgaactgataatcatgggaaggagactggctctcctggattccctcatgattcctctgagtgacaatgtgatgttggccgactgtgtcttcttcagaatatcatatacacttgaggtctccaggagcctccaattacattattttcctggctcatacagtgacaagtaattcttatcctggattcctcgttactgagacttttcttgccttttttgttagcttatgatttattctaggacttcctccaacaggttatacttaactgtctacctcagtctctggaagttttaaaaatgttcagctaaataaaagaagtagattctccctggaaaccaaatacctatgggcctcactgaattaataatttatttatttctaaaaaaaggttttattaattaagtcaaaatttcattgtaattttaaaataatcttgtggtctttctccatgtgtctgaagcttgtaatcactcttattgtcctgtgaattctgatatgcagttacctgctagcttagtgggtaaacattttctctattaatgagcaggaggcttattaaactgtgacagtttagactattctttcaaggccattgatcagtgaaaaaacagaatctggatgctaaaaactgtgcccatgtgaattaatttacccccatctttccctgagccatcacctgagtatttgttcctaggtttgttggctgcatttgcttaatttttatcttgtgatttcattgagaggtgtagttgagtgggtgtacttacagcttctgttcctgtttgaaatatcatttggaaacctgatcacaccctgcacaagtatgcttgtgaggcatactaattcaataccatttgagcaggtgcctcctaacgctgccctcctcaacctttctcagcatgaatgtacgctttttcatgtgctgattttaacataatctttggttcacagtaacagagaattttgtttgaaaaaattcagggattgaagggatattgacatgtacctagtcaccatctatcactccatctcaggagcaagtgttccttgctctcgtgactttgtcctggtgacacagaattcatccttgtagaccacttactttcttcccaggctgggcagttctggcttttgcaaagttcttcatcagctaatttaagtctgctttttaaaacttcccatctgctgaatctcattccaccttttatgcggcagtgtccactgcgctttctgcagtgacggaaatggtctacagttgcactggccaagatggtggcattacccacacgtggctcttgagcatggggaatgtggctggtctgacaaaggaactcaatttgtagttttctttaattgtaatcaacttaaaattacataggccatatgtagctagtggctaccctattgggcagtacagttctaaagcaatgctgaatatttaacgaccttcagatatttgcagacagctctcctatccacatctttagccttctttggcccagccgaacaagtgtttcagatcatgcctctggactcctttctgtctccggacttcgtaacagcatggtcacccttcattcacctcattagatatctgaagtaatgacggaagtaatcgattgagtaaattagtgaatgaatatgtgattttaattcttcacataaacctcatcctagctaatcctcttgtcttctttataagctgaggtttttggttttatgactgtggatgggaagaggggatgcagaggataggaccaagcaaggtcgtattttctttaataaccacatccccacctgtttcccagttgggaaaaacacaaaccgatttgctctcgggtaccactagtttattataataagatgtacaaagcaaggcagatgaccctgcagtgatagcagggatggtcacttgtttggcagaatggcccaggggagcatctctagccgtttcaatcccaagaaagcaccttggggtagagatgatgcaaaaccaacctgtacatcgaaatctattttttattattcaaaaattacaacctggtcttctgaaacttatttttttatgcttttacatctcctacagccttacacataatttctagtgtctttttagaacctctcagtattgtaacatttaatgcgttctcagcagcgggtaggtccgtgttatgtttgcatttgaagtagaagagctaagctaaaaaatatgcctttgtttactaataaggtagatactatttttttgttgctgttgtttgatatggagtttaactcttgttgcccaggctggagtgcaatggctcaatcgtggctcactgaaacctccacctcccaggttcaaacaattctcctgcctcagcctctcgagtagctgggattacaggcatgtgccaccacacccggctaattttgtatgtttagtagagacggggtttctccatgttggtcaggctggtctcgaactcccgacctcaggtgatccgctcaccttggcctcccaaagtgctgaaattacaggcatgagccaccacgcccagccgatactattttttactcaaaccaaaaaatatattctgcgagtaagtgatccactgtatctcagcccataatgatggcctcgacaaggaatgagatggccacagtcagtgtcacccactggaccacagtgatgggcgtggtgaaccaagaagtgtggacatggcactgtgctgggttacagtagtgagggaagcaagcttagactagggagcaaaatcaacctgtgatgagttgtgccttcctttaagcatcttggcatttgttgttggcattgaggttatagaccggtggtgcaaagacgaggccacaagggccactggagaagagggaggagagcccaatggctagaatctggaaggacagccacacgtttccccctctgattctttaattcacccacaacatatgcccatggtgagttcttcaattgcaggcttttggtacaggaaatgagctcttgctagagatttaagacggagtcaaatcatgggtctagccctaatgatgagtaactgatggtgaggatgagagttgtgacagtgctggtggtcatgaggaggatgaggatgatgaagaagaaaacagcagtaacaaggacgatgatgaaaacctgctaattatggtgctgatgccagggataattatggtagtgataatgatcatgatcccaggaggacttactgtcattatttctcagtggcttttctttgggtagagagtgagataattaaagtctggaaggagacaggaacagggggcgtgcagttcctcagatccatgggtcccgcccagctgcatgctgggagtgaaactatcaagattaagagctatgctgtttcagcagcatttccactgtctaaatataaacagcctcaggccctgatccagcagaggagaccacagctgccaaatgcatcgccagctgcaggccctggctgggtttctttaggggaaaaggccatcccaccatggacaggttccaaaaggcatgagcctgcgaatagaatttgaggttcaaggaatgctagactgtgcgtctgtgttcagggtcacagagcgagtctgaagggagcaggatgaggacatgggtgccctgcctccagggcctgtgctctctgctggtacagacaagggcctggtgagatggtagaacaggggcggctactgcagtggtgccacctgcgtaggaagacgggaatctagtggggatgggcaggggccaggctccctttgctttcgcaggcacccagctccagtggcccctcagtcccagctacagatggactttgagatctgatgacaggatctgctgttatcccacctctggatcaacggcgccatcatcggtgccccagctagccagcagatgtgggccagagtaaggcttgactggtccacatgtcctttctggcttaagacactgcttatcttgactcagggagagaaggaaatggaagaagaagaagaaagaagatgcatttaaaacatattaccaaactaatgccatgaacacatgaaatgtcagccttttgattccctcctgccaatacgcatccgtttatccagtgctgacttactcagccctgaacatgcaccaggcgctctcgcaggcacagggaatactgtggtggacagagccggggaagcccctgcgctcgtggatcttacatcctgctggaaagaccgtgcataaatagatgtgtttatcatgtgtcaggcaggacacgtgctccacaggaaagtgacgtaaggtaaaggacagggagcaaaggggagtgtctgggggaggacggcagggacggcagggacggcatggaagcagtggcccagcagacgcaggacaaggtcctgtgatccgaggaggggtctcagggtggagggacagggagcaggccagcgtggctacagtgcatgatgtccaggatgagcaaacggagtgatgtttgaacatgtcatccgggaaaactacacacaggggcaggctcacagccactttttccccagctgatcttgcttcctctgttaccaaaccaccctcaatacagcctcgcaaactgagcaacagaggagggggaacacaactaataccccatttggcaggctggctgaaggctgttgaagaaacagcagaaacacctggtaatccttgcaggcgtcacccaggctgcgggccggagctgtcatgggacaagcaggaggctggaatggagctgggatgggaaggaacacaggccatcagcttcccaggccccacgttaattgtgtaatatcatcacagcagggtaggatgccctgtgagggcacctaacaggtgttcatcacattcatcagcattgccctaccaacgaccgtatttacatcaggcataaatgcagtttaccgcactctgtgagaactggggattaatagctccggtccagctagattctgatttccttggtaggaggaggcagaacagcacacatcttgactgaataatcgtgcattttgcatggttaataattctgagagcaggaaagctaccttcctaggatcacagagagcttactttcttttctacgaatctttgaaaaaccaaacagatgggattttaccttaagagttagattgcactcttacactgtgctgttcaaattatgaattggcctcacttggatgttggactattgattatcaactctggcaagctctttattcagaatcttaggacatgcacattaaaagaaaaaatcctctctttgacctggttgccaccaatgtgtatctacataggatgaaaaaatgcatcacgtactcagaagaacgggctgcagccccggagccccagtccttctgccagctctggagcagggggagctcctggctgcacctgaggtgtcagtctccaagaacctgagccctttccacacgcatggctctgttctaggcactcgggggagctcaaacagaaagagagtaaacctgctgctgttcagtcagagacccaagtcatactcacaaatgatcaagctagtgaactggatggcattttcacagctagatcttgtactgcaattatagattgtcaccataaagcttttgagagcaatttaatagttaataacatcctaattctatgatgtgagtaatctgtgctctgagaacggcctacatataggcagaagaaccatgaggagctctcaaagaaaatgtgccatatattcaggcacctggggagtggttgtagaaagtgtgaccttccaaggcaattgattttggttgttctttaaaggatcactctagcagtccggtcattcttatgggtcctctggtctagatgcccctcatggaggatcttctaatcttgcattattagaaatggcagctaagtggattatggatggaaactttcatgttgtaaaaacacaccaccagaagtcaaccattcttattttgcccacgtattaatgctatttccaaaactgcccgacagctcacgggtgtaggggtttaggggtctatattccttgttagactcaagctccttgaaggtagggaatgtgtcttactcattactgtatcctcagtttcttgccccattgtgcaagctaaataaacaatgaatgaatcaatgaatcaatgatgaataaaaggaaattagttaaattccccttagatagcaataattgtccttctcaccccaggttatctacagccagataccatttggattattgaattcctaggatgttccttgcctctctgattgtttgccatctaatcatatccactcttatgtttttatttaacttcttagtatacatacctgattcccacctttaagtatcctaaaggaacacaatgccttatcttgctttccctccgcccttggcacacaccacctaccacaacgttgaacttacagtaaacgatcaaggacaagtttcggactaatgcatttggatggaatggcttctgtggctttcaaacagaattctagatctgacctagaccagacccagatcctgcctggatgtcaggacttccctgtctctagagaggcagcatgaacagagacacaatgccgggcggattgttctgacctggctcccagacccaggccaggggccagggtgtgtgtataagggcatttgtattctgatggcctttgtgggttttttaaaccccaattgtatcattgattttttttttggcattgacgttaagattttcattcaatggtgatggattttaaaattgccctgccatgtggggtgttactaaagctcatgtggatgaaggctgttgaacgcctgtgtctgtgctcacactggctgctttgctttcctttcctgcctgacacgtcctctccatcttccccttctccgttgccatcttcctgcccttgtctcctgccagcttcctccttttctgcactcagccttaccctttcttccccttatgcttcctttctgggactcccaaacccaactgtgctttagagaaagagtcctggactcaacgccagggaaatgcatgcccgtgttcctgccttgctgccttctactctgaccttgagaaggttatgaactcttgggcttccattttgccatctctcaagccagtgagttagaccatggatgaaagaccgcccatcctaggattataaactgggtaagatttgcatcaatgtgagtcttcacactgatgctggctccaggtttcctttctccactgtgagctgagttaaaaactctctattaggaggcatttcacataccattgtcgaggaggtgggaaataacaattccattcatttgccaagtagaaaagcccttgccttcttggttcattcagcagagggaaaagtaagctaggcggaggcaggaatggcctttatttgcaaaggaggctgtgcctcactgttcttcaacaggatgcctaatgagttagaatttgagtagcatggctgggtgcagtggctcacgcctgtaatcccagtactttaggaggctgaggcgggcagatcacaaggtcaggagtttgagaccagcctggccaacatggtgaaaccctgtttctactaaaaatacaaaaaaattagccaggcatggtggcaggcacctataatcccagctactcaggaggctgaggcaggagaatcgcttgaacccaggaggcagaggttacagtgagccaagatgtgccgctacactcctgcctgggtgacagagcgagacgccatctcaaaaaaagaaaggttatgcctcacaggttctgacattcagtaggatttgcactttggtgcatttttctttgtacataaaaccctcatctcacttttagaacagtgcagtacttaactttttccaggattaggtattcatttcagtcatgaaaaagaaaagggcatttgacccaaattacaaaaactattgaagtaaaactgccctattttttccttcatgctttcattgcaaaatgcagtgactgtctgctgctggatgagtgtgtatttgggggctctgagggatggagaaggagaggcacgactcgcaagtgccaggaattcacattccgctgacgcgggaacacgggcagtgtatagacattgtacagacattgtaaagacattagagcacaattttgagaaaacgtgaaaggatttccacaagtctttatgtcctctgtatattaaggtgttaagacaatggatagcaagagaaagatgggattttgtggcagaaacttccaaaaaaaaaagttgacatggagcaggtcctcaaagcaggaggcctcagagtactttgtagtttaagtaggagggaggactcgggtatctggagatgggaatggaattaccagaggagaggagcattgaagaaatggcgtcaacactgaagaatgtgctgctttataagaataatgagcccttaaatgccagtctgaatcttagcttgacaaatgaggcgaatctgaacacctttgggataataatagcgccttgctctatttgagataaaatccatttcttctgacttctgaaaggaattattgtattggtccatttgttttattttaggaaattttaaaatatgaggtagaaaagtataaagtattctccaagttattagctaataattggctgatgtcacccaggtggttatataataaactgtctcagtatcattaaattctagaagtccagaagaagaagtcaaggacttcttagtattttgaggcagagggaagaactacaaaaaaacctcagggcaggaaaattggacctgttgcaggccctgaaagctggtgtgatttgagtacagtgagagagagacacagagacagagagggagagaagacagagagagagagggtggggagacagagaaggagagaagacagaggggagacagagagagacagtgggggccagtaggggaatggaagcacaattgtgggttggtgtctcctggctcaatgcctaatgagttagaatttgagtagcatggctgggcaccgtggctcatgcctgtaatcccagcactttgggaggccgaggcaggcagatcacagggtcaggagatcgagaccatcctggctaacacagtgaaaccccgtctctactaaaaaaagaaaaaaatacaaaaagttagccaggcgtggtggcaggcacctgtagtcccagctactcaggaggctgaggcaggagaattgcttgaatccaggaggcagaggttgcagtgagccaagatcgtgccactgcactccagcccgggagacagagtgagactccataaaaaaaaaaaaattgagtagtatattactttgctagggctgtcgtaacaaagtgctacagactgggcgtcttcaacaatgaaaatgtattgtctcacggttctggaggccagaagtcagagatcgaggtgtctgcagggtgggctcctgctgaggctgtgagggagtgctggctccaggcctccttcctgcatctggtggttttctggcaatctttggtgttcccaggtgcaccaatgcatctccagcctctgccttcgtcttcacatggtgctctccttgtgtgcatgtctgtctctgtgtccacattttccctgtttacaccgacaccagtcatttggataaggatcttttttaatgacctcattttaacttgatcacccctgcaaaggctccacctcccaataaagtccctttctaagtcctgaggataacgactccaacatgtcttttctaggagacacaattcaacacatagaaaacagttaagaaaaaaaagagaaaatttggtaattgtcttctgtacagacttctattaaaacaatgaaatgtttatttaccaaaatcaggaccaagttacaggccagtattaatatatgaaactgcttgcgtttcacatgtacacttaaatttccagtcctgattttcataccaagaaacatggccaagtcatcacttcataaaggaaaaccgttttggaaggtaaaaaagacaattactgtttgaaacagtctaacattgaactttagatgtaaactatgccgagcaaacattttttccaggtaacgttatttgttgcagacagcctttggccattgtgtagatcccaaatgtggtgaaatgggagctcccagatcattgcccagtttccagctgccatcccgagtttgttggtgtcactgattccaagaacaaaacactggtgcatgaaattaacaaccttataaatagatgacagcacgtctgttagacaaaaggctgcagttatcccctagaaacaatcaaacacaattccagtaaaagtcttgccaaatacctctttgtaattcaaggaacctaacaacagacaatatgcagtgcctccttgtttatgttctggaactcagcgctgctgcagtgtaactgagaacaggctagtacaacccacaggcatcttgaagtgtgcaaggaggctcagagaggtttatagcattgttgttttgttttgtttttcatggttctttatgtcattgtttgttttataaagtgttatttatagtatgttcatccttagggacttttccttgaaaccaccacctttaatgctgatgattggtgttcccatggaccttgggttaagggggccaaatggtatagatgccctggggagagcttgctattggcctttgggagagaccctgcagcagtaggtttcagctctcccagtggcagagctgggtgataactgcactttcttctaagggcgatacattttgggaatgtgcgtggtgtgagttttctgccagcatctttatagagcaatgtgtacttgcaaataaatacaaccaaagtcaacaaaagagcatattgatgctttggtagagaactcagcagtctcccctctctgtagcgtaaaatccagggaaaacaaaggccccacaatggggacagatggccccgcataggtctaaggactgccattccgttttaaagttataaagtactctcacactgtttacctcttttatttcacaaaaccaccgcattaagtggacagggtagaagatattatcctcactttttatatggagaaaacgtggctcaggtgacgaggtgaatatttgtgggtaaggcaagaactttctttctttctcagtcagttctctctactcaagtggacttctttttattattattattattattattattatcattatactttaagttctagggtacatgtgcacaacgtgcaggtttgttacatatgtatacatgttacatatgtatacatgttggtgtgctgcacccattaactcgtcatttacattaggtatatctcctaatgctatccctcccccagccccccaccccatgacaggccctggtgtgtgatgttccccaccctgtgtccaagtgttctcattgttcaattcccacctatgactgagaacatgcagtgtttgattttctgttcttgcgatagtttgctcagaatgatggtttccagcttcatctatgtcccttctaagctgaccccactccttcctttcatggtaggcacacatgcaccgagtaaaatggctgaatctgggctccaaaatgttctcttcagtcccgcatgttttggcaaactttcctctctgctgtggcacttcaatcccgctcttctccataaggtctatccttttcttcataaaactttctcatggatggctccagtcccaaataaagctatcctcctgctcctggcttactccaatttcccagctcttttgggaaatgtaaactttatggtgtcattattccttttatgtaacttccttttttcttttctgagatggagtctcactctgttgaccaggctggagtacagtggcacaatctcagctcactgcaacctctgcctcctgggttcaagcgattctcctgactcagcctcctgagtagctgggattacaggcacttgccaccgtgcccggctaatttttcgtattttttgtagacatggggtttcaccatgttggccaggctggtctcgaactcctgacctcaggtgatccacctgccttggcctccgaaagagctgggattacaggcgtgagccaccatgcccggcccttttatgtaatctcttatcctgtcccaaagacaattttataaaataataataagtagcacttttgggtgattaataggtgccaggcaccatgtcaaaaactttctgtccagtatctcctttaatcttcacaagaaacctattgtggtaactcttacaccattttatagatgatgaaaccaaggctaaaggaaatatgatgaaatgtccagggtcactcggctgggaatttgggaagccaagttggaaactcagatctactaattttcaaagcttgcacttattttaaagtaatggcatatttggtttgttgtcatagtttaatcatgaactgtttcaagtgtacagaaaagtacagatggcattacttaaaaccacttgcagccaggcgcagtggctcatgcctgtaatcccagcactttgggaggctgaggcaggtggatcacctgaggtcaggagtttgagaccagcctgaccaacatggagaaaccccatctctactaaaaatacaaaatttgccaggcgtggtggtacatgcctgtaatcccagctacttgggaggctgaggcaggagaatcgcttgaaccctggaggcggaggttgcggtgagccattggactccagcctgggcaacaagagcgaaactccatctcaagaaacaaaaacaaaaacaaaaaaccactcacatccagaatgctcaaatttaacaagtgtgatctgtcttgttgaatgcgtccagggtcttgaaggtgtgtatgtatgctgatgcacttggatgacctgttgtaaagtatgtcaattaggtcaaattagttgatattttgttccagtcttctatttaattacttttgctgtgaattactgtgtaagaagtattgaaatctctcattgtatttggagatttgtctagttctcttttcaaatctgtcacgttttgcttagtaaatattgaagctctcacagtaagcacatatacatttaggattttcttgtcttatcattgaattgaccttttcatcattatgaaatgtccctggtagtattcctttgtctctgttaatattctgtgttcttcagtccatttgtttgataataaaccattgcagctttcttttgattcatatttgcctggtagaactttttctatccttttacttctaacctcttcatatgtttacatttaaagtatgtttcttataaataacatgtagttaggtcttgctttttttttctttcagtgagacaatctctatcttttaaaaagaatatttagagaacagattagcaaattatggcccctgagcctaatttatcttagtgcctatttttgtaaataaagatttattggaaaacatccatgagcatttgttaggtattgtccaaggctgtttttgtacttccaaagtagttgcaatacagaccgtatggcttgaaaaaccaaaagcatttattatatgtccctttatggaaaatatgtgctgactcctattttaaatgttacatttgatgtaattgtcagcatgatttaattgaaatctaccatttgctattaggttggtgcaaaagtaattgtggttcttgccagtaaaagtaatacttgtttctttatgcttctctcttctgatttttggttcaatttttcctgtcctcttttggctacttgagtttcttattattccaatttattttcactgttggattaacaagctctttgttttactttttaatggttgatctatgtttacaatgggcatttttaagttatcacagtttatctttgattgatggaccacttttggtatatcgtgtaaaagcctacagcagtattcttccatcatttcaccataccatcctttctgatattttgttgttcatttcatttctacatatgtttaaatcccataatacattgttattatttgtagtttagaaaatcaactgtctttaagaaaaaaaacagctttatatttatctatttcttaattcttgtttgtttttgttttgttttgagatggagtctcgttctgttgcccaggctagagtgcaatggcacgatcttgtctcactgcaacctctgcctcccaggttcaggtgagtctcccgcctcagcctcccatttctcgagtagctgggattataggcacccaccatcatgcctggctaattttttgtgtgtgtgtttttgtagagacagggtttcaccatgttgaccagactggtctcgaactcctgacctcaggtgatctgtctgcctcggcctcccaaagttttgggattagaggtgtgagccagcatgcctggcctatttcttaattcttaatcctttttttttttttttgagacagggtcttactctgtcacccagcctggagtgcagtggtgcgatctctattcactgcaacctctgcctcccatcttaattcttttttatagaaacgaatttcctctggctttattttctttctgtctgaagaatttatttaacattgtaatgctggtctactggcaatgaattctctcaacttttgtttatctgaagaattatttcgctttcattttttaaagtttttttgctacataaagaatttcaggtggacattatttttctttcagtacttaactatatcattccttgtcttctggctagcttagtttctgaggggaactctattaccattctcatctttttttcctttgtgtatatgtttcttttctctcttgactcattcaagattttatctttatctttgattttcagcagtttgaatacaatgtgcatagatgtcattctctttgtatgtaatttgtttagagtttgtgaactttgcacatctgtttttggtagtcttccattcagccatgatttcttcatgtgtttcttctgtcccatcctctcttgtttttccttcggggtctactcttacatggatattcggccattttaatcattccaggctggctgtgtgcggtggttcatgcctgtaatcccagcactttgggaggccgaagtgggcagatcacctgaggtcaggagttcgagaccagcctggccaatgtggtgaaaccccatctctactaaaaatacaacaaaaattagccgagctaataatcccagctactcgggaggctgaggcaggagaattgcttgaaaccaggaggtggaggttgcaatgagccaagattgtgccactggactccagcctgggtgacgagagtgaaactctgtctcaaaaaaaaaaaaaaaaaaaaaaaaaaattatttcaggctctggactctctgttcttcttttatttacttatttactttttcttcttttctcataaatataatgttaagaagtagaagtcagacataaaagaataaaactatgatggttccatatctgcaaagtcaaaaaatgcccaactaatctatgaaaataaaagtcaggttcggatgtagggttagaatgtaatgattgataggtgcacgtgggatttcttagtgtctgataaagttctgtttcttgatttgcatggttgttagaccaggtgggttcactgcaaaacttcatggaactgtacacatgatttgtgtactttttctggacatgttattcttttacttaaaagtttattttaaaaatcaaaaatagctttccgtgtgtttttcttctaaaagtcatacattttgtttgggtccataatcttttcagaatgtatttttatttatactctggagaaggtaagtttatttttctcctacaataatagtcaactcttcatcatgaatgttgcatcatttcctggtagtttttatcataatcttggccatgtatgcacgatccttttctcgtctttctcttctgttctatttatctatccttacacaataccacacattagacattctatagctttatgacaaatctttgcacctgatatggtcagtcccttctaattctcttctttaaaaattgccttggctattatttgccttttactcttacatgtaaatcaggaaacagcttttaaattttattaaaaatcctattgaaatgatattgaattgagatactaagttggagagaattgactactttatgatgttgaattatcccatcctggaatatgctagataatataagcacaaagacttcttttaagtcttctaataaaatgttataatattcatcatagatgtcttaaatataatttagaataattacttctgcataattttaaaatagggtaaattagtgcttctttttaatcacacactttgcattgagtgttaccagtgaaaggaaatgctaaagactcattagtaggaatcttgtatatagtgaagttaccattttcttgctaagttcaaatggttggattctcttggatagtctatatggacatttgtaaacaatgacggttttgtttctccccgtccttgcctatctcttttgtttgtttgttttgtgtcttcctacactggctactcttttccatccaatgttagcccagaaaccatgacagcatgcactttagtcttcctcttaatttaaaatgaatatttccatattttcatgcctaagtgtgttttctgtatgctttggtatctcttttttttttttgagaagattaatatagatctcttctatcccttgttttaattttcatattttgaattataaatatgcactgtgttttcaaagaatttatttttctttgcatatagaggtgatcgtattgttcctttttgtttaatctactactataatgatttacctaaatgaaatgtccaatattaaaccaaccttgattatattcctaaaatacaccttatttaaatatgttattcttttttaaatatacattgacagatgtactttgagggtcctcatctttatttgtacatttttagtcagttttacgagcaagagggtatctgttccatctgagcttgatcctctgatgattcattaattccttttaaactactgtttcacttcctttaatggttatacttctattcaggtatatttcttcctgagtcaattctaagatttgtttagaaaattaccaattacatttaaatgttcaaaattatttaataaagttttgtatattttcatattatatttttctactaattacattttcattttctgtccttatagtgtttgtcccttttctgttttgatcttgatcaatttttatataattttgcatgttagtactattctcaaagacctatagtttggttttcattttctctttttatctttgcttaatctctcattagtacctactcttattgattgattccttctttctgctatctttgcatttaatctatttttaaatttttaagataaaatatggcacatttattttcagttttctatcctttctatgaaataatgggtacaaatttttctctattattttagctggatctgtgagtcttgatacggagtgttcattacattcaatgctaaatatttcatattttgcattataattttttactcatgtgttattttgtttccgaatatatgctttatttacccttttcacaaaaagttgttgattataataaattaggaattttcttaatttattacaatacaatcaagagtttactcagtttgagatgaaatttctgtatatttgagactttgtatttgatcaattttcatgacaaggattaatttataaccattgaaagaggacccttcaattggccactggcttattagttatattgttgcaatattctctatccttactagatgttagtctctatgacctatcagtttttgagagcaatgtattaaacatcttataattctatacacttttgccttatgtattatgaggccatgttgctaaatgcctacaagttcaggattgtaatcacttcctgatcaattatttctttttatcattaactctccgtattcctagcaatgaaatttgtgtgtctttttgtttccatttctattttctcaaagttatatttgtctgctgggagtataattgcactagtttttgttttccttttggttatttgcctggaatgtgtttacctaacccttactttacacctttcttggcccttatgatttaattatgtccttcctgaattgcatatgtttttaaacatctaacttaaaggaatttaacctgcctataattagtatgattacagttgaataacaggtttgaactgtgcaagtccactgataagtgaattttttacaatattttagaataatttttggacacttatgacaatttgagaaaactcacagatgaactgagtagcctagaaatatcaaaacaattaagaaaagttagatggtcataaatgcataatatgtagatactagtcttttttgttattttcttctataaaatatacacaaattataaaaagttaaaattgatcaaaacttttatacacacacatacttatagactgtacatggcagcattcacagtccagaaaaatgtacataaatgtaaagatacagcattcaaccacaactgcgtaagattaactgtggtgcatactgtactgttgtaataattttgtagccacctgctgctgctattatggtgagctaagtgtggtagattgcaagtagctgcatgaaatgccacgcgatgccaatcatctccacatgagcagctcatttctccagtaaactgtggatcacaggaaaaagtgatctctcacgtatttttcctcatgggtagtgcaatacagtaaaccttaaataaaactatgggacacatatgaagtgccactagtaatgctgggagtgttcccatgaagcagagaaagttaggacattgcaagaaaaagttgagccgggcgcggtggctcacacctataatcccagcactttgggaggccgaggcaggcggatcacgaggttaggagattgagaccatcctggctaacacgctgaaaccccccgtctctactaaaaatacaaaaaattagctgggcatggcggcgggcgcctgtagtcgcagctactcaggaggctgaggcaggagaatggcgtgaacccaggaggccagagcttgcagtgagccgagatcgcgccactgcactccagcctgggcgacagagcaagactctgtctcaaaaaaaaaaaaaaaaaaaaaaaaaaaggaaagaaaaagttgaattgcttgatgggtactatagagtgaatggttacccaccatgttagacagacgattcatcttgtaaacagaaaacatgaacttattatagtcctgtaaatgtattttcttttccttatgatgtttataacattttcttttctctagcttgctttattgcaagaatacagcatataatacctataatgtgctaaatatgtgttaattgactatgttattagtaaagctattagtagttaagttttggaggagccaaaatcatacatgtatttttaactacacgggaagttggcatctctaatctttgtgttgttcaagggtcaactgtactggtaaacttgaactattcctaaaataatatttagttttttcttttttttttctttttttttttgagacagagtctcgctctgtcacccaggctggagtgcagtggcacgatctcagctcactgcaagctccgcctcccaggttcaagcaattctcctgcctcagcctcccaagtagctgggattacaggcatgtgccaccacacctggctaattttttgtatttttaatagagatggggtttccctgtgttagccaggatggtcttgatctcctgacctcgtgatccgccccctcggcctcccaaagtgccaggattacaggcgtgagccactgtgccccacctagttttttctaaataccatgcttgcattttttaggagtgatcatatatatatatatatatatattttgagatggaatctcgctctgttacccaggctggagtgcagtggcgcaatctcagctcactgcaacctctgcctcccaggttcaaaggattctcctgcctcagcctcttgagtagctgggactacaggagcgtgccactacacctggctaattttttttttttttgtatttttagtagaggtgaggtttcaccatgttggccaggctggtcttgaactcctgacctcaagtgatccgcctgccttggcctcccaaagtgccaggattacaggctgagccactgcgcccggccgatcatatgttctttgttgctgttttcctttccagtcatccctgtactcatttcatgttattgctcttgggtcttttgattccatcattttaaccttctgtcaattagtcataataatcattactgatttatacagcttaatttatacatattcaataattgattgctaatcgttgacaactacccctcccttctgaatttggtcacctttaggagtcatctccgtgaatatctgtgactgataaactgcttcagttcaggtagatggaattttctagttccagtcccgttttcaagaaagtttaatctatgtatgggtactggctttattaagggtcaacagttttagatcctaaccccaggagggcccaaggcactcaccctgtttctgtaaggtcatcacaacctcagaccctaggcctgtattcagacctgctgccccactagctgcccagactttcgccaaaactcaaatgttctcatcgtgaatttatcttcacttctggcatctagatatttcccttatttcgcactttacgtattctcgaacagtttcgttatgttgtatccatgtgtacgtaataggagggtattctctgttaacttaaaacagcatgttgcaggaacccagtactatctttctttgcattgcccatgcaagtgagccctgcaatataaccatcttgtctgctgagactttcttacacattttcagagtattttctaaagaagtcatcacatctaagatgcaagcttacaagcgagttcactaggggatttactctgtagacatgttgattttgatctaaatttaatgcccttgtttctacaactgtatttgtttactcttttgtgcctgtggtataatacactatcttatactctcaagcatttcaatacctcttccagtgtttctagatcactctgtctctctcattcacacacacatgcacatgcacacacatatacttttacacatgcatgcacacacatacatgagcacacacacatttacatacatgctcacacacagcacacagtgggacagtctgttcacaaacactacagaacaaacttccttgtctgtaggaagatatgtgtgcacctggcctctttgctgttcttacgacttgcccttcccaagttatttctactttacctctgtggttcgtttgatagaatttccagttaatgtattataagttataatatgccttttctggaataaatctttgctttcaatagatccattcactcctttccagaaatgatcgctgctttttatattctccttggaaaaacaaaagcacctgccttgacccttgtcttcaatatcacatataaccatacaaaactaaaaacaatccattcatttattcctttggttaatagatttttgttgggcagctatcatgttgtatgcggtgtgttagatgctgggtatgttctatgaaacaaaatagtctctgacccctggaagagaaagaaagaaagaatatccctcgccttacctttcttgacccatagtccaactgaagagagaagacgtctgttaattaactaacaatattaagtagcaaattctgagtaccaaatgagtggtattgagatcagctgcctatttgtgggctgatatggttccaaatggcttcacttgacagccttgaaattgagtcttgaaaagggtgcagaaatctaggtaaaaaatatcgatggggaggcatttcaggtgggagaaggaaatgaagaaagaccctgaggtgttacatggggtcaaaagaaaggatgattcaaagcaaggagagagcagagaagagttgggctgaaaattgaatttcctaccacttgtaggtaccaagttgtgacaatgagcttgtcatttcttgcagcacctgtcttatgtagctaaaagtctctttgagttctgcaatggcatattgcttctacggccaacattctgtctttgatagtgaggtcttacattagcattaaatcaaatgttatattgaaccttgagtaaaatctcttccaatttatgttttttttttattatttgtgtctgtgttgttctctgtgtgtgtgtgtgtgtgtgtgtgtgtgtgtgtgtgtgattgtgcacctgtatttgcgtttctcatctggaaaattctcttattcttttcccagggtttgcactgattttcacccttattcactcatctgaaatatcctttttcagtttaatcccagcattttatgtggtgctagactttggcttattggattgtaatttccaacttctaacctctcacctttgtaagacattgacactgaatcatctttcctcactctcagtataaatggtattttaactccaagctggctgcctgttaaattcatttactgtgctagagtgtatctggtaacttgcctgtgatgaatttgtgtccattattacattatagatggtttcatgcagccatctctgcaaagggcctaattatagctgtgatggccaaaactacttgttacctcgtgtcttctgactcatgtgacttgtacatgttttgacaatgaacagttctaccctccaccatggttagataaggtggaatctttttgataggagacctatattagttcagataaatgatgttgcttgttacgtacgaacacacatcactttatctcgttagcttgggaaatggatacgggcagagtgtattattcattttatatctagtgctgagagaggggcacttcacacaaaatagtggttcagcaaatgtttgtgggatgccaaaaaagcccccacaacaaaaagtggacctctttggttatccaagagagatgttttgtcttttggttctagaaattttttcttgcttcctcatctctcatagacatcctagaggagtgtgtgcatgtgtgtgtgtgtaatattaagcaaccagccattctttaccaatagaagatatccttgtttctaacaatgagacttcttctaatagtgctaacactttatctcatgtatgttatttattttttgaagatatagctttgcattttggaataattggagactcacatgcaattttaagaaataatacacaaagatcccatgtactctttgcccagcttcccctaaagttaacatcttgcacaactatagtacaatatcaaaaccaagatgttgacatcaactaatcttatttagatttctccattttgctttcatatatgtgtgtgtgtgtgtgtgtgtgtggtgtatgggtgtatttagttctgtgcaatcttattatatgtgtaggtttgtgtaatagcacctgctgtggtttgaatgtgttcttacaaaaacatgtgttggaaatttaatctccactgcaatagtgctgggaggtacagcccaatgaaaggtgtttaggccatggattgatactgattacaaaaacagcttgagtctgtgagcttgctgtcttgcccttctgccttcctccagagacccttgacagatgtgggccccttgatcttaagctttccagcctccagacctgcgagccaatagatctctgttcattacaaattactgagactgtgatatcctgttttagcagcacaaaaaggactaagacaccaccatagtcaagatacagagcagttctgtcatgaggacccctcgtgatactctgacagccacagccactccttccctccctaacccctgacaaccatcaatctattgaccgtctctaataatgtcatttcaagaatgttatataaacagatttataaaatatgtaaccttgtaagattggctttttctgtttagcataactcctgagatccacccaagctgttcatgtatccatagcgggttcctttttattgcggagtaatattccatggtattggtgtaacagtttaaccattcactcatttatggatatctgggtttattccagttttgggctattacaaaggaagcttctataaacattcaagtatggtatgtgagtgtaagttttcatttctctgggattcttgtctatgaattcaactgctgggttgcgtggtgattggaagtttagtttattaaagaaacagtcactgtttcccagaaagactatgccattttccattcccaccagcaatatgtgactcagtttccctctgtcctcatcaacatgtggtgttttcattatcttgtattttaggcattctaataggacttgtcttattgggcttattgtcttatttgggctactgtaacaaattaccatagactgagtagcttcacagaagtttatttttcacagttcaggggaaagtttaagatctgggtgctggcatggtccatttctggtgaggtccaccttctaggctgcaaacttctgacttcttgttgtagcctcatgtggtgaagagcagagaggagaaacaagctctctcgttactataatgagggcactaatctcattcatgagagctctgcccttatgacttaatctaatcctcattacctcctgaagtccacagctccttatccatcagggggtaaggtttcaacatatgaattctggggtacacagacattctgttcataacaggtatgtaatgacatttactttctaaatggtatttgaatgttgttttgtttattgaataaccataaaccaaggagttaagggttgcagatgctgtaaaccttatttaacagatgaagcaggctgggtgctgtggctcacgtataatcccagcattttgggtggctgaggcaggcagatcacctgaggtcgggagtttgaaaccagcctgaccaacatggtgaaaccccgtctctactgaaaatacaaaattagccaggcatggtggtgcatgcctgtaatcccagctactcgggaggctgaggcaggagaatcgcttgaacccaggaggcagaggttgtggtcagcagagatcgtgcaattgcactccagcctgggcaacaagagcgagactctgtctcaaaaaaaaaaaaaaaaaaaaaaaaaaaaaaaaaagtagatgaagcaagttgctcaaatcagacacttgtttgagtcacaaaataatcaatggtagagctttgtctgcaaccctacattactccctcattgttttatgttgtcctgattaaattgagcttctaactgataataaaatctattattcccaaaattgggccacccattccccaaacgtcctaccttcattctagaatgtcaaacacaagccacagctgagcagcaggacctccatcagcatgcaaccacatggccagccacgccctgcgccaagcctccagatggagaggatttggtgggaaatcatttctgctgctttccgcattccgcatacagtgtcttcttttaacatggcctcttgagagccactctccagcggcagcacggccagcctctgtgcctccactctccaccccaccttgcccatccacagctgtcttccctttctcttctctctttgcagctattctcccttcccaatccagcacagcagtgtggctctccttcctgtacactggtctcctattttcccttctctcatcacataaatcaggctcacatagggttagcttgcgttagcttcttttaactggttgttctgttggttttaattttcctatttttgggattggtttaattatgggaggagttagaggctattttaatgaaataattatggaattagcctaggttttttgaaagaaagaggaaggaaaggtgtgttccattctgtttgcattttttcttctgtatcaagctttgatgtagctttttttccaggcagaatttaggtgcaaatggaaaggtctcaatctgactcaagtcagagtactgtgtgtggttgttctcaatggtttattaggttttatagctctgttttcttttcttgacaaagttatctcacctttgcttgaaaaccatgtttctctgaactatttggtggtttcatgattgcttgtgcttaaattaatgtcagcagcaaggcaatcagtagaaacttcaagtttaaattctcctgaaagctaactttaaatgttaatgtttcatttaattgaagcattctgagatattagcattaaccatttagagcacttttattagataaacggaagaagggagaaggcctaattattgtaagtcatttctgttagacatttatagagaacttgcctttgatgagaaaattgcaaaagaggccaagtatgtcaaatgttgttgtcttccaattcccatttcaatgtgcaaactaatcattcacttccctcatgggaccgctgtgagtttaactgggcaaatacatgtggagtccatgggtgaatctttcattcagtgcaggctacgttgggcgctgtggtcagctggaggcccctatttgacaagagacggtcagaacttagtgtgtgttttctggggctgttttgattttcctgtacaggagagttttgcagggaggcatattgggctggaaatcaaaaggccgtggttcttgcccatctttatcatgggtagatttctggagccagaaccagagccaaataacttcctgacctgcaaaatgaggaggcctggaagattatcctaacgagcctctttgctctgtagttccagcaattatatgtattctgtgaaaagccaataacgtgcaattcctgatagtgaaataactctggagcccatgaactcatgcttcataggccagccctacagattaggaaatgggtttcttcctagggtttttattcaccgtacaatactttcacattttctttccaaatgactattaatcacatattgaattttaaaatattataatccattttccctccagtttttgtggaaaaaaatgtatacacataacgtttattattttaaccatccgtaagtaagtatacgattcagtggcattaaacacattcacaacgttgtataaccatcaccactatctatacacaaaactttttcatcacccgcaacagatcccaatgccttttcaacattaaatactgacttccccttcccactgttaccattcacaatgttgtgtaaccatcaccactatctatacacaaaactttttcatcatccacaacagaaactctgtccccgttaaatactaactcccctttcctactcttaccattcacaatgttgtgtaaccatcaccactatctatacacaaaactttttcatcatccacaacagaaaccctgtcctcattaaacactgactcccgcttcccactcttcccagccctggtaagtctccctctgcctgaattccccaggagtttgcctattccaggtacctcgtacagtgtctatctttctgcatctggtgtattgctcttagcataattactccccctccagttttaggagaagcttcttcccaaggagatttttgataagaacaggaggcggccagctcagcttcctgggatgatttgggtacagccccacccagatgtctctaatttggcgttatcagagtcagtcaccccactgaaaagcccgcctacccatgagcttgggaagccctacatttacaggatggtcagctgtccccatgcccaggagtggttctgtctggagctgattcacagctccatcccctagaaactgtaattcaacaggtcttgggtaagatttagggatctgcattctaaagacagattccattgatcccagtgccttttcaacagtgaacactgtcttctgcaaacagctcacaattgtccatgaaattttgagcttaaggaagttctaacgcccccctcccctcctttatttttgagttgaaagagggtagaatcaaaaacaatactgagaggggtctaaaaatgcaaacacagagagttgctggtttaggagggctgggaggctatgggagaccataggcatagagaaaacattccttctctgtgactctcgggcgcgagcgaatccccaagggggtcaccagagaatcatttcctctttgggaatacaacatgagatggttctttcatctggacctaggttcaattaagtaaatagagcaaatacaaataagagaagaaaagcagcacaaacagtgaaactaggtctttacatacctaaggaggagccgtgagcattcgcctccagggaaccacagtgacgggaaacatgctggaatgttaaacgttccatctcatttgtaggaagcagatgcctacatcttcaaattttgtcttcttaaaaatattattttatccagataaaaatctataacctctagcaaagaaaaaacaacagctgcaagttggagatcatgaactgtctttccaaagaatctccacgtgtagctgatgtcagatgccatcagcagtcagccttcatcaccccaacgccaagtatttgttcagtttctgctccatatgaatgcatcttggatagaatgtgtttggtttggcttttaagaaggctcactgacttagcccatgacctaaagcatatacttaccaagccttggaattcctacagagggccctgcactttgtgtttggtacagagaccaaaaatacaaacccagctttgaggacagaagggcagggaagcaggctctttatgctgtgagtctctcactccaccccatggtccactctggaagcagaagaagtttctttggggatataaaatgtattgttggcaattgtttttgtgtgcagttaaggatcctggaattacagcatctaatgttctaactctactgccatatccatcttaggaatagaaatgcaattgcaaatggcaatttgaggtaagcaatccgattgtgcgaataggtcatatcagatggccaggaatcaagggtcatctaatgagactcactgaccacaactgaaatcagccaccagactctattttctctctgacaattgtgatatggagcaaagaacttcacctcccaccaccatccctgcccgttggtgactgctcgtgaacatttggttgatggatggacaaatgtatgtgtgaacaaataaattaataaatatgtaagagtattggttactggagtatgtattactagagaaataagcaaagacctgctccatacccttcccccaagaaaatagcaaatcattctcagttggaagactaaagagaaatgctagagtccaggccaatggaaaacaagttaaagacagaaggtttagtagcactggaaaacccaggaggacaaagattctccaggtcatcgggaggcgtcgtgctttttttcatgggaaagaaaacttgacccagagtggcttcattaaagaagggagagggacttcataagtgaccagtcgagagctaggccataggggctgcagacccgggactcaaacgatgtgcaaaggcctcagtttctctcttggtctctcccacaatgctgtctgctcacacaggctttccccctttgcactgttgctggttgcattctcgctctttcccccataaggctattaaagttgctgctggaaggttccagagctgtatgatcccggaattgtaccctgtgaaaaagcatagctgcttttctcacagagtaaagaggtccagccctgagttattttgcccctaatgggtttccagggtcgtgtcctttcccaacccctgaggaagctcagcagagatgcttcaggatgagattaggctcactgagcgggtgaacggagctgtttgaactgaggtctcagggagaccagccctctaactgcagcgagctggatttcagacccttcctgtgcacacacactgttgcttgcccagacatgcttcccctttgtcttgttagaccattgatttcctttagaagatcaaaatcagggtgcaggtaggagccttagacaatttctagtttgactctcatcatatttttaatatagccctgcattttcctcatatgaaagcagaaacccacagagtttatgatgtgctcagagccacgcacaggatcgctagaagccggggccacagcccagcttccaccctcctgatggggaccatatccatgtgctgctcttacatgtactgaaaactcagcacatgcctactaaatgctctgtaggctttatctcattttaacttcacttactcatgtaatctcagcactattatcatctgcatgtcacagaggagggagctgagatgcagagtatgtttgtgacttgcccagagttacacactgatatggtttagctgtgtccccacccaaatctcatcttgaattgtagctcccattatccctacatgttgtaggagggacctggtaggaggtaactgaatcatgggggcaggtttttcccatgctgttctcgtgagagtaaatgagtcttacaagatctgatggttttataaagggcagttcccctccacacattctcctgcctgctgccatgtaagatgtgactttgctcctcatttgccttcagccatgatgatgaggcctccccagccatgtggaactgtgactccattaaacctcctttccttgtaaattacccggtctcaggtatatctttattagcagggtgagaacagactaatacgcacataccatcgattggcacagcataggcactccatgttcatgactccaaagggtaccatctaccacctgttaactgcctactagtatcttcaaatcaacgtaagcctcgtagcgttacctattgctgccttgtcctaagcaatcatgttaatggtatctaggttggatgagctacttatatcttttcaattatacaggaaaaacaatggaaaattgtgataatgaaaagaatgtttgctcacaaaccactgaagatggcttcacctgccaccagtgatatgtgaacacacttatgaaactctcacctatattacacagccagggaggctagtgtatttgtggctgatgagggatcaataagcttatagcataacaatacaggtaaaaatttgtgaaagagccctggtcaccttcagggatggaattgacagcagaaagcccacagcaccaaggttaagtactttgttttgtgtgtatttatgtgcagaaacatagatgtgtatatgtgtagatatacaaccacattatacgttatacttagaagtgcgggttgcatacgccactgcacattagaatcactatacagaatccagcaaatcagattctctgatggtggggcctcaacatcagtacttttttaaaaagtcccaggtgatgtctaagtggagccaggtttgcaaaccaggtacctaggatagaggttttcaactcttggtgtgctcacagagaagcacttgaagtatctgcacagctttgtcaaaatgcagattcaaagcctcaaagattctgatgcaggtaatctggggtggcccaggaatccgcacatttcacaagcacgttgaatgattctgatgcaagtgaagggtctgaggaccacgccttgaaagctctgcacagaccccagctcctctagaggacttgcattgccatctggtgaggactgaagacccacattagctaattacatcagtatttttaactctgggaaaatgtaaaaagaatttagcacccagtgtaaatatggaaagattctttcttaaatgttcagtagaggaccctgagcatatggtgactatatagtcagtagcgactgatcactttttaatgtcagtttcatcgtaatcatacggcttccgaatgccacacattaaaatgttaggtccttttcttcccaacccaggattaaaattcatctcaaaggcaaaacatactgtgatttctcaaatgtttttggaactgtcaaaaccagaggatatatttagaggcctttaatgtagaacacaaaatttcactacacgcagaattgccaattaggatgggaggctcagaaatgatcttaatgacacaagtgtgcagtgtttttttccttctgcattacatgaataatttcaagggtgttttcactctgaatgagttttttttcctccatttggcactgcctgtggagtcctctctatagcagaggtgatgttacgagctgtaacgacgtccccgtcagcaagtagcacatgcttttccattagttatacttccataccttcgtttgcagttttgtttttacatacaggattgaaacaaataccagatagtacttttccaaattgttttggtggactcctccccatccacagcggcagacaactcacattaaatatgaagctttcaccacatacaatcagaggcctatcaaaatagcttcaaacttcaaattaatgccattttaggatcactgatgcttttctttagaatgccatacacttgaaatcttctaagactacaagaactgtatggacatttatagctgaaaagaaaacctatttttagaactcagagctgaaaccctacctcaatactacccctatgttttcaagagttcctgtttcccaatgctagtcaactctgaacctgaattttaaaaattatttcctctctgtttcctccctatctgagaagtcatttatttgatggttttagcttctactggcaactacgacatgatttggaagcctgctaagaatgagtctataatatgtttatgtcatgtattaaaaatctccacggtcttataacttaatataaccctatgtgtaattagttgaccgagagtccttttcaacattgattttgatatatgatttctaatttatttgtttatttacttatttatttttgagacagaatctcactctgtcgcccaggctagagggcagtggtgcaatctcagctcactgcaacctccgcctcctgggttcaagcgattctcctgcctcagcctcccaagtagctgggattacaggctcatgccaccacacccagctaatttttgtatttttagtagagacggtttcgccatgttggccaggctggtcttgaacccctgacctcaggtgatccgcccaccttggcctcccaaagtgctaagattagaggcatgagctaccgcaccaggcctctaatttttaaggttttaattctaggccgtaattttttctcttccaacatgataaaaagggtcttcccatgcccttctcttggtttctcttccctcctcatgcctaccgtttatctgtttccatgacctccctgcccacctcaagtcaggtggcacttcaacctgctggcaaacagtgccacccaacactggcacatgagtccatagaatgtctgggaaaagaggcttgtcgtaccatgtgatgtaaagtactaactgtgcaaacgtgcggcactcaacaattttaggagctttgtgattccttcttaatgatgtgcttaatatatttcccccaatgattgcttattttctctggttttaccctcctttatcaggtccttattgaatttcttcttttcctagttaaactggaaaagtaacttattactctgccaggcagtaggatcactcaccaagagacggtaatgagggagaccacatagcccagttggtctggtgatgcctgttttcccaacatagttattaatagcaccactttcactttgccactttggatggcaaatgatatagcgacaatggcactacatttgctactggcagctcaagaagatgttacagaggctggttttgacggaatcacatatgccagatatgtggcatatgtggaaatagatgggaattatgctggaaataggtggaggcccaattgaccctgcttgctcctgtttacctgtagcctctgcttttctgcttcagcctggaattgtcacagaatatcccagacctcctagtctgtacagggtctggttggacaagacccactggctttttagaattactccggaagtcctggcttgctgatcagaagacttgattcttccagaaagaggtagccaaggagacagaaaacaagctggaatcagagcaagaaagactatgtctaccaaacatccccgtctcttcctactctaactgtagatacacgtggataccatagcagcatgaatgagaccaacaccatcgaatgaccattaaatgaatggtcattcgtttatggggaagcagtactgcagggattatgaggtcttatggtttaaagtacagcacacatggaccacggtcccagccagggcagcctgctgtgggaatctctctcagcagatttttgcctgttagattccagaaccttctctggtcactttcatccaatctaattgtctgtcttacccaagaagggatttgttacaagggacttggtggattaagctaaagcaatcttaaatgcagaatgccaggtttctgatacagataatcaatttcagttgctgcagaaaactctgttgggggtgatggagagaatgcactttgtggacccgtctggattgtctcctagtcttgtatccaggtggcactgagcctcatcagtggggtccactctgttatttcctggcctttacttggtgagataaacccttcatgttcagcagccttgtaacagtttgcagaaaagtctccagcctttgcttatgtgttgggtgcaagtctactgatacatcctgagggtgtatgctgttgccggtgcgttgcactaaatgcctgctactgaaaatatgcccagggaatatttctctttatatctgtggaactttgtccatcgctgtgctggaaacaaactattccctgggcagtcagtggtgcgcttttaattctggcctgtgtggtggcagtgggaggggcggtgccttttgctgcgtcgggaacctcttgatcccaccagggtgagctgaaagaccttgaatatgatacttcaaataataaaaatgtatgtgtcaccttggatctgcccagaaaaggggagaggattttacaaacacacacacacgcacacacgcaacacgcacacacacacgcacgcacacgcgcacacacacgctgacacacacgcacgtacacgcgcacacatgcgtgcacacacgcgcacacacgcgcacacacacgcacacacacacgcacatgcacacacagagtcattcaggaaaaacaacaacagaaaacaatttagcacatttttggtgctctgaaaatataaattgggattttatctaccaatattaccatttatcaagttataactatgtatagcatttaattgatataaatacacacagcataaacttaccccaaagtatttatgctttaaaaatttatttacaaataatctgggagaaaaaggtttatttcaaaactatatagagggctgggcatggtataatcccagcactttcggaggccaaggcaggtggatcacttgaggtgaggaattcgagaccagcctggccgacatggtgaaaccccatctctactaaaaatacaaaaattaggccgggtgtagtggctcacgccagtaatcccagcatttggagaggccaaggcgggtggatcatgagatcaggagttcaagaccagcctggccaaaatggtgaaaccctgtctctactaaaaatacaaaaatcagccagacgtggtggcgggtgcctataaatccagctacttgggaggctgaggcagagaattgcttgaacccgggaggcagaggttgcagtgagccaagatcacgtcactgcactccagccagggcgacagagtgagactccatcttaaaaaaaaaaaaaaaatcagcttggtgtggtggtaggtgcctataatcccagctactcagaaggctgaggcaggaaaatcacttgtacccaggagacagagattgcgccgctgccttccaacctgggcaacaagagtgaaactctgtctcaacaaacaaacaaacaaacaaaaaatatatgcagagaagagagtacttaggagcacagtgggagggtgagatgtcagggctcagcatctgcttccgaagttgtcaccaggcatttgttcagggcatgtgggcactaagaggatgaccccgtggtggtcaggtaccttgctgctctgcacacaaacaatagaaagcaatggagcccttgttagaaacacatatttctaagctccaagcctggagcctaggaaacagtgtctcccaggaagaaacctgttaatctgcaccatgtcagggaccccaccccaggattcttaccagtagtgatgggtgagaaacactggctatgctaacagaagcaggcacacagcggccccgtcttcctcccatctgtgagcatgcttcagggctgagcatatgaccaacattttacatttcagagttggctcccaccttaacacacacaacaatgtggacaccaccataaactgtgacatcaccatcacccggacaccagtgggatttatgttgtgtggattaatggccagtggataaatatacagcaataccaaggggcaggtcaacagcttaaagattaggagaaaacaatgagtcagaaactgagcaggtaatcatcagagcatccgtgaataatctgacagactcctcagtcttccacatgtgcacgtggggcagaatgttgacatccaagtgggcatggtaagcagctgatgaaaagttaaggatggaaactttaggcttgaaagtcagcaaagtgaagctgacttgccaagaataaactaagcagctatgtggcatcatgcagatacacacacagacacttttttttttttaagatagaaggagaaacagcaggagagggaagaagtggaaagaaagatgctgacttgactggactcttcactgctaacctttggtgaaggataagtttagacacaggctgcctacatgcaagcatagagatatttctagtgtgccttcttataaaggaagcacaggtagatgtttgtctttgtatggttgtaattaagcgccaaatgatgtcctccattcccttagtgacctaggaagagaaccagctgtgcagcaccatctctttgtctgtttttggaagtgagcccaatgcacttgaccctcagtgctatgagggaccagggggctgacaggtgaaatacagcagggaaggctgcaaagaagccccaagctgctgcgggcagggtgtgtgcaaggcgcacggtacagacagacccaccctgtgtttgtggggcaagccccctgtgcctttccccctctgttgcctctttcagctgccctcagtccttcccacaattcatcccatctcccagcacctgttttggatttggagccagtatatgcaggagagaaaaagaagacagtaaatcgagcaagaaaaaggaaaatgttgtattctggagcagaattacgaatgagtcagcagcaaggtctgacaaaacaaaatacaaaggcagtaaagtaggaggttggctgccaggctggtgtgaagctcggatacctgtttctcagtggccgccagtagaagacagggatatgacaagcttgggaagaaagcaggcatgctggtgtgcatcctggaaaattagttaggaggaaattctcatgggtttcttcctttgaatttcctcctagcaatgctatggctgatttcatttgtttcccagaagatgagctgaagacacataggagcagctattggaattgaaatgtccaagtggagactgaaggaaatatatattttgtaattactcagctatttctggatgtcacagatgtttttgaaacgcatatttggaaacacagttgaaatcacaagtgaaatttttattgttcatctcctaaatgtaagctttttattttatttagaggcatcctcggttttaatcatcttgttatacttagatgttctcctcttaacgactcattgcaaaaagaaggcattctatgtgaagggtacagagaatgcgagaaacattctctatcaatgacctgaacaactagggattgatcagaaaagaaggaactaaggtataatagcgttgggtgtggtatggaagtagaagtcgtttgagatacatatttgaagaagctacaggttcaagaagaactcaccatttctactctcttaaatgtaagttttgtgaaagaccagtgactactataagttagtttattccaggaggagagaaagagctgagatataaatactgaatcctaaggatttgtccattatttttgtgtttggaatctgacaactgtatgtcttctatattttaacccttgtataaatggttgcagtaaattgcctagagcagtgaaggaaagatgtgcagccaagggaaagatcaagaaccttcggtttacatggagctatttcctaatatttgttttatgtcatatgagctaaacatctttaccttttactaaatatttcaaattttatctggggtccattagaaattttttctttttttttttttttttttttttttttttttgagacagagtctcactctgtcaccaggctggagttcagtggctcaatcttggctcactgcaagctccgcctcccaggttcaagctattttcctgcctcagcctcccaaatagctggaactacaggcacccaccaccacgcctggctaattttttttccttttttttttttttttttttgagatggagtctcgctcgctctgtcgcccaagctggagtgcagtggcgcgatctcggcttactgcaagctctgcctcccgggttttcgccattatcctgccttagcctcccaagtagctgggactacaggcccctgccaccatgtccagctaatttttttttgtatttttagtagagacggggtttcaccatgttggccaggctggtctcgatctcttgacctcgtgatccacctgcctcggcctcccaaagtgctgggattacagacgtgagccaccacgcccggccttttttccttttaagtcattataacaagacgtttaacttcatgcaaatggtataaaatatattggcaaggagtgcagaaatgtttgccaaatatggtcattaatatgggggtgactacgacctgcttgagagaagagaagggaagacttctctagggaggactgattcattcaggaagttttccatcatccttcaacttccgcatcaggacttacagttcactggaccatcagccacaggagtgggcccagacaccagacaagaagtcagaagttttggcaagatgccgggtctttgggtgagtgcccagtgagaggtacaaatgcaacaggagtctgacgccatggagggatgtgacttctgcagaatcttgggaagggggcagtgtgggttttgcatgtgggagggacttaaataacttttatcacagccaaatgtgacatgctaaggcctgaatgcatttattcatggttcaggcagctgtagccaacaacaagaagcagttaaagttatgtacccactgagagcagatagcggggaggcagaggtcagcacctgcttgcctgggagctgcagggtttctgagcgggaaggaatgttagtggttgctggttccatctcaccaattcctgcattcctgcattctgaatgcaccaacaaatggcttccatccttctattaacaggggctgttgagccttttcagtgttgaagtatttcagactaccaaaagacagtttcatggttctgaaatctatttccttctaatgtgtacttgtcagccttattcttcccatggaagcaaaagagaccaggcctactgacatgcatgtactcatgaagttctctaaaaccttaaagacatctatccctctcccccgggtcgtctcttgtctgtgcagaatacttccacttgctccaagcatctctcaggtagctttgtttccagactcagccaacctggtcatcttctctggagtattttggcttattggtctcaccactagaaaaaagtgacaccctcaactggacctgttacttcaaatgttaagggagaaggttttagacaagataggacaacatgtcttcccagaaagaccttatgagctgggtagctcttgtctccgcccacattattagagatgagctcgtttattttaactatccaaagaaggatctgggtggaaaatggggaaagtctgcttctgcctcccctgccctgaatgcccacctgataattagcccttccacaaagcgagtccccaggggcttcctggaagcacagcagctgctacatcgtgcaggaccatgacagtggatggaattaattactaaaaccagccaagaccaagattaaggaagataccatgtaaatgtggcaattcgcgaagtatttctgaaaaatgaggcatctgtttcctggtctcacctctcctcatgtcaggtgaaaggtgtggcggggaatgggggctgtaattcagacttaactgtttgattgatcttctcggactcctcaaggttatcagagtaaaaaaaggaatatgtacaggacattgctttcatgaagtgtctgtcacagtccacaaaacctcggcttggattgtgaaagcagattgttttctgtctcctaggggactgtctattgtgttaatttccagatatggatatgactgtgccatctagcacctaacggaacttcttttttatctgttaatgatggaacacttcaaaattgcaagaaaataaaccctttgagtaaacacttcattttctcattttcctcagttttagagccaagaaatagaatattttccagcttctttttggtgcttttatttttttccttcaggttttactttttttcccttctcacccctgacatctcatgcagataactttccttttttttctcttttttaccacccagtctctaaatctcactttcttttctctgtctcatctgccttttctctgtgttaacttttccagtattttcagccttgcttctcattatgttactatattgtgtttctttaactgtgtatgccagccatggggttcttgattctagcttaagaaaatctgactctgggctcatctacacctcctgttatttttcacttcctctttgaatggaattgtaggattaaataaggaaaggactgtggaggtcccctgaagcaattttcctgcaatgcatgcacccattccagaggactccagtggtgcttcgagcccctgctcatatgctatccatgctggggagctcaccacctcagggagaccatccatcctcatacatgctctaagtggactgcactaatgctgaccagacacccagtccaaaatcctgggtaacaatctcagtcattgaaggcagctgcaactctgccattcttaatgggattccggtttgccaagagccccagagagtagaaaagtaagagtttcgtggactctacacaatgctggtaactagatcatgcaattctcagaatttagaaaagagtgttttttattcctttcttgtgatttgaatttcctcacaacccttagccctgtattacacaaaaggaaactgaggctcagataagcaacttgtgcaagttcacccagcaagtgaataacaggctcagatgacctctgcgccttactctaaaactgcctaatagtagtagctgtgtcctactccagagctacacctagccaccctcttctgctggcctcagcctggtgcattgttaggaagggaatatctgaggtgatgtggaggagggaggggagcacaggcaggccagacaggggcaactttggctactccagcatcccaaactagggccgtgctagagggtagaaaacgtggtgtaaatttaaggggcattctcaagttacaaagtcaagtgaaacttggtaatcatgtttacatggacagtaaggaaaataagcaaggggaatggctgatgcgaattccaatatttttctgtggaaagaccaggtacatggaaggaaacagagaattctttagcagaaaaagaatgtatctctctaatgcccagtgatgatgagctttttttcatgtttgttggctgcataaatgtctatgcagccataaaacaaatgagttcatgtcctttgcagggacatggatgaagctggaagccatcattctcagcaaactaacacaagaacagaaaaccaaacaccacatgttctcattcataagtgggagttgaacaataagaacacatggacaccgggaggggaacatcacacactggggcctgtcgggggatgggaggcaaggggagggagagcattaggacaaatccctaatgcatgcagggcttaaaacctagatgacagattgatgggtacagcaaaccagcatggcacatgtatacctatgtaacaaacctgcacattctgtacatgtcccagaacttaaagtaaaatttaaaaataaaataataaaaaatttcacctaaaaaaaagaatgtatttcattttcaaaatattgaatttggggttaaagtttggcataaaaacatccatgtggaaaggtccagcccaagctaaaaatataagtttagaactcagaagatacatgaagcataaagacgtaaattcagtaggaagctgtgtcagaaagcagaaatgatggggacctgccagaccaaggcttagaccagtgaggaaggagcccctgggatggcaggttggtgcctgccttccattcgggtctgcagcagcaggagagaaaggtgaagagcctggatggaggggcaggaggcgaaggagagcaggtcctggaatcaggaaaggggaacagctcctgttgccttcatcacgtgctgcaggctggaaatcagaaagatgccacgtgtttggtagataagggttagctgggagaactcattttgagaatgctaggagtatattgcagtgggttaaaagtgaatagaaagtgagccagtgaagcagtgtagactttgcttgtgaagggccatgatagttacaagaaggaggctgggtgcagtgtctcatgcctgtaatccaagcatttgggaggccgaggcaggagaatcacttgagcatgggaggcagtggttgcggtgagccaagattgcaccactgcactccagcctgggcaacagaacgagactctgtctcaagaaaaaaaaaaaaaggaaggagcagttccaagggaatatggccagaggttttttgtttgttttgtttgtttgtttgttttcaatgagggagatttgagttatattctacagaattagaagaagtaataggggagaatgagtggttagaaatgtaaggcacagtggagaagttgttaaagttcaacaagaagcaggagggtatgagcttagtcttgcaaaggaagatggcagtttcaaaacgtcagccggattcaatttaaagcttaattaagcagtgaacaatttgcaaattgggcagcctcctgagccacaataggctctgagactccagtgcagccccatggtggtagaagatttatggacagaaaaaggaaagtgatgtacagaaaacagaagtgagggacagaaacagctggattcgttacagctcagcattcaccttatttgaacatgcttcaaacaattggctacgtttgattagccaaaacttggtgattggcgcaagagtaggttatggtctgtttacacctccactggttataattcacaatgtgcagagaaacctttaggctgaacttaaaacatgtaaggaggcagctttaggctaaacgtgacttaacggtagcttctttgtaggagaggaaggatggaggagaggcctgacttagggcacttgacctaggaaggaagagtagaagatggatttgagaaagacttagaaagttactgattagaaattgggcgctatttgattgaattggagtaggggaagcaaggggtcaaagaatggagggaaggaaaactacattttcaactcagcttactgagtgcatgatggagctaccaactgagatagggattatcaaaagggagcaaggtttgggggctgctgaagagtttattctggagcaaattgagtttttggtgcctgtgagacataggatgcagtcatctgatatattggtctgtagctggacctgtgggagttactgatatttaggtaatttaggttacggtttaaaatctcaagaatggaagatttcataggggaggaggatgtaaagggagtagatgagtggccaaagaaaaaactcagtgtccacgatggtacagagaaagaaaagaccttagaaatctaaagtatgggtccatcggagagaaggaggggagagggtagaaatttcctgactagagggaaattttagagagataagaagcagaccaaatatgaactcaccctgtgacaaatcctcaactgctttctaaaaaattattgaatgccaatgtcaactattttgtgtgtaatatattaaaaaaataatttgctgaaactgtttttccatcttgtggatagtgttttgggaaataagttctcctttattcattttccaggagagatattaatgtaatgctataggatgagactaaaataactcatattcatgaacttctaaaaaatggcactcttagaaaaataactgaaagcagccttactaatttccaatctttgtattttttatgatcagaaatatttagtctattttattttttatttttatttttatttatttattcatttagtttttgagatgaagtctcgctctgtggcccaggctgaagtgcaagggcatgacctcagttcactgcaacctccgcctcctgggttcaagtgattcttccacctcagcctccggagtagctgcgattacaggcacccgccatcctgcctggctaatttttgtatttttgtagagatggagtttcaccatgttgactaggctggtcttgaactcctgacctcaggtgatccacccgcctcagcctcccaaagtgctgggattacaggcgtgagccaccactcctggcctagagtctattattttaaagaaagaaacataaatacaacattgaccacagaaaaagaaaaagactttatctctctaaggaacaaattctttcagtgagatgcagctttcttagtgcctttctagataaaacattgtacaaatgaaaacgcttcaatttgcactctttaaacagtcattccctttgtgcctgcagttcttttggcttgatgttgaggaagattttgtggaagacaatgatattttattgcttcatcttggagcaaggagaaaattgtttctcttcttcccacttccccattttttaagagtagtgctcgagtcacacttgcacttccacgctgaagccttctatttgtatcaacagtgtgttctggaatgccactttcacattcccacacttggcagacccagcttctcaggttttctctatttcttgactttattcatttttgtttcagcctttcttttttttttcttttttttttttaattatactttaagttttagggtacatgtgcacaacatgcaggtttatatcatatgtatacatgtgccatgttggtgtgctgcacccattaacttgtcatttacattaggtatatctcctaatgctatccctcccccctccccccaccccacaacagtccctggtgtgtgattttccccttcctgagtccatgtgttctcattgttcaattcccacctatgagtcagaacatgcggtgtttggttttttgtccttgcgctagtttgctgagaatgatggtttccaccttcatccatgtccctacaaaggacatgaactcatcattttttatggctgcatagtattccatggtgtatatgtgccacattttcttaatccagtctatcattgttggatatttgggttggttcctacccaaaggattataaatcatgctgctacaaagacacatgcacatgtatgtttcagcctttcttataggcgattccattttccagatattctattctagtccccatgcatacattttggttttgatttggtttggtttgggggtttcttgcctaacggtacagacgaacaattaaaagcagttctctcctcctcctcctcctcttcttcctcctcctcctcctcttcctcctcttccccttctccttctccttcgtctccttcttctccttcttcttccttcttctctttcttcttgccatggccttgatagggttattttaattgctctccccgtttcttatgagcaccacttaaaagatatccacagagctgaattgcaggggtgtgtagtggtatattcaaagatgaatgtaaagatgtaactctaggtgtttgttttggggatggcataaccagggaatgaatttaaatcactgtttctagatggattaaagcaatggaccttcaaccaggaaagatggcagctattcttactttgcatatttattatatttgttgctatactgaaattttcagctgacaacagcgaacacggacttctgacttgagagttacgagatacaagcttggttcaggcaatttccaagggattgtttagagagagacagaactcaggtcaaatcccacttgactttaacttaaattccttaagattttattttcctacctgtacaaataggacaataatatctgcctcataaagactaaatgagttcttgcatggtaaggagctgtcagagtacctaatatgtggtacgtgctccataaatgccacccacccccaccacccacttcagctcaccactgtcaccatctctgggacttggcttggctgaagtaatatcaaaggcttcctctgagtgcttcagtctgtgagtggtcctctcccagcccctcaccacctctgtcctgatactattttaacaaggaatttatctgtttgctttagaagttgctggaagtttacaaagaagaaacccagtagttcagaagaaacgtatctaaatctgattttaaaattatctgttttctctggatttaaactagctatattacttacctattgctgtataagaaattaccccaaactcagtggcttaagacagccaacatttaatcttgcagtcactgtgggtcaggaactcgagaacatcttagctgtgtggctctggctcagggtccctcatgaggccagcatcaagacattagccagggttgcagtcatccgaaggcttgaccggagatggggaacccatttccacatccactcacatggcttctggcaagaggcagtctaacgggtatgagcctcagactctccatggggctgcttgagtgtcctcacaacatggcagccagcttcctcagagcaagtgatatgaaagacagcaagaaggaagccacgatacctcttataagctggctgcagaagcctaacaccctcactgctactgtattctgttcatgagggtcactaagtcagccaacactaaagggtacagaattaggttccatctcttctcttctctctcctcctctcctcttccccctttctctttcctttatcctcttcttctctttctgtgcctcagtttcttacctgaccaaaggtaacttctgccccctagggatgctatgaaaacaaagtgagatcaatcatatgaaaaggcggttttggagggagagttcagaaactctatataatataccatataccataaccatggaaacctgagatcagctctgtctagcttcctgctcttgcatctgaagaagccgttccagctcacacaggcatggcttagtcacagtgcagcatggggtcctttaatgggtcctctctgagcggtgacctgctcaggacacaggagccagcaccaggcccttccttccttctcctgggcaagcagcaccactcatcccggcagaaatagaaaaaggagttaagttcctgtgttccttattagattgctgtagcagctccataaagctctcctagacagtcctgtctgttagtggctgtttctttatgactaaagcagcactttcccatctgctgccctcaaagcaaggggccccgggccgcatatttctggttcaggagtctcaagatctctgaaagcaccagattgttgggatttaagtgctgttgtttatttttatatctgggtcctgttcctccaaataactccaagaccattgtgattttcgagaagttaattcagtggtgcaggctaggtagggaatggtggtattagcaaatcctacctgttttctttgcaagctcatttccatcattggtcctccaaatgcatttccctgttcaaagtactctaccttggatatgtctgcctttgcctccacgtccctcacctattatctttagaaaggtggttttaaatgttggtcactgaacatttagccacatagggcaccagctctcagaggtttcacaagtaaaggaaagggttgggggaaatgaaatatggttcaacgcaacagagtaacccacatattccgtatgttcgacaaggtctctacccaggaggctggcgatgaaggatgctaacatttcttgaaccgccatcttctcccttcttttgggtaaccctcgaattctgcttatggttatctatggattgtggagtcatttcctggctcaggaggttaagaaaggcgtccgagatttgagggttacaggagtttggaagcactgtttttctggttttctgttacctccattttaaagccgtgatacttccaactgcccttttttcagtaagttcttgttgactactctcttgaaaccaaaagatgcatatcccgttgtacagggggtcaaaagtgtgcccaattaagcctgccttgacttcaatattgcaactcactgaagacacacagtggaatttctggtggaccccttcccataacccacagggaactctagccgtacatgggtcttactgacccgttgggtctagctgacggtgcctgatggtctccaatgaccaaggtgtcctcattagttctgtgctatatttagttaagcctgaaatctgtgcccctaatttaatcacacaccaggtagccatggagatgacatcaagcctctggctgccctataaaccattgcaaatgctgaaaataaaataaacaggatatgcaaattgacttcctaagtaaataaaagactttgtctccaggtgttgggattagctgcttttggttcactgatgtttgttaggattcacagtgatttgaaaaatatcatcgtaacagcctttgtctcaatgcctaccttttttcctttttgtctgttgcagatatatcaacactcgtatactggatattacgtcctgagcaaaattcctcatgggtaagagtgttcttttctttcttttaattagaaatatgcagggcaaagtgaagggtagaacatggacgagctgtttaacccttagggcgggaaatggcgttccagttctcacagccaagggtgctggtatcgtggcacctctgggactctccctagataatgacactaaggatgtcagggggtcacttgagtccactcacttccccatttgtgaagcccccttcctagagcaactctgccctcttcctgtgctggttcctgcagttgaccctggaggttcttcagagccggacattcccctctgctttgtaatcacctgcagcctcctctcaggcaaggtgaggtggcccttggcctcccacgagggttcctggttatacccacactagcagaatagaagcctctctcagcccaccacatgtcatcagagacaaatctggaacatatctatgggattacggtaaactactctggtcagacattcagcagtgcattgggaatgggttgggcaagtggtattagtgctgctctacccatcactccgagggggtttcagcggcgtgttgttcttgttttattgtcctttctgagcttggctgtgctcccagggccgggtttcagtgcctgcttttgactgggccccccggcttcattctttcatgacctcacattgcactgctaacctcatctggtctctcaataatgtattgtccagagcaggagcgagtttagttttcagtgctgggcaggcgtcccccacacgaccctcagatgcctgatcagcttcacctttggaacccagagcagaaaagacattggttagggtttggtgaaaccacatgttgagtcagacacagatgaaaaatggttgcagaactaggaaagtctgtcgaggagaattttttgttgttttatcttcattatttcttcgtctcctcttccctcctccttccctcccctattctcattcccttctcctggccttcctgttccccacctcatgtttctctttcctgtcttctgtggtttctactgtcatgctttgcaaaggtgaggtgctcaggaaaggttgataaagaaactgaattgtgctgcagatagtgtcatgtaggctcctgtgaatatctaggttgaggcatcctcatttcccaagcaaattttaacagcaggagtggctagaaagcatttttccataggtgagcattaatcacagcatgagcgtttatagctgctgctctctgttttctactcagcttagaatacaggcaagtccttggaaaacaaactcgaataaactaatttaatgtgggctttagacaaagggaagacgcatgtggatcttcagcaaattgtgaccaatagtttctgttagattattagaaaagtgaagcccaaagaaagcaaagatggcccaagttgcaaaaataaagtattcatacaaatttttcattaaaagtatgttttaaatagaaacccaaatattcttcagtaaagaggaattatcccattctttcccaagcagatatatatcttcagaggtcatggcaggcaggactataattatgccttgagatttatctgccccttctgggaacaatagaatttgttgtagatgatagatatttcgttccatcttatatcaatttgtaaaactcgaaactctaaaagcagttgatgcctaacgtattgtgttaatattttactgcatcagtcagcatttggaggaaacagattctaggaacttggcacaggagtttgctgaacaagctagcaaagctcaggccatgatagtctgtgttgaaggctcggcttctgcacttagatacctggagcctggtgatgatctgccttatagatgaccccaacacggagggagctgcttctggtgtctttaatggaatcagagcaagaataatgcccctggtttattggttagctttcatatacctttatccctgttcaacaacctgcaagaaaagcatccttatttccattttaagtgagagctccaagaggtcatcaccttcccctcacctcctagctactgtatgcttgagtctcagcgtaagtcaggctgactcgaaatcccatgctagtaaaaaaactcgtggctcacacctgtaatcccaacactccgggaggccaaggtgggcagatcacttgaggtcaggagtttgagaccagcctagccaacatggtgaaaccccatctctactaaaaatacaaaaattagccaggcatggtggtgcacacctctagtcccagctactcaggaggctgaggcaggagaatcgcttgaacctgggaggctagaggttgcagtgagctgagattgcaccactgcactccagcctaggtgacagagtgagactctgtcaaacaaaaacaaaaacaacaattgggattaattcaaaggtcacaatgcagagaacaaacgtgatagctataaagatgagattttttagtgacatactactttctcttcctagggttcttataggattgaaagatgtagcaagtacatttattggaaaacaacctctgggggtgccaaagtcagtgtcccaccctgtcaccatgtcactgaacacagcgcccctgaagcggcgttgctcaacctgctcaattcttcctctttgtcataaggccattgatgagaaattagccaattaattcattgcaaatattgtcagagtcttatttgtcttaatgagacagtggatctctgagcggtatctccgtaggcctggagcttcgtgaccccttggtcatcactgtcaccggtgtgcgtgctccaccaggtggcagaaaaagaacacagcccggagctctaagtctgaggatctaggtgggttttggatagggaggaaagcacaattgtcttttaaaaataaaaatgtccctactaaaatatttgaatatacattattcatgtagaagaaaactaagagattttcttaatttagaaaacacatatctgtacctttttcactaattctcatctttcctttcctcgctcctccctctaaattaaagccagaggccgtgcaatcttcaggatggttttgtcatttatagcttgatttttttttcttagcttcagtctttgcaaccagccagagaaaatggtctaattaatgttctcatgccctctgatttctgttgtccttccttttggcaaatggcaaaagagtttcaggacggactacccctttcccatccccctctcactccccagtccccgctgttagcttccttcctccgatggctgtgacctctatagctggggccaggtagagttctttctgtgtggaaggtgggagttgcaatgagactcccaagacagctgaattttgatataatcaaaaatctattacctaagggtaggtttgtttgactttgacataccaagcttccaaaaattgtattcttaaattgtatcctaaaaggacatatgccttttacaacaaatctatattttagcggaactaaagctagttatttttaacataaagcatttcactagaagtttttatatcagaattttaataaaataaggaatcttccatggtggagtcaaggatctgttaggtgtttccatataagtatttttgtagacttggctactgcatgacattttcctggcatgacttctttttctagaattagttttgtctttatattttttagggtctaaagccaaaggcaaaattatctatatttatgtctattatctatctacctagctttctatctatctatacacacacatatacataatacacacttttaataatagtaataatatatttctaaaatgtagtctcatatccaataggattgttctgaaagacatatggacttttttctataaccgaaatcaatttgaagaaaaattggtcctatcactttattatgtaatgttggcaattaggggtctggcaaactcagaactgtaatagaatagaaactgctgggtgttcaaaggcatttttttacgtgactggccatgttctgtggatattgttgctctaactttgcttacctactcgtaattttcaggcaccaaacaaaactgtgaaaaaattgtgttcctttagaattgtagttgactttttaaagccatattctgtatctgtggaaataggaaactgagacatcacttccttctacctggaactgctctctaagtttatagactgagatccagaggagcattctgtttatttgggaagtagatatctaggtcgagaatgtacagtgcccagtgccagcctaatagcatcatgccaggcagtgacttagaccctgcagccacatagacctgaacttgaacccatcgtgctgctgacttctggttgtgtgaccttgagagttgttctacttccataggtcttaggatccatataagaagatcataataatagtgcccactttggcctggcatggtggctcatgcctgtaatcccagcactttgggaggccgaagcaggtggatcacctgaggtcaggagtttgagaccagcctggcctgttgcaaaaccccatctctactaaaaatacaaaattagctgggcatggtggcgggtacctgtaatcccagctactcaggaggctgaggcaggagaatcgtttgaacccaagaggcggaggttgcagtgagctgagattgtaccattgcactccagcctgggagacaaagcaagactccatctcaaaaaacaaaacaaaacaaaaaaattagtgcccacctcataggcttgttagaagaattaaatggaatggctgggtgtggtggctcacgcctgtaatcccagcactgtgggaggctgatgtgggtggatcacttgagttcgagaccagcctggccaacatggtgaaaccccatgtctactaaaaatacaaaacttggccgggcttagtgaggctgaggcacaagaatcacttaaacctgggagtcggaggttgcagtgagctgagattgtgccactgcactccagcctgggtgggagagcgagactccatctcaaaaaaagaattaagtggaatgatatatgcaaaacacccagcaaagaattttgcatctagtgagtgattagttaatattgtagtatgtacccaatatatatttgtagtcttataattaaatattatcagactttagtttctagccatcttgaaaatcttttctgttacaaatgaaggaataatataatcctaaaatcatacaattctctttaataatttttctaagctgaggcttgtttcatgacactcaggtaattataatgtctttgtaattttaatttccctcttaaaagaagtatctatggcctcaactgtctacaattctcaatactcaataattttttttatatcatctcattctgaccttctgcaattaactttccagcattcttgttttgcctccaatggaagcagaaaagatactgtgtcagcaaatacttattgaaatactgtctggagcaatgaaagcatggttgctatccttaagaaattaaaaatcttgttgcaaaggaaagatacagacttatataataaaatgttataaagtctgttaagtgagtaatttctttttttttttttttttttgagacagagtctcactctgttgcccaggctgaagtgcagtgatacgatctcagctcactgcaacctccgccccccaggttcaagcaattctcctgcctcagcctcctgagtagctgggactacaggcacccaccaccactcctggctaattttttgtatttttagtagagacggggtttcaccgtgttagctaggatggtctcgatctcctgacctcgtgatctgcccacctcggcctcccgaagtgctgggattacaggcgtgaagtgaggatttttaacactacccaccaaagaaggaggggagggttgaaggtgtcaccatcataaacagtctcaagaaggaagtttgacttgaagtgagcctgatagctgagtttttgtttgtttgtttctttactttttaatagatgacaggagggagatactccaggcagggtaaaacatgaaatgaacttgacctttgcatgagccaacacttcctagaattaatgaggtgccctgccaggctgctgctggagtgttcacgtgggactcagcatgggtaggcatagggttaggtaggctttaggaggtacctagagtgcagacaactgaaatactcagtgtttaaaacccagtagtattggtctttacaataagaacatagcaaccttttggagcagaagaggaatgtgatgaaaacagtaggcgcagattagttttgtgcttatgtatagcatacactgaagaaaaaggaagatcaaaattctggattcaattagcagccaggttggaatggtgggtcgggagctcagccaatgtagaaaccacactaattgtgattatgagtagctggtgttctcttggaaaatgaagacagatttcaagtgtttatattccatgtccctctaattaaatctgtggcagcctgggctccttgtgagttgagcctggtgccatcctgagaggtctctctaccatgagtggtctgtaggtagtgagttcaggagggcagcgatgagaattctcagcacccatgttggttagtgcattcctttccagccctttcttcctgtgtgtgagtctccagggcctggctgctgcacacacggagataggctttggctgtgcagagcaagctaccttcacagctgccggaagttacagaactaggattgtgtgtgtaaactggggaagcaccagtgtgaagcaaaaatgcagaagaaatcttaaaatggctttttttttttttttttttaagatacagagtctggctctgtcaccaggttgaagtgcagtggcgcgatctcggctcacttcaccctccacctcccaggttcaagcaattcttctaccgcagcctcctgagtaggtgtgactgcaggtgcacaccgccatgcctggctaatttcttttgcattttagtagatacgacgtttcactgtcttgctcagggtagtctcgaactcctgagctcaggcaatccacccgccttggcctcccaataaaatggcattttatgtgtctgtaccatggcattgaagaggggagaattccactgttacttgctttttttgttttgtttatttgttggtttttttttttttttttttgagaggaagtattgctctgtcgcccaggctggagtgcagtggtgtgatctctgctcactgcaagctccgcctcccaggttcacaccattcttctgcctcagcctccggagtagtagctgggactacaggcgcccaccaccacgcccggctaattttttgtatttttagtagagacggggtttcaccgtgttagccaggatggtctcgatctcctgacctcgtgacccgcccgcctcggcctcccaaagtgctgggattacaggcgtgagccactgcgcccggcctgttacttggttttatggattttcagaactgtgaacaactcatacatctgcctgtaagacttggtctcagccatttctccctccccttctcccttcccctcctgtcctccttctatccctccctcctgctgaaatccagacttctagtaaccatcaccaaaaaatgtggactttagagtcaaggagatctgggcgtaaatccccagtcttcgtttctacttgtgtagtcatgaaacagttcctttgctcctctgggcacacttactccatccatatattagttgcctaatgcatggggtttatggtgaagtttctgtgaaacactgtatgatgaggtgatgtctttaagggcctgctttggttcatagaaaatactgagggttgccaggcgcggtggttcacgcctgtaatcccagcactttgggatgccaaggcgggtggatcacaaagtcaggagatcaagaccagcctggctaacacggtgaaaccctgtctctactaaaaatacaaaaaattagccaggcatggtggtgggcacctgtagtcccagctacttgggaggctgaggcaggagaatggcgtgaacccgggaggtggagcttgcagtgagccgagactgtgccactgcactccagctcgggcggcagagtgagactccgtctcaaaaaaaaaaaaaaaaaagaaaatactgagggctctattcatggtggacaccaagaccttccataatatggccaaatctaattagccacccttcatcaaatttccctaaatttgggacagaaaataaatctcatactcactgttaactctgaccaattgacaatgacttcctggagctctacatttaaaaatagactaaaaccatgcccaggctctttaggaaagaatgccacaatcagtgagttttgcctctgaggtttctattctcccatccggctgtgtaagaatgaatcacatcacgcaatgtgtccagtcattgctcccaaacccggaatgtgtttctggttatccacacctctattgacttcattctcctccccaccacacgagccccctcccacacatgcgcactacagaaatgtcctggtcattgtgcctctcatactcaaatccttctgacccttcaagccacagcgtcaaaacctccttctctaaaaaaaacctgaatgctgagagtcaatactgcttcttatttcacgctagaatttatcgttttgttagatggctacttccattgttgtagatagaatttttctaaaggggatatttaggaatgctttccatatccatgtattgcttgacttctttctctccgtcattctaagttgtcagagagaggggttgggtgggaagggtgtggactctgcctgtaataccagtagctgttgcacagggtgacactgtgactttgaattgcaaaagtggcgaaagaggctgcaccaacaggtcttatgctctttccaggtgcaggtctcagataacaagctgaaggtagtcagtgactggaatgtcatcggccacctgcaaagggagtcattgcagctactcttttcagtggaatcatttagttccctcagggactttcttagaaagtctaaaagattttcaaacaaacaagtctctttgaaaatgaggtgaaaatgcccaggagtcctcatttggtcaggctccttgttcatcttaaactctacacccatgtccctggttcctgatactgggggaccccataaatgttggttaatcactggaggaaatgaattaaggaactaagccatgctgaggagcaagaatgtgtgtgctggggccccaccacaaatgggttaaataagagcctctgaagagggaacctcaggatggctttgaaggctacctgggtgattttggtgtccagctggggtcatctggcctgctcgcccctttacttgctgcccttgacaagtgacacccaggattgccgtggaagctgagaaataacacttctgtctgaatatgccagtaaagtttcctctcaggcattaatttccttgtccactcaagaaacttggagaaataagggtagatctcagattaaccatgttcttggggatttacttaatgatattcagtaaaggggttatagtatcaaagtctgcagcatggagatgaagcagagccggctcttccggggtctgtccacatcaaggggcaccagacgttggttgtgattgttcctgagcctggccaacctcacatgtgccctgggctccctctggtgagctccggtcttcaccttaaccgcgcatgtttgcattgcggggaatctgtgcttcagacagacacgccagatgttacaggtcactgcatctaagatggaaggtgttctgtttatttatttatgttttaattttggctgttgatcactttcttgtgctggtgaatcagcacgcgtgttgaaccagccattaatctcctgggagagagctgttgacatcctggagggtggcactcttcctgtttacagatgttaaagagaaaggcccatgggtgtctccctgggtggccaagcctggttcatgtgtgtgctgtgctgtgtgttccttcttccacacaatcactgagcctggccgggcacagtggctcacgcgtgtaatcccagcactttgggggaccgaggcgggcagatcacctgaggtcaggagttcgagaccagcctgaccaacatggtgaaaccccgtctctattaaaattaaaaaaaaaaaaaaaattagccgggcatggtggtgggtgcctgtaatcccagctacctgggaggcagagacaggagaatcgtttgaacccttgaacctgcgaggcagaggttacagtgagccgagattgtgccattgcactctagcctgggcaacaagagcaaaactctgtctaaaaaaaaaaaaaaatcactgagcccctcgcaagtgccaggcctgatgcgaagcactggggatggatagggaaaggccccacctgtcccttgctgtctagtttattttgttttgtttctacgtcacctcctctctcccctgtgctcctgcagagggttggacacaaataccccactgtgtctgcgctggggacattggcctaaatcaaacatctagggcagcctcagccaggaaagggcatcactcaaggagagggagcaggtcagtctgtctggatagtggtgggaagagcatacaccaacaccaactgtacgtatgtgatttcaagtttattgtggtacaatttacttctaataaaaatcacgctttcggccgggcgtggtggctcacatctgtaatcccagcactttcggaggccaaggtgggtggatcacaaggtcaagagatcaagaccatcctggccaacatggtgaaaccccatctctactaaaaatacaaaaattagctgggtgtggtttgggtgcacctatagtcccggccactagggaggctgaggcaggagaatcatttgaacccaggaggcagaggttgcagtgagccaagatcatgccactgcactccagcctggcaacagagcgagactccatcttaaaaaaaaaaaaaaaaatacactttttaaaggcatcgtttagtaaggtttgacaaataggtgcaatgaatgacataagctccccacaagcaagactcagggcagtcccacctgcccagagcatcctccatacccctccacccaggcgagcgctgccatgccatctatcccacacttttgccttttgccttttctggaatgtcatgttgagggggttgtacagtgtgttaccttctgcagctggcttccttagcataattgcttttgagattcacccgtgttgtgacaggtgtctgcattcatttgtttttcactgctgaggagtggtctgttgcatggatatcataatttgtttcttcattcaacatttcattgatatttgagtgtttctaattcggggctagtatgaataaaagtgctgtgcacatttgcacacagattttcatccaacgtgttttcctttctcttgggtgaatacctagatgtagaattcccagatcataagtaaatgcacctttaactagattctaaagtgcccaactgtcttccaaagtggctgcaccattaagaactctgcctttttcttaactcactaccccaggactgacttttttgaccccctgccctccgcccggtcactgtgtatggcaggtggaatccaccatgccctgggggtggttccacctgcagctgtggggagaagcatctgtgctcactgcacatagatctgtgccctcaatgccagcctgcacctgcctttctctacctggcacctggggcctcatgggggatggtgtccggcctgcaggagcagcagcctgactgtgccatctctcatctctccaaatgatctctctgtggaactttctaaatgacatatcagccgcgaagacaaataggaaataagaggcaggaggcaagacagacactccccatggagcggattccacgtggccctgggcactcacctcaggagtggttgagaaagcctggttcctgcttgctccatgaagtcctcactccttgaccagattttggagagaggaaggtttttcaataactgcccctcttggtagtcctcctaaggaagagcaaaagaaataaaacagattcaaaactgtgggcctgcgcagtgattcatgcctataatcccagcatttggggaggtcaacgtgggaggatctcttgagcccaggagtttgagaccagcctgggcaacatagcaagacacccatctctacaaaaatacaattaaaaaattagtcggatatggtggcacgtgcctgtgatcccagaaacttgggatgctgaagtgggagaatcgcatgagcccaggaggtcaaagttgcagtgagctctgattgcaccattgcactccagcctggacaacaaagcaagcaagaagagaggagaggagaggaaaggagtggagaggagggcagaggaggggaggggaggggactatgcatatcccagtagcctggctctgggctgggtctgtctgttgcttaaaggcttaaaaaaagagcacagagccatctgcacttggacatcctggtgacgtggcctaacttccgacattggggtcctgtaaaagaagataagccatggtgtttccttaatgagaaggccttaattccaaagtgagggctggcaaacccaacagcacagcactcagaggagaagacacagttgttgattgagtcgagctgtctggcttcccaggaccctcagctcagtcacagcacagcgttaccaggatgtcagacacccaagggcagtgctgacatgcagcctgccactgtggccacagcactcgggttaaaaagaaaccagataaaattcgtgtttctgcttgtccagactagaaattaattcaaacctggcctgtagcagctgtcttctctacatccaactggatggatgaaggccgtcctacctagtagagggaggttggaaggatgagaactgtctacaattaaccttttcattagcacagaaaatttagacaaccaaggtcccaatttctaatgtaaaggtcaatttcttacatctctgtgtacatcctaactgattcaccacaccattgcccgaaggtacatttctattggttttttgaaatgctaagaggagctctcaggcagtgttaatgtatgcactcacgacttcataggtaccagtactgcactagcttccagtatagcactaggtactagtactgcactagatactagcactgcactaggtactagcactgcactaggtaatagcactgcactaggtactgtggatttgaggggtcagaggggaaggaaaccattctgattgtcaaggaatttcctatatagttacagaaaccacattcattagagaatgagtaaattacctttgtgctcctattagactacataagaattgtacaatgtgatgtcctggggttacataagtatagttttaaatcaactatatctgcagcctgtgaaaaacctattccccttttttcctagttgcagttcactccccagttcgtctgcaccctacctcgatgagatctccccttccgtgggctaaacaaaaccccaagcagttagctgttaatgatacgagcaccatgccggagctagggccaaatgagtcagaagaatcctttgcagtgccgcggggccctaattgtgtcaggtattttgcccaaattagcatggctgaggatcggctgctggttctaaaatagtctcgaaggactgtctccaaattgcttcggcaacattactcattctcagcacgactctggtttccgccgtcccaatttacagatgggcagccgaaagggaaaggatgagatggctaaactgaaagtcacaaaggaaatcctgggccaacatcaccccttggggcttcctccagctgcggtctgtgcccccacagccccaggatgctgggcggttttctccaagaattggaaaccttttcccagggcatcctcacacaaagccccactctgaataacacgatgatttcaggcctttttctaatcataagcccccaaattagataagatcaacatgaaaggtctcaggtatcccttaagaatttaaaggaaggacagaaaaggttgagctctgtagtgcgtggaagaggagatggcatgatcaggatactgtcctgagaattagcagtaggatcttacagtgaaatagggggctcctccgcaggctcccaacacatcagctggtaattatgcccggcaccaggatactggggcaaggcagagccactggaacacatcctcgcctgcaccctgctctgctcattagccatagcatcaaaatcacttttgctccaaaggcgttttttttttcctatactgtacattcttttgtgctttctaatttattactttttttcccctacctgagctgttggagatttagtgttgaatggcttctctgtatttttctttagtctaattcattatcactaagtctgtggtttttttttttttttgtgatcaatatacacacttagattggtttaaaataatcccatggagagcctcattagtgtccttggataatagatgcagctctctgggagaagggagcgtttatcagggaccacagtgacagagcccacaagcacacctccctgtgtgtgtgttgaacatgctagaacatgcacatgtatgttgtcaggtcctcaggctgcatgaagctgctacatgtgcaccatgtccctgctgcgtccctgctgttcgttctgagcactgtgagagcctgaggcgtcagagtgcagctcattgagacccagacgccactagattctcagtcttctgcatgtttttcacacctcttatgtttactgaaactacatcttgagctgagtgtttgagcaatttgttctcaaggccaatatgggcaaactccctgagtcggagctgataccagcgaacggcttcagaaagtaaaaaacatgggaaagaggctgagaggaaagaacgctctgagtgggaagagaggagggagcacctgtctgaactggctccgttcacgtccattcattctttaaggaacttctctttgtccttcataaactacagtgttcccctgtctcccaggctggggtctcatggctcttgccacaggccaaaaagaaataagatttcctcttggcaacattttttgttctgtaatgggattttactgaaaggcaggaggaaaaagcccttgaggtgaccaaaaacttgtttttaacacatatgatgtaaggtaaaagctttaagaaggtaaacagagctgggcatggtggcacatgcctaacgccccaacagctcgggagaccaaggtaggaggatggcttgagaccaggaggttgaagctgcagagagctatgattgtgccaatctactccagcgacagcatgagaccttgtctctaaacatagatagatagattgacagattgattgataaatgatagatagatgatagataaatgatagatagatgatggatagatgattgataggtagatggatagatgacagatagacatatagctagatagatcaatccatggatgatagatagatagataatagataaataggtagatagataaatgatagatagatatagatagataataaatcaatccattaatggataggtgatagataatagactgattgattgatagatgatagactgattggttgagagatgattgatagatagaaaacaaacctgttttttagtttcttcacagagtggcacaagcatcatctcattccattttagaacattccacccccacctccaaattatgctttagcatttactgaaccccccaaactcatttctgcttccccgtcatgtcttcatttcacagagtttgttgagcactgatcttgatattaggtttacagtgacagagaagacacaagctccctttaattacaaagattccatttccgtgtgactgtgtttactacggtcagccctccatatccatgggttctgtatctggagattcaagcaacctccctcaggtcaaatacctggaaaaaaaaaaaaaaggatggttgcatctgtactgaatttgtacagactttcttccttgtcattattccctaaatgatacagtatcacagctgtttacattagcaattacattgaattagggattataagtagtctagaggtggcttaaaggatacgggaggatgtgcttacattatatgcaaataccacacattttatatcaaggacttgagcatctgtggattttggtatctgcaggggtgtcccggaaccaatcttccatggataccaaggatgactgtgctcatatttgtgatcatatatgttaaaagcatctctctgaattagagagggaatctgtcacatctgtcactaatattttagaacaggccaccccgatccatctttagtgagtggagcatctctgcctgaaaacatctatatccaaatctttctttctttctttctttctttctttttttgatacagcgtctcgccctattgcccaggctggagtgcagtgacgtgatctcggctcactgcaacctctgcctcccaggttcaggcgattctcctgcctcagcctcctgagtagctgggattacaggcgcatgccaccacacccagctaatttttttatttttagtagagacagggttccaccatgttggtcaggctggtctcaactcctgaccttctctgatcctcctgccttggcgtcccaaagtgctgggattacaagcgtgagccaccgtgcccggcccaagtgtttcataaggaaaggaacttctgatacaccatagagtgtctgggaaaattttaaaattactaatggaatatgtgctcaaatattggcccctgaggaagcatttatgcccatgaggattcctgccctcaaaaatttaactgtgtcatttagatatacacaaaaaatgaatatatatgaatatttaaatgctacatgagtttaaggtattactgaccctagccactcagtgactggagattagactagacccacttattaatccacccatccactaattaattattcaattaatatttattgagcatctaccatgtgtcaggttctcttttagaactgggagtgtatcacacatttttatattaccttccatgctaagtacataggaagactcagaaaacacatatgattagacactgagaatgctattttttggtgcctttggtgataaaacgttaggatccaggaaagcaattgttaggtttgccccctcactcccaaatgctgttgctgttataaagcttttcagtccctcaaaatcacttaggaagataaatgagtaaacttcgctgcactaatttactcttcaaatttcagcatgatttatgccctgttttgtttattgctcaaataagcaaaatcagaatggattgtgtgattattttgaaatatagttaagtccagatcactttattcttccttcatcatttttttttaactaatccatctctacccaggagatgattcatcacacagctgccagggctgctttaaaataaaggaataaataagaagaaagaaagaaaagtgaaggagggccactacatagccccaaagtaaatcactgtacaccttcctgcattctctttctctctgcctgtcttcctctctgtcacacacacacctctaagaatttcagcagaatccgggacatgctggaaaatcatttgatgcgaggaattggggcttaagccaagtgtgctgccgtggcctaaatgtgcaaggtggggccagggacttctcccgcaggaagccggctcaggccagaagcccagggggtgggcagggcaggggtcatctcccccagggtttgcctctgccttgctctctgagggtctccactttgtcccttcaggctttgactaaatcttcacgcagacactggtcagctacctggccctgagcaagtcgctttgggccttggtggaactgggaaatgaagggacattcgcttcctagggctgcggtgagaaatcgccacaaactgcgtggcttaaaacaacagaaattgcccctcccagttctgaaggccagagatgtggacacagttgaaatgacagtgacagagaagggtgtggaggagaggagcggggctgcggtcacgcccaggacactggattttaaagggtgggcagagaagatcccacagagacgaggaccagagagggaggtggggggagagctgggagaaggggcagtcgagagggaggtggggggagagctgggagaaggggcagtcgagagggaggtggggggagagctgggagaaggggcagtcgagagggaggtcgggggagagctgggagaaggggcagtcgagagggaggtcgggggagagctgggagaaggggcagtcgagagggaggtggggggagagctgggagaaggggcagtcgagagggaggtcgggggagagctgggagaaggggcagtcctgaacatcaagacagagaagcagcagccgcagcatgtgcagggagagaccacccaggcccagcacggggaggccacggactttggcacctcgatggacacagaagatcttcagagaagcaatttcagctttaaaaatggatggaagccatattgcagtgggttagggacaggagagaaggtcagaaagtggccctcagatttggaccactcactggattggaccaagaccggtaggcgttgggctgatgatgggttagaggctgcgtggggaggaggtgctcatgggtgggtggagaggctgcgtgggaggaggtgcccagagatgggtgagaggctgcgtgggaggaggtactcatgtgtgggtggagaggctgcgtgggaggaggtgcccacagacgggtggagaggctgtgtgggaggaggtgcccagtgatgggtggagaagctgcgtgggaggaggtgctcatgggtgggtggagaggatgcgtgggaggaggtgctcatgggtgggtggagaggctgtgtgggaggaggtgcccagagatgggtggagaggctgcgtgggaggaggtgcccagagatgagtggagaggctgcgtgggaggaggtgctcatgggtgggtggagaggctgcgtgggaggaggtgctcatgggtgggtggagaggctgcgtgggaggaggtgctcatgggtgggtggagaggctgcgtgggaggagatgctcgagtgggtggagaggctgcgtgggaggaggtgctcatgggtgggtggagaggctgcgtgggaggaggtgctcatgggtgggtggagaggctgcgtgggaggagatgctcgagtgggtggagaggctgcgtgggaggaggtgctcatgggtgggtggagaggctgcgtgggaggaggtgctcatgggtgggtggagaggctgcgtgggaggagatgctcgagtgggtggagaggctgcgttggaggaggtgctcatgggtgggtggagaggctgcgtgggaggaggtgctcatgggtgggtggagaggctgcgtgggaggagatgctcgagtgggtggagaggctgcgtgggaggaggtgctcatgggtgggtggagaggctgcgtgggaggaggtgctcatgggtgggtggagaggctgcgtgggaggaggtgctcatgggtgggtggagaggctgcgtgggaggaggtgctcatgggtgggtggagaggctgcgtgggaggaggtgctcatgggtgggtggagaggctgcgtgggaggaggtgctcataggtgggtggagaggctacgtgggaggaggtgcccagagatgggtggagaaactgtgtaggaggaggtcctagttgtctgcatttcctttgggagaacagccttagggaaaggaaagagactggtggagcaaaatccgagaggctgaggcagcataaaagtctctcctccatggaaaaacttggagccaaaagcgcacattcctcagtgaaagacgccaacctgaaaggctacactttgtatgattccaactatgtgacattcaggaaaaggcagacttatgggggccttaagcagatctgtgcttgccagggtttggtggggtgggaaggatgaatcggccgagcacacagaggtttggagacccaaaagacgtctgtatgatcctgcaatggcaggtgcaagacggatggatttgtcacaactcacagaacacacaggcaaagggtgaaccctaatgtcagctgtgggacttagttaataatgtttcaatattggtttatcaattataccacatgcaccacactaatgcaagatgtttgtaatttggaaaactgagggcaggggaagaaggaggatatgggaactctctgtagttctgttcagtttttctctaaacatgaaactgctctaaaaatataaagcttattaattaaaaatagtaataaataagaaaagtttaccaggaaggtaaatggaaagtatttgatagttctaggatggaacaaaaaaggaggtacaggaggaagtgctggccgagacggaaaggggatgcctggtcattggagactgagaggagggaggagcaccaggtacttcagtgtgtccgggaggaagccttctgcagggaagcagggaccctgggccaagctggagcctcccagaggcaaaggctgagagtgaggctgatggagagggaagccctgtaggcaaaagggagagggagtgggtgtgggagggagagccttcagtgctcctctgtctgccccacacctccttgtccctttagagtaagggggcagtaggtacaagagagatgtaaggagagcaggaaagattggaattggcattgaggacagacgtgtctcacactctgggtggttgtgatgatgggaatggttagtggtcagctgaggttggagacattgcatttgtcattcccaaaggtcattctcaaaggtcaaggtgttgatgtggaggaggtagattcggcataaaaccaagttgggcattcgctagtctgggcagagaaggagttgtgtgaggaaagccattcagtaggggattggagcagaggatgaatgaccaccaagtggctcatccaaaagggaattcccacagtggagaagaagttggaaaagtcactctcaaatcctcttttaacttgaaaggaaaagaatctgataccctgcaagaaatcaaattccaatgcaaaaatataggttcctttcataggaacagatgtggagaatatgattgaggattgagaccctaaacccagtttcccacctgacacagggattgagcccatttgtttttgctacagagttccatagagtaaacttgtcccaatatctgacatattactgggcctttaaaagaaattacatatagatagttgttgtaataacattttatcaatattcaaccattgatccttcctaattaagtgaagggttaagggaacacacatatacatctacacattcacatatatacgttgtgtgtattatattgcatggtcaaattatttaccagtttatcaatgaataaaccagcatttatggaatatctgctaggaagctctgtgctatctattttcacatacaatagattattgcgtccaaccctacgaggcaaacatgattattttcattttatacacaggaaacaaacttggatccagttactctattgcctcaagccctttgcttctagtggcagagttcagaattaaatttacaccttcttggaattatctccaccacttcacaacttcctccccacgaggaacatcctggtgtttttgaagacagattgccacgactcacttctggcatcttggagtcacttgtttaacttatagagactgagaaagattgagaggttgagagagtcactagctagcaaaaagaaaacaattacctctttggactatggtagagtttataaattaatagccattgtttctcttgattttcatgaccattctgtaggacgagggtagctattgtccccataggagaaaataagacgcagagagttgctgaaggccgtgtgatccacacgtcataaggttgggactaggatgcaaacttttgattcctggtgtggatctatggaaactcctgtaacgtgttggtggtgagggaagggaaatgcatcttagcttatggaagaagtaaaggactccttgagcacaggtgagccaggtaataaaagtggaattagtgaatcaccatcgcatattggccctagtgttcatgcagtgatggtgaatcaccatggcatattggccgtagtgttcatatagtcatggtgaatcacgatggcgtattggccgtagtgttcacgcagtcatggtgaatcaccatggcgtattggccgtagtgttcacgcagtcatggtgaatcaccatggcgtattggccgtagtgttcatatagtcatggtgaatcaccatggcgtattggccgtagtgttcatatagtcatggtgaatcaccatggcgtattggccctagtgttcatgcagtcatgatgaatcaccatggcatattggccgtagtgttcatatagtcatggtgaatcaccatggcatattggcgctagtgttcatatagtcatggtgaatcaccatggcgtatcggccgtagtgttcatatagtcatggtgaatcaccatggcatattggccgtagtgttcatatactcatggtgaatcaccatggcgtattggccgtagtattcatatagtcatggtgaatcaccatggcatattggcgctagtattcatatagtcatggtgaatcaccatggcgtattggccgtagtgttcctatagtcatggtgaatcaccatggcgtattggcgctagtattcatatagtcatggtgaatcaccatggcgtattggccgtagtgttcatatagtcatggtgaatcaccatggcgtattggcgctagtattcatatagtcatggtgaatcaccatggcgtattggccgtagtattcatatagtcatggtgaatcaccatggcatattggcgctagtattcatatagtcatggtgaatcaccatggcatattggcgctagtattcatatagtcatggtgaatcaccatggcgtattggccgtagtgttcatatagtcatggtgaatcaccatggcgtattggcgctagtattcatatagtcatggtgaatcaccatggcgtattggccgtagtgttcatatagtcatggtgaatcaccatggcgtattggcgctagtattcatatagtcatggtgaatcaccatggcgtattggccgtagtgttcatatagtcatggtgaatcaccatggcgtattggcgctagtattcatatagtcatggtgaatcaccatggcgtattggccgtagtgttcatatagtcatggtgaatcaccatggcgtattggcgctagtattcatatagtcatggtgaatcaccatggcgtattggccgtagtgttcatatagtcatggtgaatcaccatggcgtattggcgctagtattcatatagtcatggtgaatcaccatggcgtattggccgtagtgttcatatagtcatggtgaatcaccatggcgtattggcgctagtattcatatagtcatggtgaatcaccatggcgtattggccgtagtgttcatatagtcatggtgaatcaccatggcgtattggccgtagtattcatatagtcatggtgaatcaccatggcatattggcgctagtattcatatagtcatggtgaatcaccatggcatattggccgtagtgttcatatagtcatggtgaatcaccatggcgtgttggccctagtgttcacgcagtcatggtgaatcaccatggcgtgttggccctagtgttcacgcagtcatggtgaatcaccatggcatattggccatagtgttcatatagtcatggtgaatcaccatggcatattggccgtagtgttcacgcagtcatggtgaatcaccatggcgtattggcggtagtgttcatatagtcatggtgaatcagcatggtgtattggcgctagtgttcatatagtcatggtgaatcaccatggcatattggccatagtgttcatatagtcatggtgaatcaccatggcgtattggccatagtgttcatagagtcatggtgaatcaccatggcatattggcgctagtattcatatagtcatggtgaatcaccatggcatattggccgtagtgttcatatagtcatggtgaatcactgtggcatattggccgtagcgttcacgcagtcatggtgaatcaccatggcgtattagccatagtgttcatatagtcatggtgaatcagcatggcatattggcgctagtgttcatatagtcatggtgaatcaccatggcatattggccctagtgttcacgcagtcatggtgaatcaccatggcgtattggccctagtgttcatatagtcatgtgaatcaccatggcgtatcggctgtagtgttcatatagtcatggtgaatcaccatggcgtatcagccgtagtgttcatatagtcatggtgaatcaccatggcgtatcggccgtagtgttcatatagtcatggtgaatcaccatggcgtatcagccgtagtgttcatatagtcatggtgaatcaccatggcgtatcggccgtagtgttcatatagtcatggtgaatcaccatggcgtatcggccatagtgttcatatagtcatggtgaatcaccatggcgtattgggcgtagtgttcatatagtcatggtgaatcaccatggcatattggccgtagtgttcatatagtcatggtgaatcaccatggcgtattggccatagtgttcatgtagtcaagatgaatcaccatggtgtattggcgctagtattcatataatcatgatgaatcaccatagcgtattggccatagtgttcatatagtcatggtgaatcaccatggcatattcgccgtagtgttcatatagtcatggtgaatcaccatggcgtatcggccgtagtgttcatatagtcatggtgaatcaccatggtgtgttggccctagtgttcacgcagtcatggtgaatcaccatggcgtgttggccctagtgttcacgcagtcatggtgaatcaccatggtatattggccatagcgttcatatagtcatggtgaatcaccatggcatattggccgtagtgttcacgcagtcatggtgaatcaccatggcgtattggcggtagtgttcatatagtcatggtgaatcagcatggtgtattggcgcttgtgttcatatagtcatggtgaatcaccatggcgtattggccgtagtgttcatatagtcatggtgaatcaccatggcgtattggccatagtgttcatagagtcatggtgaatcaccatggcgtattggccatagtgttcatgtagtcaagatgaatcaccatggcgtattggcgctagtattcatatagtcatgatgaatcaccatagcgtattggccatagtgttcatatagtcatggtgaatcaccatggcatattctccgtagtgttcatatagtcatggtgaatcaccatggcgtatcggccgtagtgttcatatagtcatggtgaatcaccatggtgtgttggccctagtgttcacgcagtcatggtgaatcaccatggcgtgttggccctagtgttcacgcagtcatggtgaatcaccatggcatattggccatagcgttcatatagtcatggtgaatcaccatggcatatcggccgtagtgttcatatagtcatggtgaatcaccatggcgtatcggccgtagtgttcatatagtcatggtgaatcaccatggcgtatcggccatagtgttcatatagtcatggtgaatcaccatggcgtattgggcgtagtattcatatagtcatggtgaatcaccatggcgtattggccgtagtgttcatatagtcatggtgaatcaccatggcgtattggccatagtgttcatgtagtcaagatgaatcaccatggcgtattggcgctagtattcatatagtcatgatgaatcaccatagcgtattggccatagtgttcatatagtcatggtgaatcaccatggcatatcggccgtagtgttcatatagtcatggtgaatcaccatggcgtatcggccgtagtgttcatatagtcatggtgaatcaccatggcgtattggccgtagtgttcatatagtcatggtgaatcactatggcatattggcgctagtgttcataaagtcattgtgaatcaccatggcttgttggccctagtgttcacgcgatcatggtgaatcaccatggcgtattggccctagtgttcatgcagtcttgcaaggcactgcatattatttccagttagcatttatgggaatttacatttgtcgtatcaaagaaaagttaatcccctgctgtttctgaatatcttagatacctactgaaaatcataatctaacaaactgaatttcaatattaagtaaggcaatggagtttaagtctttctgatgtcccactctgccctctgtgcttagaaaattccaaataaacacaggtcaagtgaatttgttaggcttgtctctaaactttcaaaaggatctttgctgagagccacctctcgaacctacctttatttactaatttatttgtttgttcataggcacataatgagggcctgtgctgtgctccatatggaattctttttttttttttttcagtttttaaaatcaagatcacagtatgttgggagggcaattatctgacttttcattcctatttaggataatttttaaagccaatgagatataagctatgaaattctttttaaaaactttttattttgaataattgtagacacagaaaagttgcaaaagtagtgcaaaaaaatctcccatatttctcatgtcaccactcctagtgatagcatattgtataactttggtataatgatcaagaataggaaattaacatgggtgccatattgttaactcatctacaggcctcatttgaattctaccaatttttctaccaattttctacctgtgtcccaggaccccatgctgcctttagatgttctttcttcttagcaccctccagtctataacatttcctccatttctccttgtctttcatgaccttgcacttttgaggaggactggtcagttatgttgtagtgtccctcaatttgggtttttcccagtgttttctcatgattggagtaaggttctgcattttgggtaaaaaatatcacataaatgattatttgtccttcccattgcattatatccaatgggctccagtgatgttggccttggtcatttgcttaagtggctgtctgccaggtttccactgtaaatttgatgatttgatttatttaattatttatatcagtaaagactcatgggtatttattttattctatgggttaatccagtactaacattaatttttgttgttgttgatcaaactgttctagtatgagtcattagaaactcctttaggttagctttcatgttctctcaataaacccctatttttttagtattccattgctttctggtttcctaaaatattcctgactcattctgtattttccctgccccagcccagatacaattgctcctcccagaagccctattttcttttactgggtgatggtatttagacaccaagatctgggtgctaactgtgctcattgctactggggtgtcattgtttctaggccttctcagtggacagacgcaggacatatttgtatgtatactaacccatggacacacacatatctatattttggatctatctgtgtacatagagattaaaaaccatgagtttatacagatacctctgatttcaaacttcacagtttattttagtgttccccttttccttataacgttttttttcaacagtgaaaaacctggctttcattatctccaatatatttacatatttgtcccattctagcatgcacacagtctcaaaattgatcctccaaacccctgggagaaacaaatttactcacggaactacagagaatcttccttctctcagcagtcccatctttccaccctatttccacctataccctataggtaatcaatctggttcctggtttctgcttcctacatttcctttttcacaaaagactcgattcatatatattctcatatccctttcttctatgatatataattatatcatactatatacatacatatatgtgtgtatatatatatatatatacacatatacatacatacatacatacatacatactataacacatactcttgggctttgttaactctgacatggaaatcactccatatctgtttatagagttattcattctctcttacacctgcaccctacttcattgtattgggggggtatagttttggggggttttataaattgacaaatgataattatatatatttacagggtacaatatgatattttgttatatgtatacattatgaaattattaaatcaagctaattaacatctctatcacctcatatacttatcttttttcattgtggtataatagttaacatctattctcttatctattttgaaacatgcattacattcttattaactataatcaccatactctgcaacagatctcaaaaacttattcctcctgtctaactgaaactttgtatctttttatcagcacccccccaatccctcccactcccagcctctggtaaccactactactctactcactgctcaatactattcagccttaaaaaagaaggatgtaccgtcatttattcaaccacatattgtttccaatatttgcaactacaaataaaactgcaataaatacaaacttgtgcacatgtatttgtgcattgtttgaggtgaattctctaggagtctagaagtggaagtgttgggctgaaagttaagtgtgtactttattaggtattgtcagatgtctctctgaaatgattgcaccagcttgcttcccgacaagcaagtctgagagtgcctgtttccctacagtctccccagcaccatgtgtcatacttttttcttctttttccaagtctcataggtgagaaatgatatctcaattaattttaattcctacttccttaatttcatatgtatttgagtacctttcatatgtttgattgagggccatttttatgtctttttgtgaattgtctgttcatgtctttttctcatatttttatcttttttttttataaccacatttttcaaagtattttgtatgttagggatattagccatgtgttgtaaatacttttctcctggtttgtaagatgtcttttgtttatgatgcatctgtcatgcaaaagttttatgtttttatgtagtccaacttattaatcttaatttctggctcctgaattttgagtcatcaaagcttttctctacaccagggttcaagaggaattaacctatgcttatgagaatactttgaaacatcataacatacaaatgttggctgggcacagtggctcacgcctgtaattccagcactttgggaggccgaggcagacggattccctgaggtcaggagttccagcctggctaacatggtgaaactctgtctctactaaaaatacaaaaattcgccaggcgtcgtggcaggtgcctataatcccagctacttgggaggctgaggcaggagaatcacttgaacctaggaagcagaggttgcagtgagctgaggtctgccactgcactccagcctgagcgatagagcaagactccttctcaaaacaaaacaaaacaaaaccacgcaatgttaaaaactcatctattaacagaacctgcaatattaggactcgcttgcatcttccgatcactgggcagctgccttcccagctggtttctaagcggcaatgtcttctctgaattggcatcgtcactctaccctcaggcttcctggcttctccaaacccagacacttcatctaaaactacctggggcattctagactctctagcctcccccatctgtctttactctaaatgtagtccttgtttttcctggtagttttattcagccgttgcttttgtattttctattgattccagtccaccatgtccttagccccttcaccttccttcccttcctgcctcatctcctttgttcatgcaacccctgaagtgcagcatcctccctttccaaaggccattcaaccatttctttctacagatgagtgggtgcattcccagctatgtgtatattttatatatatatatatatatataatatacacatttttttttcaagacagagtttcgctctgtcacccaggctacagtgtagtggcatgatctccgctcactgcaagctctgcctcccgggttcacgccattctcctgcctcagcctcccaagtagctgggactacaggcacccgccaccgcgcccgactaattttttatatttttagtagggatggggtttcaccgtgttagccaggatggtctcgatctcctgacctcgtgatcgaccgcctcagcctcccaaagtgctgggattacaagcgtgagccaccgcgctcagccccacataagaaattatagctaagtgatagggcgcttacctgacagagcccagcagactcagcagaacacagatatcattcttcacgtggaggggtgtcatccaaaagaaacatgaaaatgaatcttttctacacgttggagacagcagtagctacaaaatatactgaaatatttaatacttataaaatgttagcacttttcatttttcccaccatgacctttactcactataacctttaagtacttagagaggtttttgttgtggtggtattggtatttaatcagtacattaaggataaaaaatataaggaggtttgaaaggaaatacatctttcaatttatccccttcctccctctctctctcgacttgtatctgtcaacacaaaccaacacaaaacctgatgccaccaggtttgtaaggtcataatgacctgcgttatacctagaaaaaattatcttctaggagaaccaaagatggagatacaaattgtggaggtagatcactgcatggttctgcattttaatttttaactttgactgttctggagatttaagaagttgatccaaagacctcactgcatgtcctctcttaatgagtatttactatttgggttaagcaatgatggacctatttcagcttcatataaattatatacatctgaagaaacctaatagagactaaatgagacatattacttagtaacacaagagacaagctcttgaaatggataccatggaaggagaaaggagttaagttataggtaggggataaaattgcagcagcttaaattcttggttcccaacattttgctttgtttttgtttgtttgttcaattttcagggatcctcaaagtctggacccaccagaagtcagcaatgcaaaacttcagtatgcaggatggggccctaaaggccaacagctggtaagccaatcaagttcagtaactatacttgggttttgaggaagtttctgttttctaagctgaatggatctcactgtactcagcctgtacatggtgttgtgtgtgtgtgtgtgtgtgtgtgtgtgtaaattaaaatctggagaggtacaccagggtgtctgaatatgtaaaagggtcatttctttttagatagcaaattctcctaaaattggaacagcatgtgcttggttcctacatctgacatggttaaagtggtgcctaactgtagctgtgtctatggactccagatgaatcatgagctcaaagagatcaacttcattaaaagaactgcagatgagaatgatccgaatgattttgtcatctaaagatgctctgggaactcagacttcttcctgtggagggtttttttttgttttttgtttgtttgtttcttttgagatggagttttgctctcgttgcccaggctggggtgcagtggcacgatctcagctcactgcaacctccacctcctgtgttcaagcgattctcctgcctcagcctccccagtagctgggatcacaggcgtactccaccacacccgactaatttttgtatatttagtagagacagggtttcactatgttggccaggctggtctcaaactcctgacctcaggcaatccacccgcctcagcctcccaaagtgctggcattacaggcgtgagctaccgtgcccagcctctgcggagggttttttaagcaagtagatttgctggccctgatggagccaggccagtcccgtcaacatgcaaaaccccccgtggtcattgcagccttctcggtttctatcagctatcttcatggattccttctcaaattggcaaaactgctgggtttctgtgaatgggaaggacagtgcagagaaaaaggccctgaacactatttctaagatgagggctcccaccctggttctcactgccgagctggccttggacagcacctcccgctgtcaggctgtaggcagcagcccagccatgtagtgaagaatttggataatacggtccttcaggtttgttccaactctagccttgcgtttgactaaaacttggttatatttgtccattctgggtaacatttttttaagacattgtattgccacgtgcagaaagtccctcaggtttgaaggtcagatgacatggttgctgttttcaagtcaccattttcttctgcctctttaagctgattacctaagcctgcatttgtaaagctcctttttcctaaaatagcacaaaaaatgatcgtatctaaaagctcccacagaattgtatcggataggctgtcatctatcttacaaatgaaaatagtcttatttctccccatagtacaatcacattttcttggttatatattaattccactgccttgaattggtttgaaaaagcaagaagatcgaggcggtgaaactattaatattttagctattattaacatgtctctaatgctaaaactgataacagaggttttgaaaagcatatgtaactgatcaaaatcacagggtgacaggaggaagtgaggcagctgagagctgaccttgaccgaggaacaccaatccatcagttcagtcacaacaaagagacaaaatttgtcttttctcaaaggcattaactcttacacagggaaaaaaatgcaatttgataagagattgtagaagatctaagttttcaggactgatgcgcaactgaatctctaatagttgactttaaaaccctctgaaagtctgtgattgaagagattttcaatatccatcaaatcatctgtgaaagtggccattacacctccatagagagctctccctgcctgctgcggatccattacaagccagtacccacagctctgcacctggcctcatcaccccactacagggagaaggatgggaatgtgtaaccttactgagtgatcattgtccagcctttttatagtagtcaggagaagaccatcataatgtgaccacatgtcaaggtctctttccaccatacctgcggcctcgcttcttatcacccagcggctgtaactcagtgtgtggactcctgcctcattgtctgcacatgcaaataaaccgggtcccgtagtagagttggtacttgtcctgcctctgggaacagcttgtaacataaaggaaatttaacccacaactgtaaaaggagttgctgtgcatgcatatgtgtgtgtgtgtgcgtgtgcatgcacacactttagaattaagtctataattgtcctcttgaacaactgaccttcactcatgtcatgctccgttggagatgaggaggggataagtgattatagaagttatcttgtttaacctcttacagaataagtagcaacaaaacaaagtaaatgacaacttctcagagaaggcttcctgacacctcccccaacacacacatgcacacacacacacacacacacacaatggtagctagccatcctggggcttcaggtttcaccgtgcaatctcccagcacacatgatctcttgttgcctgtagacatgtctctctccttggttaggtggtgatatggtgtggctctgtgtccccacacaaatctcacctttgaattattataatccccatgtgtcaatggtgggaccagatggagataattgaatcatgggggcagtttcccccatgctcttctagtgatagtgagttctcacgagatctgatggtttccccctttgctcgacactcactctgtcttctgctgccctgtgaagaggtgccttctgccgtgattgtaagtctcctgaggcctccccagcaatgcagaactgtgagtcaattaaacctctttcttgtataaatgactcagtctcaaatatttcttcatagcagcatgagaacaaactaatacaggtaccctgagtccacacagtgagactgtttcatcttcgtattctaacacacccagcacagtgtctggtgcccagtacacatttgttgaggtaaaagatgaaagcacaaacagattgattaattcattagttaatacatttttgtggtttcaaaccacttcagcatgaagaattggatggtggcaaatagccagcatctatgaatatgttctaggacagtactagaggtgacagaaatttgacttcctttctgcttcaaagaaatgaatgttcaggtaagtaataactgttaatacttgagtttagtaccaaaggtgctatatacttgtggaacttttgagtttttaaatccatttgacctttaagagcgttatgatacatgcatgtactgagcttaagacgcaatatagctcattgttgagtgagtaccctatgtgctggagcaggggccgccttcttctgcagaaggtcagatagcacatgtttcagtctttgcaaacagatagtttctagcacaatgactcatctcccttactgcagcatggaagcagctgcagacagtatagacaagatgggcatggctgtgttccaataaagctatacttcccaacacaggtggcttggcctatgggttatagtttgctgacccctgttttaggggatcatatgctgtcttggttgttctcatggggaaagcctgaccccagagccaccacctcatcacaggtactccccacacctgctccgtctgcacagaaaattcacaactcaagagcaggccttgcaagccctaacctattaagtgatgccaagcaacacacccctcattgccattttattttaaaaagtaaatattgctccctaaagtcaacctactctaattataatgagtcagattgaagtgagtaattctcctttgggagcagagaacacagctgcagttgaggtttgcaaagagctttgggaacatgtagcctcctgtgctgactgatttcagtgatgcctttgggtctggagcccctatatcacaggtgatgacccagggaaccagggatgggtgagggcatcttttcccagtgcctcgatgtggttgccaattagctcttaccttttagagtaagtgttgtgagacccatagaacatttctccggtagtaatgactgcagggggagtggcctgtgtgttgttagtggagtgggtgggaggaggcccccaggctgccagaagccacttctgtgatgatgctggtctggggctggagtttatgacaaatgacaagattgcttccaaacgtttgctgaggacccaggatgtgatctaggaaatagacttggccagattaaataggattaaatgagaaatcctaggtaaaatgttaacacagtgtctctcctttgcttcctcttcctccaaactggagtggtcagtcgggaaacataaacgttcaaaacatatgctgtttcaacgtatttctctgtaccacttctttcctcattgtgtcctcttcagatgaatctgcctgaactgagatttcctccatgtttctttcttttttttttttttaactggaatctccctctgtcacccaggccggagtgaatgttgcgatctctgctcactccaacctccacctcctgggttcaagcaattttcctgcctcagcctcccaagtagctgggactacaggtgtgtgccaccatacgtggctaatttttgtgtttttagcagagatggggtttcaccgttttggccaagctggtcttgaacccctgacctcaagtgatccacccacctcggcctcccaaagtgctgggattataagcatgagccactctgcccggccatccatgtttcttttctttgatcttttcatgaagtcctgcccccgaccatgtgtttgtctgtttatgggaggttttgtttctgctgacctagaatgtgattagttgtctggtttaggaatgtccacatatttcctgatatggtatttctattagagacatttcctggaagcacacagactttgaggcagccgcggtggccttccttgttcttggcacatgcacttggagttgaagctgcctcagggtgcatttgctggttgatctgcaaggggagggagggcatgtgaatttggtgcatcatcacgttttcctttggaaacaagtgccatggaaattttcccaagaaagactgtgcagcattaggcaacattaagaattcaaagccggaatctttgctggtacactcggaagatcagagacaaagtgaatgggtctctctttggttggcttgctaccatgatagtgataaatgaagagctttgaatgggaaatttaatgagtccattgggaagtcttcaacgcagagagcgtcaaaatgtgacagatgaagagcagtggagtagttagccgggaaacctgctggaactggggagagagctgtccccaagagatagcgttccccaaaggagcaggtgcaattacaaacaccatggagggaaactaaggaattctcacagccatgcttcacagcttagaaggaaaggccaacttcctcatcatctccagaccaagagaggctgaggggtggtgaatatcagtgagcaactgtcctgtgtcagtcaggagaaaaacatgtttatcaaaatgggagatttgagtcagactttaagaagaattgccttgattatatggcattttagatcctggaatagttttccacagaaggtcacagaatagtttatcggagaacgtcaataaatccgcatttaaattgtgctgtgttttactgcatgttctcactcataggtgggaattgaacaatgagaacacatggacacagggcagggaacgtccacaccggggcctgtccgggggcggggggctaggggagggatagcattaggagaaatacctaatgtaaatgacaggttgatgggtgcagcaagccaacatagcacatgtatacctatgtaacaaacctacacgttgtgaacatgtaccttagaacttaaagtataataaagaaaaaaagaaaaaaaattgtgctgtgttttaatggttaggatggcagctcccttggtgaagtcttaggagcaggtagactggactcccaaagatgttcccagccctagggctctctggaatggcacatgtggccagcgattgccatggtcacaagctagcttagtgcacgggaccctgcaggccggtcctgccgtgcatgtactttcctgtcattctcttatgcactcgtttgtttacggattcaatcaactcttcttgaatacttcctgtgttctggatactgcctgatcccggatgcagaagaaggacatggtccctttcctcactagcttctgcttctgatggcacattcacctattggcacattcactcgctctccccaaccgcgaatgctgcccgttgccctgctctggcacggtcactctcataactgtccccgtctgttcacactgcccaagctttcctctcctgtccacagcaggggctgtcacactatgtatttgatattcttctcatttttcaccaagatccttagatcctcaagtcttaacaaagtgatgcccctgaaaacaaagccatccagacaggcctcatcgcctaaggggtcattccgtacttgcttgatacagggcccatgaggccaatccagctctgagaaaaacttctctccaggggcggggacatggccatggggtgtgctgtctggaggtccagctgtccttacctcctacacaggtgttccgggctacagccttgcagcatgctgtctggaggtccagctgtcctaaccatgtgacctcctacacaggtgttccgggctacagccttgcagcgtgctgtctggaggtccagctgcccttccccatgtgacctgctacacaggtgttccgggctgcggccatggggcgtgctgtctggaggtccagctgcccttccccatgtgacctgctacacaggtgttccgggctgcggccatggggcgtgctgtctggaggtccagctggccttccccatgtgacctgctacacaggtgttccggctacagccttacagcatgctgtctggaggtccagctgcccttccccatgtgacctgctacacaggtgttccaggctgcggccatggggtgtgctgtctggaggtccagctgcccttccccatgtgacctgctacacaggcgttccctgactgactcacacagacactgtacccacaccctgcaccggccccaccttagtgattgctacaccctctcaagcctgtggcagttgtggctctctaagccacacctcagtgtgaagcgggatttaaggaaccagagagaccggatggagtgcaggagggtgtttattttaaggtgtacacaggcccagtggacatgtgtcctaaaggctgagcccagaacaaagaaaacgagtcccttttaagcattttgaggcaggaactacgtgaagcaggcttacagaagcgagaactaaaggctgctgtgacacttttgcaacatggcttacatctctgtgagaacttggtttgcggcttgtgcttatctgtcttgtgaccttgcagttgtggggggaagaaagaaacaggagtttacagagcctacaaaatatgtggaggatagatatggttattgtttcttgggacagacagttaatatactcttctaacttttaacttcagcggggctgcttaaattctcctcagccttggttaatacagaatttcattctatgagctattgttatttttcttactattattataatttttactattactacttatgctattattctgttgttttcttaatttcccacttcaagtggacggagcccattccaagcaaactattccaaggatagctgtttttcttcttaatacgccaacagcgagagagcgtgagccttcctttacctacccatgagcatctgccagtgatccagcgggcactgcttcctcccagaaccgtgtcttgacacttttttctatgaatcagtgaaagattcaagaaaattggagttgaggggttttttttgcactcgtgctgacttaccttatggcattggggtttttgccttcaataaaaataattttttaaagtagcccattaaaattgtaaaaatccatgccttcaaaatgtcagtaattcaacctaagatatggaggaagagcttgcgcttgaaactccaaaacgctttgttagagggacgaaagggcagtttgatagcagatcggagggatggagggcctttgcttcacccatcgctcacgtgtgggcgtctgcacggggaggagcgcgtggggagaaccatcagatttcagtgtgacagggaggccacgtgggtggcactgcagcagcagcacagagccagcgtgagggcaggctgggtgcagccaggagccagctgggagtgggaacccagccaggcctgggatgtggaagcccccactgagaaactcccttgtagggtcccaggccacctcctcagcctcagaatgggaaggtcctaggtaagaggtgaagccggctgggcttctgggtggggtgcggacttggagaacttttctgtctagctaaaggattgtaaaggcaccaatcagagctctgtctagctaaaggtttgtaaacgcagggatcagcactctgtaaaaacacaccaatcagagctcctgtctagctaaacgtttgtaaacgcactgatcagcactctgtaaatacgcaccaatcagtgctctgtgtctagctaaaggtttgtaaacacaccaatcagcactctgtaaaaacggaccaatcagcactctgtaaaatggaccaatcagcaggatgggggcgggccaaataaggaaataaaagctggccaccgccgcccaacagctgcaacccgcagctcgggttcccttccacgtggaagctgtgttctttccttcttcacaataaatcttgctgctgctcgctctctgggttcgcactacgtgtatgagctgtaacactcactgcaaaggtctgcagcttcacttctgaagtcagtgagaccacaaacccacagggaagaacaaacaactctgggcgcgccacctttaagagctgtgacactcactgcgaaggtctacggcttcactcctgaagtcaccaagaccacgaacccactggaaggaagaaactccagacacatctgaacatctgaaggaagaaattccggacacagcatcttcaataaccctaacactcaccgcgagggtctgcggcttcattcctgaagtcagcgagaccaagaacccaccagaaggaaccaattccggagaaacttgttttaagcgtgagaaggaaaagaatattttattttgtttgttttgctcttaaagggtcattagtaacaaaagctttggagtcaaaagggccagattcagatcgtggttgcagcacttactagttgcgtgaccttgactgagagacttaatccctgagcttccatctcttagtctgttaactgaagtaacagtgcctaccttgtagggctcatggtggagagtaaaataatctactcgaagtacaggctgtggagccttgtgtaaataacgttctcaataaatgtctttgattgttgctgcttttactatttgggttaatcgtctgagaatgagaaggaaaataagcatttcatcagatggaagtctggtgtgtgtcagaaggagagttgggctgcccttgataaagcagagaaacgcaggatagagacagaagctagggttggtgtccagagggcttcatgacgggccagcccccttgtccatcaccatccacagtgtacctgtgtggactcacaccttgctcttctcccactcttagggagggagggggaatgttcagaaaacaacatcaatttctacctcctgaagtcgtcagccccttgtaactattcaggagcctgtggctttagaaaaggccattgtcaggtgacagcaattcccctacgctaatgccacgccagaaattatcccttgaatggagagagtatgtttcttataagaagctgggtgtcctgcttcctgtatccagtccaggaagcctgcatccggtccgcagttccccattaccacctgggcaaccaccagggagctgagcagaaatgggcccgtcgcctcctcctacaagttacagcctggctcagggttagcgctgcccacccagtcccatggctgtagcaaagggggcagggagcactttactgaagtggacaaatccagcgaggggaggaagattgatctttccagcaagaggagagtctttaatgaaatgtcctatatgtggagaagaccagactaaagtgacatcccattaataacttataaaagcctctaatcagcttgggttaatttggtattcattgtaaaaacattcatcatgggcactgaggtctgtgacagtagccaagaaattaatatcccacggatggaaatggccttctgtaccctcagataatggatggagacagtttggtgagtgatttgttagcactaccaaagggacccttcaaatgtaacacaatatgttatcacttcctggctctgtggggctaaatcactttaatattcacttgcactcaagtaaataagctgagtttttggtaattaataggaatggatggggtcgtatgacagagatacctgatggtcatggttaaagagtgaggagaattaggaaataattatggggccctttcctgccaccaagaggctcttctcctgggatacagggatttcagaaaggaaatgcgtaatcataggattatgggggaagtgagagaagaaaaatataagtaggacatcaggaggaggtggagatttgttttaactctgtgtaaatggaggaggcataagagaaaatttatttataaaacaatatgaaaatatgcagaaagagtcatcaagacattcctatacaagatcacagaaatccctctaaaaagaagcccaaagctatatcaacaaacacattcataacactgttatccataacaggaatttctaaaagctggaaatgtcctaagtgttgagagctgagccatttgctaaatcatggagtatccataggaagaggtattatataaccatttaagattatgattaggaagactgcatgggagcatggagcatatatcatctatcaaacaatagcaggactaaaaataagccatttggtatgttggcatatggaaaggattagaaagtaatatattagtcaaaataattatttggactggccagactgggcttttttcccccttctaaaactttcttggttaaagcaacattatatatatattttttttaaaaaaaaattaaaaagagaagaaaatgtattgttaaaaatgggatttaggaactctactcaataaacatgtgctcaagtagtgttgagggtaaagaagaggcgctttttgcagagaatccaaacatgaataagccgcccatcaccctccggggatcacagtgccgttaattccaccggtttgaaagctctgttgcaaacccttcagagatattttctgggactcactctctttttgaaggagagaaagcagaataacaaaattcaaggtcacagattatgagtgtttaatatctaaaaattatttttaattgataagtcatcatcgtatacacttacgggatacaagaggactatagtcaataataatgtgttgtatatttcacaataagagaatacatttcaaaaaaaaaatggtaagtgagccttgagactcactcttaagccagaacaaaattaaggaaaaggtggatgcagggttaaaaccgggcctgacctgcttgcccacgttggccggtgaagataaaccctattttcttcctcatagcttccttaattcaattgcgactgaaacagtgtatcatttcttaggaataatcaaatttagaagggtgcccccacatcagcctcggcaatattaggttagagaatttcaagatcatttatcaaatagaatttaaagcaggaccagagttgtacattaaggaagagtgcacttagtgatagattcttgagagaatataacaaggcagttagttataaatgaacataaccttttgagacctttggatgatggggcgtggagccgcaccacacttgcggccatggcagatcctgtttctcgtcctgtggagggagcagcttctgaacatttggaggcttttccggtcgcctcgggtagggcgggggagggctgtactcggtgctgccaagaattctccttcgtgcacctaatcgggttctgtagattactttgtggaattctcccgtttgggtggagggaacacctcttcatcataattcctaaatgtttcaccattggaaaatatcaaagtaaaggttccatctcctggtctttgtagaataactgcgaccttttcttcctttaaagtgctgaaatactgtcagtcccacttactgtagcagttaatcttatgcctctttgttttattattcaactattttgcttttgaataactttatttcccagaccaaatgtaagctgttgaagaacaaagaatgtttttcattagacttttgtcttccacagcccgttgctcagcattgtgcagagtgtaggttctcaacaaatacttgtgaaatgaatgccatccagaagggaaagtaaaattaaatgtcagatttatagacataaggtccaacattcatggaaattggaaaactttgacgttataacctaaaatttttgagatttaacaacttgtctgatggcaaattaattcagcagttcagattcagttcagattgtgagcaataccaaggaagaaaatctggattttcgagtcagacatttgtcttaaaatgtttgttatgctgtgaaagatcttaaaaggaagatagagagtgctcctgattaaaacctgtcaggatcaggctgaactcaacaaggcgaaaggacctgaacttcttgtctttccaaggacgtttcagaggatgaaagcgcctcacttcttgtcccactaggacaccgaggtgatcgtctccgcagtgtcataaggaacagtgaggcctcgtgggcttgtgcccctcacgcactctccggtttgaaattggggtcggccctcattctaatgccctgtgagggcctcagaggttattgtctgggttgttaaacgtggagacagagagggcacagaacagaagataatttgctcacttaaaacaagaggtttctaagaacgtttggagaaattttagtgtgtccaagtcagttatttgtgaatgattcttctggacctttctgcaaagtagacttcacagggctcctcctttgcagaattttgttagccctgattgattattagaggttaattatcaatactggatactaacgtacttctgccctttgacgtgggtatttgcacagcccacgaggttttatttcacttctctgatgtgtggggaacacagtgccttactcgtgctagagcagtgatagacgtgagcacagataatcaatgagtcaatttcaatgacagaccactttggtttttttttagactgtgggttttacttttgttcttttgtttcatttttttgttgttgttttgttttgttttttgtgtaatagctcacatctagttcagctatttccactctaaaaaaagttagcaaattagtgaattgatttttctgtttgttcttcagtttgaaaacctcttcatttatctgaatggttttagttttccctttaatggcttttatggccaggaactgtttgaaatatgttttaatttcctccattaggccagatttaattaacgtacactatgcatgttggtgagctgagtgtgccgtctgacctccagcctagatcgctctagagcctgcgcctgtcccgtgagtgtgaggccaactgtgcactccagactcagttcattcataaatctaaactcactattgtttctgccaaagctctgccctgtaagtggtaccaccatctcttctgtgccaggtcagccaaattcttgactccccttcctcccccaccggcttgatccactatacattttatgaattctgctttcttggtatcatgaaaatccaccttcttctttctgttcccaccatcacctcatgcctaggttcctgtaacagctgccttcttggtttttctaccccaaaactacccctactccagaatgttctccatctctcactgagtgatctaaaatgcaaatataatcatgtccattttcccatgtaaaatccttccactgttttccactgcctttaggatagaacccaaaccccttcacatgctttgtgaagcccacctgaggtgccatcactcccctgacctctcctgccacccagtactcccaggctggagaccagccataatgagctacatccagttccgcaaatgtcccagaccacctctcactgcgaagactttgtatttgctattcacaaagtccagaacacactctttttttaaaaaatgttttaaaagaccatgtctagctctatcacccaggctggaatacagtggtgtgagcatggctcactgcagcctcaacctccttggctcaagcgatcctcccacctcagcctcctgagtagctgggacctcaggcacgtgccaccatgcctgtttagttcttgtattttttgtagagatgggggtctcactgtgttgcccaagctggtctggaactcctgcactaagcaatccttctacctcaacctcccaaagtgctgggattacaggcatgagccactgtgcccagcccaggacacactcttaatcccccacccctcacccctaactccaatccctgaagattgggcttgagacccctctgctctgtcccctgccactctgccattgccttatcaccacactcatcactctctgcttttgtgacctgtttccttgttattctcccccagccaaatccaagctccttaggaacaagcacctctcgtgttcactgctgtgtcctcagccactttgtgtagactgttagtaagcattaaatacgtgttcaaaggttgaatgggtgactcagtcaattaaggcatattatttacccaagatgaaaatcaattacttttttcaatttaagcgtaaactcgatttatgaatttttatgaaatttgtttctgtgttttcacctattggagatgttggctgacctttcatctctagccacaccctgtggcatcctcctttaaattttagccttttcagccaccacatgggtcccaattaccatgacaccgtgttcaaacccaggctcaccagtttctagttacccttcagataaaaaggttatgattgcacgtacatgtatctatttaattaagctagttttctccatggccatacaaagtcgtgtttctaaaattagctgggtgatctgactgtttagtggaacttgagtctttagaaggtcctcagataccactgctgtctacttcctgtaaatctaatcatcacaggacaaggtgcaggataggcttgcttagggaatgctgccttttaaatttcctatgttactgcatgacaagattagttgactctgataactccctacaaaagactcagaataataaaggaataaattaatcagtcaatggaaaagcaaacgatctataccaggctgatgaactataatagaacatctcattgttacacagagtcagccgtctcccactgccctgctgaatcctatctgaacagtaaatctgtgttgtaacagagccagcatggcaagcagctgctcagctggcctttcccctcctgtctcataaagaaaaatgccaatgtattcgtaatttcccagtgaggtggcagagtctgtaaatccttttttccaataaccctaaaattttactagccaacggttcaacagcctggtacacatttagggaaacaaaaggtttatggtggcagatgattgtttagaataatgtttcttaactcagctacacttcaacttgtgtaactacgaatgctgtggctgcatgcccagaggctctggttcgtttggaccagggtggggcctgggcgtcagggtatttgaaagctccccaggggcttctgatgtacaaccatgtctgagcatcctgggtttagatgcttacaggcgggactgggactggatgacctctttaataaactttgaagtttcaaggtcaacattccaacttcataataaaatatagaatctcttagattatatttttaatcaccaggcccatcacaagggaggtgctgaatataaaattgctggtcattaaaacattgccagggaaattgttgcttcaaaaaggcagctgtacttccttagatcaacatgcatggcttggccacgttgtagtttactttgctcctggtcaattcaacttaattcaactcaaagttaagatcaggatgtgataaaattattttgttttctttttctttgaatcctggatgagaagtcattgtccaaatcattaggtgttttatgcaatattaccaatctttagtgtgattttccccccatcaaacctataaacaataaacttttctaaaagaaagcctgccatgatggaagcactgggtttcagacagcaagtctcactgcatggctgtgcaggttgggacatactaacttgtgataacagcggccttttagatagggctcacaatgttcccaccaccatgctaggcactcagtgtattactgtctcttttgctcacaatatctctattcagcagtgagaaaatagaaattcagaaaatggaagtaattttccccgggtcacatatcagggatggtgtcagaactgaaactgaagaagtcgtgtcccagcttcttcctttggaccgaactcttaagtctggactctgttcagaatgacttctctcaagaccaaatgttctcaagtctatgagaagcctttgaacacctcttaaatgcactgtaaatacagtgttattaccatgaacgtgatatttgtatatttgtattcaaggccaccataaggatttttttttttttggcaatgcacagaagctggatgtctcccgatacagcatctggtgtaattaatccgacacccttatctctccccactgagcattctcaaagggaatgaaacattgacctaactgatatttccctctaaaatctttgcaggttccataaatgagctgtcagagccccagggcagacactgaaccccaactggaataaaacgttcctcctggagagggtgggtcagttatccagcacagcattcctcacatcccaggggtgtgcagagccctttcagagctggatcaaacaaatgaagcttgtatgtctccttttccagggggtgacctaagtatttgatgttagttttctacgcttcattattttttttatttcggatgcattttaaatgttaatgaaatattttatgaataaagagtaataaaatgagcactcacatgccctccagtcagcatgaaatacagagcattcccaagcatgcccagagctcggactccaggtccaccgggttccgggtccctcctccaccagaccaaccactcctctgaattttctttatgtttccctgccatttatggatctctaaacaatataccatttacattttgaacattatgtaactgttaccagacagtatctatactcatgtgacttgaggttacatcaacatagtatagatactgtctgtcttgtcactatacagtaacatgagtgtagacgcttgatgtaccctgagtgtacatactgtctggtaacagttacatcaagttatataaagtctcctatattatcttgtatgaacatgtggaagcattagctgtaattgagtctttttcagttttctgtcatagtccattatacaaatgtatcacaatgcctttatccagtcctttgtccatggatatttagttttctatttttaaatgtatttacagttttgctatgtgcattttgctcatgttttctggtgcacatgtggcaaagtttctgtaggttttgctgtgtgtatatttcattactgatggtgctgaacatctttgcatgggtgcattttctattcatgtcacaacttctgtaaaacacttgttcatgtcttttaacctatttttccttcgggttgtttgcccctttcttattgatgcgcatcatttctttatacatttaagattcaattatttgtcaattacattatttccaagatcttctctcattttacagcctgtcttttcactcttattttgatattctttggcaggaagatacattgatttcaatgcaatttattcctttatggtttgcatttttaagtcttcttgaagaaattgtccctaccccaaggacatagtctcgtagattatcttgtaacatttttttactttcatctttgacaattatgtctttagtccccctgaactggatttttgggaagggtgtgacgcatgcttacaattatctttccctaggaataatcaattgtcccagaacaatttattgagaaagtgttcctttccttactgatctttggagcctctgctatttatcaaacttctgtgtatgggtggatttgctttcagactctccactgtgttccactcatcttttgtccactgttgtaacaacaccacacgttcttactacagcttcaccacacagatggggcatttggtacagccagtcacctgggcatgctgctcctaagagtgtcctggctgtccttggccttttgcatatgtgtatatatgtgtcactcatgcacacacacaatttagaataagtttgttcagttcctctaaaaacactattgggagattagtgtgaactgcattaagtctatataccaatggagggagaatttataaacttcagctgttgaaactttcaatatgtggtatagttcccagtttatttacttaaaaaatactttctccataaatttttataattttctccaaaacagcttgcaaagctggtttaaatttactcttacatatcttctttggatatttttggtacatgtttcattttgtaaatgtaatttttagaatttatgtctgctagtgtattagtcagggttcagactaattagttagagggacagaactaacaggatatatatattaacttacacgatcacaaggtcccataataggctgcaagctgaggggcaagcagagccagtcccagtctcaaaactgaacaacttggagtctgatgttggagggcaggaagaggccagcactggagaaagatgtaagcttggaggtttggcccatctctctttttcatgtttttctgcctttttcatattctctggaagctgattagattgtgcccacccgattaagggtgcatctgccttccccagcccactgactcaaatgttaatctcttttggcaacacccacacagacacacccaagattaatactttgtatccctcaatccaatcaagttgacactcagtattaaccatcacagctggttaatagaattgcacttgacattttctattgattttgcatccagcagccttgctaaactcatttacttccaataattgatctgtggtttcttttggatcttgtatttagataattacaccctctccaaataatgacacatttatttcttcctttttcatcctcaactctgccttatttcctgatcttactccactctccagaaccacccacactatgttgagcagaacagcaatagtgaagatgcaaccctcgccttctagctcatcatagaggaaatgctcccaagtttttgccatggaatgtgaagttgctgtagattcatttgggaatgaccttggtcagtttcaggaaggccatttctatttctagtttgcacgatttatttgggaatgacctcggtcattgggttttgtttctttggttggttgttgttgttggtcttgtggtctgtgttctgtttgtctttattttgaatggattttgaattctatgaagtatgttttctgaatctattgaaatgatcatgtgggttttttttcctttaatctgtcagtgaggtgtattgtattgtcagtagaaaaccagccttatgtgactaggatagatgtgattgattgggatgtactttttaatatatacctagctagatttttttaacatattttctttaggatttttgcgtctgtgttcatgggtgaaattcgtctacactgtgggacattattgaatttaaaatcagtttattagaatggtaggtacttaagtaggtacaaacacaaaactatgcaactataaagccatatataatttaccaattcacttcaacaaatctacgaaagcaggaaatttaaaaacaattatatcaatttgcagtgctgatgttttactgaaagtctctggcagctggaatatgatgacaatgctgactgctccatgaattttcctttcttctcctgcattaccacgtgacttgtcatgacttaatttcccatgcattttctttatttgacctatagagaaaccttctttggaacaatacagccatgttattgttgctttgcttggcaggaatacatctttcgcatgtcaagtcccttttattcttttctcactggcccacaataactaaagcagtactacttggcaccagtgtgcttataaacataaattcaggccctaaaatcaggatagaaggacttgcttattggatagtcatccaggtggtccacaatatgggatatacattttactaagattctcatcaaaatgaacatatgaaatgtcagtgttttataaggacctgtgtcctcagattcccaggttgttatcactcagtttgagaagcatcccatccagagtttttacagaaggaattgttagtacagtttgctaggctgcatttgaaccaatgtcggccttcccttaggaccagcagagacggtaagcagaacttaggtgagtggtaaggagtcttttagagaagtcctcctccctcgagggcctcactcaagatctgactttgtagaaagcagaacttcacactgactttgagtaactgtcttccatgatgagctggggagagaatggaacggtgcccatgagactgtaggacttcatgaccttcagctgtttctccacacagagtgctctcagcctacagcgagagaggaatgatcccaccagctggaaatagagaggactgcaacccaaaccaccccccaccccgcatcatgaggcagcaagagttggacatatcttctccccatcttcccctggacacaccctacagaaagtcctgtggaaacaccccactatgaggctgccttattctcatgttagcctgatttgcaatagggaaaatgttgaggacacaaaaaaccctggctttatttgccctgatcacttcatcctcatggtggtaaaaatgccccatccatgcaacaagtcttcaagcacctctcatgtgccaagcagcccctgccttaggaccacccgctgttaagtgttcactggtgatgccactgtcttaccttatgagcactaaatgcttaagcagggctggtaaaacatagaacatttctcaggttattgtttcaaaatacactgtggttgtcaggcggaaaaggtttccctcttaggatcacctgtgacgagcaacgtcaaagtgttttggtgcaactcaaatgctttgctggaactgtttttctccatacaatgtacggggaaggcttccatgtcatggaacaaagtggtgaatgttcaaatggtcagggtgtgatttcatgggctgcatggattaaggaacattgaaacataaagttgaggacattgctctgttttcaattctctcaaacttctgttttccgatgaggagcatgattttgacacctcctaattcttgctcatgtctctttttaacaaatggagagtgagcctcaggcccagaactccaagcaggactgggcagaattcattatcatgttttggttttttggtatttattttatgcttatcattacttcactgcaaagaatactggtgttccatttatagtagtaatacaaaatgtccctgataaatgaaacttgtttacataaagagggaattgactgaaaagaaaataaagcagccgggcgcggtggctcactcctgtaatctcagcactttttgggaagccgaggcgggtggatcaggagttcaggagatcgagactatcctggataacatggtgaaaccccgtctctactaaaaatacaaaaaattagccaggcatggtggtgcacacctgtagtcccagctactcaggaagctgaggcaggagaatcgcttgtgcccgggaggtggaggtggcggtgagccaagacggtgccactgcactccagcctgggtgacagagtgagactctgtctcaaaaaaacaaataaataaataaatgaaagaaaaaaaggaaaagaaaagaaagcaaataatagtatcagaggtactcacaaaggtggttagtgtttaaccagccttgggaagtgctcctgtcagggaaggaagccagggtttagcaacaacacacgttgggtggaaacccagccctcactggattgatgatgtgtataacccctctgagcctcagtttccccattcatgaatagggcaaaaagacctcccagggatgctgtgaaggttaaaggcaataacttataggcagcattccttatgtggtaaatgttagttccctccctgatgttggaggagaaatctattattatcttgaatctgggccaaagacataataatatttgcataagtgatgaaagatgacaaaatggaaaaacatggacttgtagcaagacaagcctattagctttttcgaccttgaaacttctgatttgatttcctaatccataaaatgaggaagattaagatacttattttgcataattattgggcaaatctgaggtaatgtatgtaattaagtcacgtcctagtgatcacatcaagtacagagtaggcctcaatcaataacagctgtttgttatggtcctcactggggaaggaccatgactttccttcctcatgtgagaacctcctttatctttcaaattgtatcctcatgtgcataaaatattcttcagagtttgtagggaaatcgtttgattaatgttggggtcaagaagcaacaaggtgttgcggggacatcctctagagccttgagaatttggggtgtgaaattctaatttctgagatgctgatgtagctacagattctacatagagacccactcacctcattaattcaaggttcagggcactgaaagcgcatctacccatcatccttttctctttttcatacttttatttgaaaactattattctctctctcttttttttttttttttttgagacagggtctcactctgtcatccaggctggagtgcagtggcacagtcatagctcactgtagcctcaaactcctgacctcaacctcaagcaggtgttcctcccatctcagcctccctagtcactgggactaccggcacacaccactacacccggctaatttttaaattgtctgtagagatgaggttttgctatgttgcccaggcttgtctcaaactcctgggctcaagtaatcctcctgcctcagcctcccaaagtgctgggattacaggtgtgagccactgggcctggccctctttatttttctactgacaattaaccttctacttgaccagaggtctttttaaggattaaagagtggtaatttggctcccctaaaattcacagctgtgagtgtgctgtgagttgtgtgacagctgcattgcagttgcaattgtgtgctagtttctaacaaggggaagcaaacgctgacgtggccgagaaggaaggcccttactatgaggcttccgttaagtctcctccaggtcacattttcataacaccaagtgatatttttcagcttgaatgtctcctgatattataaggagtttgaaattttcctttattaattaacattttcattttgctcacattttggagagcactgattttccagaagtgctaattaccaagctcacagcagaaggttggctgcattttaaactatttcctcagatgctccctgctgaactcagagatgtcctcattcagccgagccagcctcccaggtgggtgggaggcccctggctggtgccactcacagactttgggcttcttctgaacccgcggagccctgaaacaccaataggcccacactcctgagggggttctggccacatctgcctttaggaaagatctgttcattggtgtaaaaccctgacgtgtgacatcagaaaaccagagcacctggccatgccccaaccctgtagctccaggcagacctccctatgatgtggcctgccatagtcatgtggctcgtgatgagtctagaaggcctggaagtttctgtctaagtctgggcaaaaacagagggactcacagcaccccttgtggtgtgagagtaatagatgcatgcatacatgtgtgaaggcttgtttgcagatgtctccatctgttatgtctgagcccattcaggctgctctaacaatatcgtagactggggtgcttagaaaaaacaaattgatttttcatcgtcctggaggctggaagtcaaggttaacttgctagctgattctgtgcctggtgagggcctgtgtcctggctcatagactgccttcttctgtgtcctcgcttggtggaagggacaagggacccctctgtgttgtcttttgtaagggcactaatctcattcgtgagcgttctcccctcatgacgtgatcatttcccaaagacctcacttcctaataccatcccattgggggtgggatttcaacattggaacttggggaggacacgaacattcaatgtgtaacaccataaagaagacatgggaggccaggctcagtggctcacaactgtaatcccagcactttgggaggccgaggtgggtggatcgcttgaggtcaggagttcaagaccagcctggccaacatggggaaaccccgtctccactaaaaatacaaaaattagccaggcatggtggcgggtgcctgtaatcccagctactgggaaggctgaggcaggagaatcgcttgaacccgggaggcagaggttgcagtgagctgagatcacgtcactgcactccagcctgggcaacaagagtgagactccatctcaaaaaaaaaaccagaaggcataggaatctggtatgtatgtactaatcttcaacattgacggtccccagcctttcaatccttgatgtaagtgatgaagatgagcttctgatctctcaaggcccggcggacccctttcctaaacctggggttaccattttcccatgcctgggggttttcccaggacattcatgctgataccaggacagtcccgggtaagcgggatggttgctcatgctgttgacaaggctctggggatcttggcgccaccaccttctcctcgtgccacacacacacatgcacacacaccacccatgccagacttctgaatctcatcttatgagtccattaattcactgttccccacctgctatatgtgcccaaagatttgagatttgcatagacaacattttgaaaagttttatcctctgttttgtcattaaaatagaccccgtgggtgggtcagcaagtgatattaggaagacgggggtgagatggtatcaaatgaagggaagactacagggctggcggcaaggacacagatttggggtagcagccagacttgggaatttggtgagggtgcatgacgcccaagactattgcagagcctgatgcctcggcccccgggtacctggaccacagtggcagggcgccagaaagggctgtgagggaactaggtcagcaaccaaaaactcacaggagtcaaacgaatactatgagccactatgtttgcccagagctgtgctagtgtgtgtatgagatttttaaaaagggaaaacgttactgttgcctgaaggagattaatatgtggataagacatacatacatgacagaaactaagaaagttattacaagattttaaccagagtcttaccaccctatttttaaggcaggagaattgtatgaaatgattgctatagttcagagaggtgaagtaatcctctaaatcacatagtgatttggtgttttgtgagtttggagaaggagaggtgaaggtggttctggaaggcttcctccaggagatggggcagactcgggctctgcagagcaggcaaggtcatcagagaagcggagcagcagagacctggaggcaggctgtgaggtggctggcgctgtgtggatcagggaggtgccgagggtaggagaatgctggcctggttctaagtcattggccctgcggcacgtggcctgtctggaaatgagttcctgcagacactctggacaggcaggagacctcaatgggcactggggcaacctgggccagctgtaggcttccttcctgatcaaacaagcggaccgtgctgagacacctccccgaaagccacaggtctcagccccttcatgggtgaccctgtgttatccacctgagaaagggcccaaaagaggcctctcagaggaggcaggccctgtggcagcacgggccttgaaatcggcccccggggcccctgtggcttcagtccagggactccatgccgggcgctgaaccacctccacaaaactcatgcgatcctcagagccccgcctcatcagccggaggacaggggtcacctgacagtgtgtctgaatgagcggaagcttccgttctgtgagagctctgggcttttgtgaactgacacggggcacagccacccgggcccctgggtgtggagtaacctaagaagtcgtgtacccctggggtgatgaggattgaggctaagatgggcagagggagaggaaaggttacacgggacccagtgacaggagtcgcagtgagttcagccctggtctgcccagagcagtccaagtttacccgggagtccaggggaagtcacaaatagagcttcctttcatgtgcaaatgtcccctcatttggatgataggttataggaccctcctaagtttggtgacttctgaggtctcaggctaagacatttctttgaccccactacagatgaagtacattgtttaagtgttggagggagtggcctagcccagggcccagagctggagcctgccagcctggtccccatccaggcccttccactcatgggctctgtcctgttgggcaaatcacctaggctgtctgtgcctcattttcctctaatatggatatcaacatagcgcccacctcatgggcttatgaggatgtgactcatactatgcgtgatgccgtgttagcctttgttaatgagaacctcctggtcagagctgtgctgtgggcagccaaaggccgattatggagaaccacccagagtggagttaggagccggcctcggggggccggtcacagagtggctcagctggtcagaaatcatgtctaagtctcacacaggcaggaaaatgcgacagtgagaaagggtcctgtcccagcccctgagagagtacgattctacaaagaccctgacacctgctcttgtgactgagttgcataaagtaggggttgaattcctgagtccactaaagacatgtacttccagaatggtaggagtgaaagaggggtgaacatagatggagaaccaagggttttcccaggtgctgtttgtaggtcacacaggggcacagtattgatgggaaagtcagcctcaggcatcatgtgcatcattcaaggtgtcccgtcatgttcctggcagagttggcttcatatccaacttgcctgactccacagcagcctccctttaaggaggcttggacaacccaggccgccatgaccggaaccccagaacctgcccacgagaagttgctcctgttctcctcctcccctgcgaggctcctctcaggccagggcttccaagtcccatgtaggcctccagagccaagacccctgcagcaccctgtgcactcaggcagaggaaagagcccaggatcctgcacagccccttggctctgctgtggcctctcatcgggccccttggcattccaggtggccctgccatcccacagacatcctccaggaagccaaggatgggaaggattctgaggtctgtttggcagaggtcacatggatacgttatgggagaggagtggtgttctggcaccccatggcttgaaggtttccattgttttctctgttgatataaagactggttttcagacagaggcaataagggaagaaacaataagtgagaaggtgaaagaggtcagtgttagacgtaaaaatgccacttcttctgcaaggttttcttgaactcccaggttcgaattcccaccaccttcagccatggcgtgcgcggctctgtctgtacactcagtgtacagtaaacatttgtctacaggtctttcccgtaacttgtgatatcccacacagcttaggatggtggcatatttattattttatcaccaattcccagtacaggtgctaggttcattttaggcatttggttgaactttatcatttatttattttcccattataaaaataatacagaatatagtaaaaaataggaaaaaaagcctttttaaaatagcatcaatagacccagtatctaaaattactattaatattttagtatgttttctaaatctatttccaagaatagatgtatttttttagttacaattattagttttacatcccaaccttttgatacaattagcattgtatacaattaaatacttattgttaacataattttcatagttacatagtatttcattgagtcgatctaccaaaatgcaattaaccattttccagctagaccagctggaccatgtataatattccctgttatcactgatgctgtgaagcacctttgggtctaagatgttccttgagtggaattactgagtcaaaaactaggaacacttttttatatacacttttgatgtatatttgcgaattgtcgtccgtatgcctcatcattcatcctgattccatgctcaccagcatcaggtgaatatgcaattcgttttaaagagaacttgctaaggctatgattttttaaaaagatctctgctaatataatttaattgcatagctatttaaatcagcatatatttaattatattctatagttaattaaattcacatatatttaatagtaaattgattttctgtaaagtaataccagtgatatctttcttgtgattttattcttgctccatttatcttttaatgtcttggtgtgtaaataaccaaaaagctccctgaaggggaaagacagcggaaatcggaaatcacctctgagtccttcacggtccagccaggagctagtctcaggcgtagcggagcccctgatgcccatgccagaggcagcgacttctgagctgggttctgtgattcccctgctcatcctctaggaggcactaatgagcagcagtgagctgaggaagacgaagagccagaggactccaaaacctggaagatctgagtaacctacagacgggataacgagcccctgtaggctgcagagaggttggctgctggtcacaccaccctggagaagagcacggttccaagatcagccacccagggaacctgggagggaagcagacactgtctgagaagggaggggattgatgacttcactgaaccctgaaactgatctcatctgctccaaatacctgggatgatccgggagacttagccaggaacatctgaatgatgtttcatgggtagcattttactcttgctagaagccggaggccactcgtattaggactgtatacaaaaaggcccagaaacttaacaagaaaaaaatagattttttcatcaccttagaaagatattgaaaattcattcacttctttgcagtcagagggtgacttctggcagctgacaagtctcggatctaactgcaatataaaaagatttgtggagtgagagagtgcctcccactgctttctaccagtcaataaatttgtcagtcctctgaaagctttcagagagaaaacgttcacaatatttgtgttttggttcagacctgctcctataaaggccccgtggcccagccttgttactttcagctgcaagaggcagcagctgagcccagtgcaggggctctgagtcacctggggaacttgccgcccccagacagccgggcccctgtgcagagtgtgtgactcagtatgtctggggtggggcctgagagtctgcatttctaacgaatccccaggtgctgctgagtggctgggcccagagtggccttggagaagccctggcatgattgcttgtgccatcaggctgcctagttctgccccttatgggcagggcgaccttgggtcagggctggcttctccaagcctgcatctcagttccataaagtcagaacagcaccttcctttcctaggtgttctgacgaggggagtcttcagagtgtgggctctggagtcggacagcctgggtccaaaccctggctcctcacctgaaaagggtgtcctcttgggccagtgggctccttcagcaccctaggtaacatagccctgaaatgaaaatcataatccataataatgcctatttcatagaattataatggggattaagtaaattaatattttaaagtcttcagtgtttggttaataacaagtactatgtgaatgtaaaataaaataaatatgtgcaacacatccatcaatgcatggcaccattacgagccctcaacaaagagtggttactatttttggattcattggtacatggttccattaatcaataaatatttagcgtcaagtttctacaaggttctggtgtaggcattgaaagaagcacaagatctggtttcccttgtcttaaagattataattttgtgggcagacaacataaaacagagttcagtaacaggagtttctggagagtgctaccagcacggttcacagagcagtgggccagtatcattttttgggagagatcctcaggcagtggagtgacaggagaaggtttcagaatgttcagactcaagttgggcctggagcattttaggctgaaaggactgagaagaatgatgcttcagggagtttgctgctgttgcacgtgattttcttgggctggttcagccttcttcaaaggccatgttccaaaatcagcttcagttctttaagtaaattctcaatgagatcgtttttgcatgagcatcaaaaactgttgacctagcgaagaaaatgtgcatctacttccccaggatagggcggtggcccctcgaaccccatcacacacacagacctcatctgtccaggtaaatgagattctcaatgagatcatttttgcatgagcatcaaaagctgttgacctagcgaagaaaatgtgcatctacttccccaggatagggcggtggcccctcgaaccccatcacacacacagacctcatctgtccaggtaaatgagatgcccagagaccttcccatcagacagaccacagtccagcccttgcccaagggctcagatatgacagcaaacacttaaccctccacccttgccatcaccatcactcatccccatcaccccccatctgcctggatttgtctccactcaccaaaatagcccagagatacggcaggctttttggaggatctggttgacccatttcctatgatcctccaggatcctcctggagttcccaggtgaaggtcaggccgcaagaattaacctgcactctagagtcgaggaaccagccagagctcttccagtcttcctgtcccgctttgcacgctcaccacagactgggctttccaggcctttctcctctgcctctcatcaacagcccccttgtgctgataaccacgcaggctgtggtccagtgctgtgcccaggtttggtcagctttgtttagatctaagcctataccttttttaaagtataacccaacgctacctagtttaatttgtccaaaatgccaagtgatttctccacgtgttttgattttgaaagctgaacatccttatccataggcattttaatttggagagttggagagtgtcatgagctttgtcatttgctagggtgagggtgatccaggctgagccgccaggctgagtgcactgtgaattagcgtggtgtgcggggagttactggagtagtccctgactgccatatcattgcttcactcaccagatcatgcatcttcccatcattgcttctgttgatttatcctcatttctatggctgccacctgtgaaaggttcataaatctccagactgcatcgggctctaccttcattgggccagaaaaaaattcaaacccacaaagttattccttggaaaatgtagaggtgagatctcctccagaaacaagcatgctgatagttgaatgtggcacatgagatgtcactcactatccatctgccatcaccttatacaaatgcaggcacgtctcatctcattgcacttcactgtattctgctttgcacatattgggttttttacaaattgaaggtttgtagcaaccctgctttgagcaggtctgttgggaccatttttccatcacatgttcactttgcatctctgtcacattttggcaattctcacaatattttgaactttttcattaccattatatctgttatggttatctgggattagtgatctttgatgttactgatgtaattgttttgggagccactaactgtgcctatataaggtggcaaacgtaataaacattgtgtgttctgactgctccacaaacaggccatttccctcacctcctcttgggcctccctattccttgacacacaatattgaattaggccaataatatcttataaaatggcctgtaagtgttcataaatggaagaattgcaggtctctcactttaaatcaaaagctagaaatgagtaagcttaatgaggaaggcatgtcaaaagcaccacgataggctgaaagccaggcctcttgtgccaaatagttagccaaattgtgaaggcaaaggaaaagtctttgaagaaaattaaaattgctgctccagtgaacatgtgaatgataggtaagggaaacagcctggttgctgatatggagaaaggtttcatgctctggataaaagatcaaaccagatacagtattccctgaagccaaagcctaatccagaacaagatcctaactctcttcaattctgtgaaggccaagggaggtaacgaggctatagaagaaaagttggaagctaacagagggtggttcatgaggcttaaggaaagaagtcgtctccataacataaaagtgcaaggtgaagcagcaagtgctgatggagaagctgcagtaagttattcagaagatccagctaagatcattgatgaagatggctacaccaaacaacagatttttagtgaagacaaaacagccttcttctggaagatgatgccatctaggactttcatagctagagaggaaaattcaatgcctggctttaaagcttcaaaggacaggctgactctcttcttaggggttgaagtagctggtgactttaagtcggagccagtgctcatttaccattctgaaaatcctagggcccttaagagtgatgttaagtctactccgcctatgctctgtaaatgcaataacaaggcctggattatagcacaactgtttataccattgtgtaatgaatattttaatcccactgttgagacctactgctcagaaagaaagatttcctttaagatattactgttcaatcccagtatgcctggtcacccaaggactctgaaggagatgcacaaggagataaatgttgtttctatgcctgcccacataacatccattttgcagcacatgaatcatggagtcatttagactttcaaatcttataatttaagaaatacatttcatggctggcatggcggctcatgcctgtaatcccagcactttgggaggccgaggcaggcagattacctggggtcaggagttcgagaccagcctggccaacatggcaaaaccccatctctactaaaaatacaaaaattagccaggcatgatggtgggtgcctgtaatcttagctactagggaggctgaggcaggagaatcacttgaacccaggaggcagagattgcattgagccaagatcatgccatggcactccagcctgagcaacagtgagacactctgtctcaaaaaaaaaaaaaaaaagaaaagaaatacatttcataggctgggcatggtggctcacgcctgtacttgcagcactttagaaggccaaagcgggcagatcatgaggtcaggaatcgacaccatcctggctaacaccgtgaaaccccgtctctactaaaaaatacaaaaaattagcagggcgtggtggtgggagcctgtagtcccacctactcagggggctgaggcaggagaatggcatgaacctgggaggcggagcttgcagtgagccaagatcgcgccactgcgctccagcctgggtgacagagcgagactctgtctcaaaaaaaaaaaaaagaaaaatacgtttcataaagctatagctgccatagatagtgattcctctgatggatctgggcaaagtacattgaaagccttctggaaaggatttatcatcccagatgccattaagaacattcatatgcattagaggaggccaaaatatcaacattaccaggagtttaaatgaagttgattctaaccctcataatctttgagagattcaagacttcagtggggaaagtcactgcagatgtgataaaaacagcaagataactagaattagaagtagagcctgaagatgtgactgagttgctacagtctcaggataaaacttgaatgggtgagaagttgcttctaggaacgagcaaagaaagtgtttcttgagatgaaatatactcctggtgaagatgctaagaatattgtggaaatgacaacagaggatttagaatattccataaacatagttgagaaagaagcagcagggtttgaaaggactgacttcaattttgaaggaaattctgatgtgggtaaaatgcaatcaaataggattgggtgctacaggaaagcttttgtgaaaggaagaatcaatcaatgtgcaaacttcattattgtcttattttaagaaattaccagttatcccaaccttcagcaaccagcccctgatcagtcagcagccatcaacatcaaggcaacaccacctgccagcaaaaagacgatgactcaccgaaggcttagatgattgttagcattttttagcaacaaaacatttttaataactcacatacatttttagacataatacttttgcacagttactaatctacagcagagtataaacataacttttatatgcagttggaaaccaaaagatttctgtgactccctttattgtgatattcactttattgtggtggttggtggtctgggactgaacctgccaaatctttgtggcatgcctgtatatggctttctgtttttatctttgagatagagtcttgctatattgtcgaggctgggtctcaaactcctcaagcaattattgtgcctcagcctccagagtagctgagattacaagcacacgccattgatgtgtatgtgtttaagcatggatgaaccagacaaggagctcctccagggcaaagaccatcattattcagaaacctggtacaaggaaaagctcagggagaggagagggggagaagggagggcatagaaaatattgtaactgtagccaaagaagtggatatatttgtcaggattttttagtgataaaagacaaaatgtcaagttaaactagactaaacaaaaaggggaatgtcttacttacctgggatgatcagaagtgggtttggcatccagggactcagacagcatcctggggcatgtctctgcctccatccttatctcctgctattttcctttcctgctttcccttttctgtagtctctcttcagctctacttctttctgcgtgttcatctcgctctcttccagtgcaaaacgtcttccatatggccaggaagacaaatcacccctgggaccctgaggtctgtatcattccagtgccaggacccagaggcaagaagcagtagactctgaagctccaggaaaggcatgagaatacctgacccacccagggtgtgtcagaggccatcactcagggcccatggctggggtggcagggatggaatcctgcagatttacatgcctgagtggtatgcccattgtgggggccagggctcccagacagcccctgagtcacaggcataggggagagatggcctcaaactaggcaaacaaaaagtggaggtcaccactacagcagttagccagaacatgtgaaagtaaaacataggcaaatactatcttaagtcattaatccagtgaatatgatcttctatttgttggtagaatagagcaactgtagctgagctagtgattacagcaacatctgatcaatgctttcaactcagacaaagtggccagtttcctgcgtagaagggttggaaggcctgtgaaggccactgttgttccccatctggcccatcctgcagatgtcccccctctactcggcccctatgcagcaatgagggcggtcatggaaaacaaaattctcaccttctcccttgtttggaatgtcctggaaccatgatgacaaccagcgcccttcagtgactcccattgttctcacacaaaagcatggagtcaggagtgtaacttctaggatcctgcgtcccctgccacttctccagcttatcctctcaccgcctgccttggcccagctgctgtggcctcctcccttcctcggaggattgtcctttcttgccttgcccagggcctcggtgaacgtggctccctctcctgcgatgctctcattccccttctttccctgggtagcctctgctcacccgtagatctcagctcagatatgattctcagggcagacctcacaaccacccagacaagaccctcagggtgccctgttggcactttttaaacttcctcccagcaattcccagactggagaatgtcaggatgcctggccaggccactcctagtcagcccctggaggctcagtgactccctgtgaggagggggagtttatgaaatgcacagccttgggcagggcctgatgctggttcctgtcactgttgtgcccacctctccatgtccctggactcattagaagggtgccatctcttcagtcagctaggaacttctggagctcctctgttacactaaatagcttcaagtggacactgaacacgtactatcaaatgcttaaaagcacaattttattttgagaactttttctcagctttggaaaaataatacctcagaattctccaggttaaaatgtgggttcaggaggtgagaaagatcccaagagatttctctgggtgggtgactctgaaaaggaaggttttcctttagcgtttgaaagctgcattgatgggaaggtctttagagtggtgttggggcttttcatcttgattttggttgatgttttgaaagaaggaatgatatgagtactttctggtaggaagagcaattttagattatctacaagcatttctctttcttggcactacactctgccctttggcattaaatcctgaagtaatttgctggagtggaaaatgatgtaatacattatactggtttttgaaggaaagggcagaggggaaaagtggtaaagtgagggaactacaagaatcctgtgattaaaatgcggtcctctgtggtaaggattggataggttgatgacacttattatgctaataatatgttacctttgaaagtgttttataacctccaggattttctcccataaattatctgctttcatcctccccacagcaccatgaggcaagcacggcaggtgtaattatctgtattttgtggataagaaaatcaaaatgcagagcagttaaatgattttttttgccatatcctagagctgcctaggcaagaaccaatgaaagaaccaagcattctggattttaggctgatgggttaatcatcagcctaaaatatgaaatactcactcagaataaacagttatagccattgcaaaaatgagatgagcccttgcatgccaactgctcagcacctcgccaggtccatcggacatgccccgagggtgtttgtggtgttgatgatgatgatgctgaactaaatgagaatcatcaggaatcttaaacctctcattgatcaacagctttgacatctcctctgtattagtctgttaccacgctgctaataaagagatacctgagactgggtaatttataaaggaaaaaaggtttgattgactcacagttcctcgtggctgaggagacctcacaatcatggcagaaggtaaaggagaaatgaaagcacgtcctacatagcagcagacaggagagaatgagacccgagcaaaaagggagaccccttataaaaccatcagatctcccaacatgtgggaattatgggaactacaattcaagatgagatttgggtagggacacagccaaaccatgtcatcctctatccatccgttacaagccagtataacaaaaggttgtgtatttgcccagctgagcagtgaaaagggaaaaggccaaaatatagggaatgtgagggcaaaatagagtcagtatttagtaactcacagattgaatgttgtgttcctgaaatagagcattgggtactctgagaatgactcctggcaattttaggactacttccatgggaaaaagcacataaccacgtgtatacatacatatgttattaaccttttagctcaaaggtaactgggctttccactaccatcagtttctgtatacaaggcttgaaggccaattatactttatttccagcagtctcttcatgtaatctctgcaagaaaagtctcttttgataggatttgccgactttttcttcagtgttcacctatgctcccgtcaggtgagcacactgcattcttagcagtgctgggtgtcattagtgttcagtctttcataatctgataaacaaaacattgtaataagatttctttttgttattttttagcaatttgtacagttctttgatcgatctgtttgtgtccttcatacacatatttatagctcagtgatcatgattcatgctttccacttgtcggaatttatcccagggaaatatcagagacacaggtgaaaatttttgtgccaagatgcacacaatagtattttattacgataaaaaaaccaaaagactgtatgtcaaataataagggattaattaaataaactgtcatatctcttcaagggcatgtctcaaagaatgtttaataacatggaaaagcatccaggtgtggtggctcatgcctgtaatcccagcactttaggaggcagagacagacggaatacctgaggtcaggagttcgagaccagcctggccaccatggtgaaaccctgtctctactaaaaatacaaaaatcagctgggcatggtggcacatgtctgtaatcccagctactcaggaggctgaggcaagagaattgcttgagcccaggagacagaggttgcagtgagccaagatcatgccactgcagtccagcctcaccgacagagcaagactctgtctcaaaaaataaataaaaataaaataacgttgaaaagcattcctaatataaattaaccattatattatatggccttagttttattaaaaaccagatttatacctctcctaccaacacacatacatcttgaaggaaatgaaatacaacaaagttgatttgtgtatgttttgtagagacaggatctcactctgtggtccaggcaggagttcactgcagtcttgacctgctggactcaagcaatcctcctgcttctgtgtctcaagtagctaggactacaggcgtgtgctatgacactcagctaattttttaatgttttgttgttgttgttgttgttgttgtcgttgctatttgtttttgtagagatggagtcttaccgtgttgcacaggctggtctcaaactcctggcctcaagtaatcctcccaccttggcctcccaaagtgctaggattacaggcaggagccaccatgctcagctcgaagtttattttaaggtggtattttgtatatgtgtgagtgtgatctgtaagacaacgacatttttcttttttttttttttcaaatattccacaaaaaacaaatacttgtagtcacagtttggtggcttttgctgtgctgttttccagcttgtaactggccagactgattctatgatctcaagccagcggttcacttttcaaaaaaacccaacactcctttacccagccccatctttgttgttggtatatctctctcgcttcttcttattactttgtagtaattttacttcagaaaagactcagaattcccaccatcatccagtttctgacatgaacccatggaaggcatactgttcaggaaggttggcctatgtcaggggcctgacacctgctttgaagcacccatcaggggccatgtgtggaccaagcatacattccggctctgcctgagtccacattcagcatcacctggactcagtaggatctggggcagcaacggtcagccagcagggtgacgtcacacatgtgcacctctcctgcagtattcaatgctgctgtccccccaaccacacaggagctgccttctcccccagcactgctgccagatgacagcttggtgcagggagcaggacatccacaagtgggtgtggaatcttccctgcccgatgcctctcaggagccaggggcatggcttcagggccccaccaggaatgtgcacgagggtcaccagactgggagaagtggcagctgtaactccctcccagtactcatggttctccttatctcaatgcaacttatcataaataatgctgtcatgaatagaggtaatattcaacccttatcaggtttccagggcaacaaaagcaggaagtcagctgatggtcaaattcgctgcaaagaggactcaccttaggttctgagtgccagagtgtttcttcaatctttcagacacagctggtaatcctaacttgctgttatatggcctattgatgaaaccactcgggaccacatgtggcatttgtagcacacccagaaattaaacccatgcagagaaacgagctcaccaggactccttaggttgtccttggagggcttcctcacctcacttgctagcagccactgcccaaggacctgctgtgttctctggtcagctttctgctttcagcagggtcttctaaaaggtacgtctacaaggttgcagatttggaggaagaattcctgtatcctggtgaagtgttttgtgtgtgtagagtgttccagtgacaggagttatttgcaggattggcacagtctccagtgaagactctcctgtgggcttcaggagcagtaacttgcgtatgatcattgctaaaccaatggggatagccagttccatggccagccaacctgttctgtgcttcgccctataaattatgttctatattacatacaacaggatctttcacttttatttactacagaaatgtcagtaaatggttcctgatgtaattagcttgatcaggaaatgtgataactcaagagaagccgtggaatagagagagaaatgcaattgccaaatagtcactactatgtggatatgtccttgacattaggaaagccgctataatgtgtcaattaaagaaacctaggcaatgtgataattgaagtttttaattgatatagagagagaatctatttcccccttaataataacatgttgggttcactatgaatgtttaatttcctttccatgataaatagttttccctagtctgggcatggtggcccacacatatgggaggccaaggcaggaggattgcttgaggccaggagtctgagaccagcctgggcaacagagcaagacccccatcttaatttaagaacaaataataaataaataaatagttctccttttcaacagaagtttggtaatataactaattaatttgctgaatatcttttactgatgtaaatatgaatgtaactattgaatttgacaaagtgaaaaatgaaagaaatctcttagagatcatccaacccaacctctaatgttatagtgaaggaaattgcattaaacagtgttgaataacctgctcacagctggacagctagtagtttcagactggaattcagggttccatttcaagtccaaggttctttcttttttatcatctcacccttagtagtattgctatcattttgtcaaatactgagctatgcaacatgtttcccttttggccttgattttccagaactaaaaaccaaatcgtgcctgattatagtaattattccatccctagttcctgatgtaattagccccctctttagctatttgtgtctcttttatcataaccattctgggaacatgcagattgtgcttttattgtaatttactttgaattggtttaagaaatattaagggtgtaaattgtcacttaatacacacacacacacacacacacacactcttcttctcagtaagttacctggaagttgtactaatcttttaatttctctttttaaattatcttagtgatgtaaatattcatgaaacttttggatttatttgacttttggaaaagtcaaataaagcctcaattagttaaaacccagccaactcacatgctaaaccttgggatagttttcctgtatacaacatacatggaaaagaatagcaataacacagataatatcaaggaaaacagtttctgggaatagatgtatatttgatctaatccatttttgtacatgcacaccaatagttttggacaatgaaaactgattatcttagtcaataataattccatattgtatacctcattctatctaataaatcaagaaagtataaagtctgaaaatatttccctaataaggactgaaattgaaaagatctcttctttagttagaaaattcaccaagaaagtgtatttaactgaaacttcccaatcctctagagaattccagtgtattagtccattctcatgctgctatgaagaaatacccaagactgggtaatttataaaggaaagaggtttaattgattcagttctgcatggctggggaggcctcaagaaacttacaatcatggcagaagacacctcttcacagggtggcagaagagagaatgaatgcccagcaaaggggaaagccccttagaaaaccatcagatctcatgagaaccagctcactatcagcataacaggataggggaaaacaccccatgattcaattatctctacctggtccgtctgaagacacatgggagttataggaactacagttcaggatgagatatgggtggggacacagccaaaccatatcattctgcctctggcccctcccaaatctcatgtcctcacaattcaaaacaaaatcatgcccttccaaaagtcccccaaagtcttcttccagcattaactcaaaagtccaagtccaaagtctcatctgagacaaggcaagtcccttttgcctatgagcctgtaaaatcaaaagcaagttagttacttcctagatacaatgggggtacaggcattgggtaaatatacccattccaaatggcagaaattggccaaaacaaagaggctgcaagccccatgcatgtccaaaatccaatagggcagtcattaaaccttaaagttccaaaaatgtgtttcacgtctaggtcatgctgatgcaacaagtgagcgcccatgggggcagctctgcccttgtggctttacagggtacagcctacctcccagctgctttcatgggctgacattgtctgtggcctttccaggtacctggggcaagctattggtggatctaccattctgggatctgaaggatggtggccctcttctcacagttccactatgcagtgccccactggggactctgtgtgggggctctgaccccacatttcccttctgcactgccctagtgaggttctccaggagggccccacctctgcagcaaacttctacctggacatcctggcatttccatacatcttctgaaatctaggtggaggttcccaaacctcaattcttgacttctatgcacctgcaggcccaacatcacatggaatttgccaagatttggggcttgcaccctctgaagcaatggcccaagctgtacgttggccccttttagcgatggctggagtggctgggacacagggcaccaagtcccaagtctgcacacagcagaggggccctgggtccaggccaggaaaactatttttccctcctaggtctccagacctgtgatgggaggggctgccatgaaggtctctgacatgccctggggacattttccctattgtcttggtgattaacattgggttccttgttacttatgcaaatttctgcagccaacttgaatttcttcccagaaagtgggattttcttttctatcgcatcatcagatggcaaattttctaaacttttattctctgcttcttcctgaacactttgttatttacaaatttcttcctctagatactttaaatcatttctctcaaatttgaagttccacagatctctggggcagaggcaaaatgccaccagtctttttgcatagcaagagtgatctttacttcagttcccaacaagttccttatcttcatctgagaccacctcagcctggacttcaatatcagcattttcatcaaagctattcgacaagtctctagtgagttccaaactttcccacatcttcctgtcttctgagccctctaatctgtaggaagttctaaactttcccacattttcctgtcttcttctgagcccttcaacccgttccaacctctgcctgttacccagttccaaagtagcttccacattttgggatatctttatagcagcacctcactctccgtagcaccaatttattgtattagtctgttctcacactgctatgaagaaatacctgagactgggtagtttataaaagaaggaggtttaattgactcacggttctgcatggctagggaggcctcaggaaacttacaatcatggtggaacctcttcgcagggcagcaggagagggaatgagtgcccagcaaagggaaaagccctttataaaaccatcaggtcttgtgagaactaactcactatcatgagaactggatgggggaaactgccccatgattcaattatctccacctggtccctcccaagacacatgagaattatgggagctacaattcaagatgagatttgggtggagacacagccaaaccatatcatccagttaattgaaccttcacagaatttactataaccttgagtgtataagccatatttatgctaaaatgttcatttttaaaaatgaaactaatgaaaatgtcatgtattttgtaaatacccagagggggcttgcccaaggtagactgagtgggcttacttgggaaataacaaagagatgagtctggcagaaagaaattgaggatgagaaataacttgggataggctagtgatggctttgaatcccaagcagaggccctcacacttttacctggtaggctcagaagaagaaggactaatatgataactattttattttattttatcttatcttattttattttattttattttttgagatggagtttcactcttgttgcccaggctggagtgccatggcacggtctcaactcactgcaacctctgcctcccaggttcaagtgaatctcctgccttagcctcccaagtaactgggattacaggcacctgccaccatacctggctaatttttgtattttttaagtagagatgggttttcacctggttggccaggctggtctcgaactcctaacatcagatgatccacctgcctaggcctcccaaagtgctgggattacaggcatgagccactgcacccagccaggataacattttataaaaaggaatatttgttgagctaatgtacattgaggcctactttaatttcaatatacttttcagacaaggaatcacacacttgtacaattttccgaccttatcattggaacacttgctaatatgatgcagatgaagtgggattgtgataggctattttaagtacttgaattatgagacaattttcgactgcagtagcccaaatggtaccctgcagccgtcaaatgtgaggaacttcagtgtgagtgctgacaccaaatggaacctcatccacccacctgatgaaaattgatgttcccctggctgtcaccctcagctgtacgctttgctcaagaagtactttgttttgagggactttatgttgtataaaatatggttttgcctgtcatccataggtgatgaacctgccatctctgtctcctgtctctctttaaacactaacttccagttgcctatggagcaactacctggaagtctcagaggcatctcacagtcaacctgcccaaactccactctgacttccttctccaaaccttctcttccttcttcatttcccatcttaattcttagtaacccgtacattctgtcacctaggtgtgaggatgagaaatcatatttatttccttctgttcccgccacacacccacaccctgtagattctgaatcctaatatttttcaaatccatcttcttttagatctcatttttgtagtttgtgctttcactatttcttaggcctccccacctccagacttctgcctcccatctcccctcagccgtcatggtgatatttctgaaatgaaaatctgattttctggctcttctatgactttgctttccaagtttacccatcacaaagaaaatgaagccccaacttccctggaacacaaggcttctcccacctggaacacaaggcttcccatagcctgacctgtcccccactcttgctgtgtcttttaccaccctgcatccctacccacttactattttacagctcttaccacctacttgtagtcccctaaatgcatcagatctgtgagcctttccacacatggatgctgacatctgaagagttctcccttcaactctctcccatgcacaccgaatgaattctccaggcccctcctctaaagcgttccttcttcacccccagctatagtttactgcccctttatattatatgctgctcctggatgtgggacagcaggtgcatgcctgatcaaatgtggtatctttaatgatcaacaaatgtcaggtaaacagatgcatgggttagttggttccagacatagaatttactcaaaaagagagcattttttttttctcctgaatggttttcaagatagctcaatatattatgccatttttaaaattttattttctttttagattacacataataattgtacttatttaatgtggtacagtgtgatttttgtttgtttgtttgttgttattgttgctgttttttgagacacagtcttgctctgttgcccaggctgcagtgcagttgtgggatctcagctcactgcaacctcagcctcccaggttcaagcgattctcctgcctcagcctcccaagtaactgggattacaggcgtgcaccacaacgcacagctaattttgtatttttagtagagacagagtttcttcatgttggtcaggctggtcttgaactcctgacctcgtgatctgcccacctcagcctcccaaagtgctgggattacaggtgtgagccaccacacccagataagtgtgatgtttcaatacatgtatacaatgtgtaattatcaaattacagtaattagcagattcatcagctcgaacatttatcatttatttgtggtaagaacacacaaaatcttctcttctagatattttgaatagacaatatattattgttaaccattattacccaactgtgtaatggaatactcggacttattccttctacctcattgtaacattgaccagtctctccccattacccacttgcacacaaacacacacacacacacacacgcacccttcccagcaccttcccagcaccgttctactctctacttctatgagagcaatgttttagatgccacatatgagtgagactatgtgacatttggctttttgtacctggcttatttcacttaacctagtgtcctctaggttcatccatgctgctgcaaatgacaggatttcattcttttctttggctaaatactatttccttgtatacatgcataccacattttctacattcattcatccatcgatggacacttgggttgattccatgtcttgcctgttgtgaatagtgctgcagtgaacatggaagtgcacgtatctcagcttactgatttcatttgctttggatgtctacccagtatacaaccatatgattgctggatcatatagtagctctatttttcattttttaaggaacctccatacttgtttccctaatggttatagtaatttacatttccaccaacagtgtataaaaggcccccccttatccatatcctcaccagcatttgttaatttttgtctttctgataacagccattctaacgggggtgagatggtatgtcattgttgttttcatttgcatttctctgatgattagtgatgttgaagattttctcctagacctgtttgccatctgtatgtcttcttttggaaaatgtctattcagttcttttgcccattttttaatcaaatgatttggtttttgctattgagttgtttgagttccttatgtattatggatactaacccctcgtcagatgcgtcgtttgcagatatttcctcccattctgcaggctgtctcttcactctgtcgattgtttcttttgctgtgtgaagctttttagtttactgtaatcgcctttttctatttttgtgtttgtgcctgtgcctttgagttcttttctataaaatccttgcccagactaatgacacgaagtatttccactgtgctttcttcttgttgttttataactttgggtcttatggctaagtctttaaaccattttgagttgatttttttaagaggtgagaaattggggtctaatttcattcttcacgtcaagattactttgaataaaacttctaaatgaaaattttaaaagttcagccctttgctctgagtttttgtctctattctactcccacaccccccccaactttagtcactgtggaacccacagtgaggtcctctttaaagctggcttgcctgggttttagacttcctcctccttttttttttttttttttttttgagactgagttttgctcttgttgcccaggctggagtgcagtggcatgagctcagctcactgcaacctccacctcccagattcaagtgattctccagcctcagtgtcccaagtagctgggattacaggcacccaccaccatgcctggctaaattttgtgtttttagtagagacaggttttcactgtgttggccaggctggtctcaaacttctgacctcaggtgatccacccgcctcggcctcccaaagtgagtcttcctcttctttaagatctttatctctctgcctttgggtcacatctaggaaatgattcatccccccactgctcagaagcaccactcttcttgtgtctgaacatcttgggactttctaggttttaccccattgctctttcaaaaattccagatattctactttccatatgttttctttttggttgtgaatcagagagtggtagccttctcccatcgcttatgactccttctctcttgttcttcaaactcgagtacagaggctactgtggcggcgtgtttgggtgattgatgggcttcctacacttggatgttatctatgccgggcttgtcttggttacatcccagcctctccagagcaatgatgttctgctgggatctgggggctccaaagtgggctgtatgggctggggatgccagcaaatcttccatccttccatttgcttgaaattaaagatacacagaagtaatgtggccacgggggtggaaggaagggaggatggaactcaaagggaaaatgacatgtggaccctgctctcataaaatttgaaatctagtcagtggagaagaccagatgatcccacaggagaaatctggggtgtcaagtatggatacacagtgggaatgattcatgtgactcactctgctgaggaatttgcccactgccctgacacagacctcactctactggtgaggtctgcagaggctactgaatatttgtaaagagtcgagtctgcacagttggcttccagcaggcattggacagggccctccgtggaggccaggcacccggcatgcagttcccctgcctcccttggcctggagtcactgctcttctccgcaggtcactgcccccatcagctgtggtggtctagtgttcagcagaaatgggaaacggagtcttctgaggctgtgccgattgtcattgctctgaaaagagctcacttgtgcttgagtggacattgcttcagcatcaacgtgaaggcctctgtctgtgggtttcagggggtgccagggaccagactggagagcaggcctcatcctgcgcccacgtccaacctcccttatcctctcccccatgctcctgcatctgcttcccagaacctctcggcctgtaggatctgttctgttggtgaggagggagtacagcataaacacagaaggtctgtgacggagagagattgttgaggcttcctgctggaaggttgagagctgagcagaggcttacaagagggcaggatctggatagatgccaacgaaaacagagcatttgggtgaggagaagagtgaatcgatggactgaggagggaacacacctgtgctatgcccaggagaggaggcaccagcaggcagagcttccaggcagggcgccagggcagggcagcatggaggaagtggagacagtggccttgcctgtcctggaaaagcctgcgagtgtccccatcacttactagtgggggctggatagtcacacatgaggaccacaaagcagatgttatcattctcctgggccttatgtacatctcagtatgtttgggagacctgagcatttaccttgtaaaagttttctggaagaaggaaccaaggtttgatggcagagagtacatgccctgctccaggatggcagagagcacatgccccgctccagcatgtcagagagcacatgccccactccaggatggcagggccccccggctgcagcatggcaggggttccagtggacagtgggcttgggtgtttcaacagcatctcccactgcagggccccagtgccacagttgggttgaggccacagaatccattgcagatgcaggtactggctgagtgcccacagggcaaaggccatcctgaaaaaggggtgggcagccccttcaccagaacggaatgcaagtgctgagccagctgacagggtccttgactgatgggtctttcagtgagaagggtctcctgccagtgtgggcctgcagtcaccgggcagctgacgacaaaactcccagcaagaggtctttccccaataagcctcgagaagagggcagaatggggccagctgctgacgcagctgccatgtctgctggagacatgctgtgacaatgacagggaggcatccttccgtccccacctggttcttctgtatgggtctcatgagtgtgagcttctgacatcaggttccttctgagtgaggaagagaatgtgagaggtggcatcctgattaaagctgtttatggtctggtgcatttttggttaaaaatcacacttttcatttatttagcacattgctgtcaagttgcaacacgctgtaattatcagaccacaagttctggaacctgctgcgtaaggtccaatcctggctcctccttccgctaactgctgaccttgggcaaggcatttaactgcctcgtacaacctggtttcaatcccagccgcacccctgacccaccagctgctgggcaagttgcttaacagctctgtgctcctgtgtcttcatctacaaagcaggaatgatagtacctgccccatagggttatttttaaagattaagcgagttaatgctcataaagcactttcgaagtgtctgcccaacatatacaaaaatttacccgaaatacatcaaagacctaaatataagtgaaaactgtaaaaatcatagaagcgtaagggaaatgttcatgaccttggatttggcaatggatttttagctgtgacaccaaaagcataaaaaataaaagaaaaaataaaaagaagtagataagctagacctgatcataattaaaagcattaatccttaacattctagctcacatgacacctcctctgaagcctgttctaaccccttcagagagaatggattttttataagggagacagtaacagcaacagatgtgactgagcatttacttcattcaggccagccactgttttacgtactttgagttggttgactcacttgctcttcacatccatttaagattagattctattggccatgcacagtggctcacacctctaatcccaacacttgtgaagccaaggcaggaggatcacttgaggccaggagttcaagaccagcctaggcaacatagtgagaccccatctctaccaaaaaaaaaaaaaaaagatacagatagatagatatatagatagatgcctggccgtggtggtgtgtgcctgtggtcccagctacctgggaggctgaggcaggaggattgcttgagcccaggaggttgaggctgcagtgagctatgatcacaccactgcactccagcctgcacaacagagaaagaccctgccttccaaaaacaacaacaacaaaagatgaggttttattattatctctgctgacaaatggagaaactgaggcagataacagtccagcagctggcccaggccatgcagcacatcctctgtgctcccagcacgtgttgcagacaccatcgtgtagtctggagcacactgagctggttagatccagattcccactgtgaatgggaactccttagggccaatgacatccctaaccctgaatcatgggacctcaatgacttctgcaggactgaaagttacatcttgattctggagggatttgggtcgcagactagagatttaaactttattctgaagtaagcagaaagttatttcagatttttaaaaaatacatgagaaaaatcgtgtttcagtaaagacaaatctggtgtgcaacgtatgagataaatcaggggcggcagcaggaggcagggagttgagtgagggtggcccacggttgtgagtggctccaggtgggtggggtgaggccttggggatggtgcgtggactaatccagatagtgaaggccacacgtagggaggcttcaagtccctttaggaacaagaatctcaggaactcagaggagcctgagtgctctgccagccatgcacatggtggataaaaagtaaaaattcagtcactcacccaatatttgatctcagcatccaggatttctcagcctcttgggggttagcatcgcaaaaccacaggcagaacttgatgccttccatcttcttttcttcagatatcttaatctgaatatcaaaaggagaatgtgaggcacagtggcttatgcctgtaatcccagcactttgggaggctgaggtgggtggatcacttgggctcaggagtttgagaccagcctgggcatcatggcaaaaccccatctacaaaaaatacaaaaattagccaggagtggtggctggcatctgtagtcccagctacttgggaggctcagtgggaggattgcttaagcccaggaaacaggtttacagtgagctgagactgagccactgcactccagcctgggtgacagagcaagactcctttctctcaaaaaaaggaaaatgtgaaagatcttcaaagcaaaatacactcttctttatagcttgttctttcattttccttccattagaaataaaaccaaagcaaaaaaagaggatttaatatccatcatagcaaactttactaactgaaaataataattggctatggtctgatttgattcaaaaatccattgtaggcttacaacacatttatttttaaaaaaaaaaaaagctaaaacttagtaatacatcttacccttaggcaaactcataagaacagctgctgaaattaaattaggttgtatacttgtttctggaagttttccacctcatttctggctgaagtgaatccttgaagaaccaggagggctgagcagaaaacaaatatttgccactgctttcagatccatccctctgtgggaacaatctggagaaactgcctttttcatattttcagtaaaaaaaattccatattcatgccatttcctgtattatgcaaaataccttccctccatagtctcttaaatgacactgcaatatttttcctagaatttcctaaaagaaaacagctggtttgatccccactcttggtccgcatgcctgatttctgtagacactgggtatttgcagtctgggctgcatcagtttgtgaggtacccataaggatgtgggcagagagtttagagacagaaaacccagggcagaattgatccatgcaccagaaaatgcattgtgtaggacaatttatagcttaggagcttcaggagacatgaggtggttcctgggtcacaggttctcaaatttggctgcatattgtaatcacctgggatgtttctttaaaatgctgatgcctggattccattcctagagattctgactttgggttggtctggtggattgtgcattaggtttttcaaaagctccccaggccatgtaatatgtatcaaaatctgaggaccaccaacatagaccatctccccctcctccccagagagggggcgacttgcccaaggtcagaattataatatcttccagtgtaccccaactctgcagatggttctctatcacccagtggcccaagagatcagtttgagaacaactttgcctcatcccacaacttcaccccagacctcaggtcacttcccatggtcaatgggttcttctcatagtctcaatggctgatccttctccatctccatggttagtgctcctcagatgatagcaacaggctcctctcatttgaggcctggctcccttctcttcgccacaccatctgcctccatactcatcttcaggagacttgagtgtaaacatgttgcctcctactcacacctctgtcaggggcttcccattgcctttgggacaccttaatgtggcttccagaccctccaggagctggctcctggcctcctgagtatcccatcttgcccctcctgtatgattccgcttgtatgaggtccctggagttgtcagacccctagagacaggaagtagagtaggggtgccaggggctgggggagggatggggagttacaatagtatttaacggggacagagtttcagtctgggaagagggaaaggttctgcagatggatggtggtgatggttgcacaaaaatatgagcatacttaatgcactgaactggacacttaaaatggttaaaatggcaaattgtatgtaatgcatattttatcagaacagtaaatttttttcaatagctttctgagaaagaccttgcctgccctttgcctgagttaggcagctctgttttgtgtttccagaactccacaatcttcctatcagaccactgtcctgcttagagtctggcctttttacagattgtgactagaataaaggcgcattggagttctcgcctatttaccactgtgatcccccatgactgcagagtaggtgcccactgcataattgttaatgaatgttgttgaatgaataaaacccagaactacagtgtcccagcccgtcaatcttaattgctaggaaaaattggattgcaaaaataatccaatttgatattgtattagtccattcttacattgctctaaagaactacccaagactggatcatttataaagaaaagaggtttaattgacacactgttctgctggctgtacaggaagcatggctggagaggcctcagaaaacttttaatcattgtagaggggaagcaggcacatcttacatgggggagcaagagaaagagagtgaagggggagtgctatacacttttaaacagccagatctcatgagaattcactcactatcaagaagagcaaggggaaaatccacccccatgatccattcacctcccaccaggccccacctccaatattagggattacaatttgacatgagatttgggtggggtcacaaatccaaaccatatcattccactcctgtcccctcccagatctcatgtcctgctcccatttcaaaatacaatcatgccttcccaacaatctcccaaagtcttaactcattccagcattaacccaaaagtccaagtccaaagtcttatctgaggcaaggcaagttttttctgcctataagcctgtaaaatcaaaagcaagatagttccttccaaaatacaatggggacacaggcattgggtaaatactcccattccaaatgggagaaactggccaaaacaaagggctacaggccacatgcaagtctgaaacccagcagggcagtcattagatcttaaagctccaaaatgatctccattgactccatgactcatatccagtgcatgctgatacagcagtggtctccatgatcttgggccactctgccctgtagctctgcagggttcagcttcctcagctgctttcacagggtggcattgagtgcctggggcttttccagatgcatgctgcaagctgtcagtggatctaccattctagggtctggaagacagtggccctcttctcacagctccactaggcagtgccccagtggggtctctgtgtgaaggctccaaccccacatttcccctctgcactgccccagtagaggatctccatgagggcttcaccccacaacagacttctgcctggacttccaggcatttcatacatcctgaaatttaggtggatactcccaagcctcaactctcacactctgcacacccacaggcttaataccaagtggaagccaccaagacttggggcttgcaccctctgaagcaacagcctgagctgtaccttggcctcttttagccatggctggagctggtgtgggcgcaatgcagggcaccaaggctgcacagagaagtgggactctgagcccggcccatgaaaccattctttcctcctaggcctccaggcctgtgatgggaggggctgcctcaaagttctctgaaatgccttggaggcgttttccttattgtcttggtgattaatatttggttccttttacttatgcaaatttctgtagcaggcttgaattcctccctagaaagtgagtttttctcttctaccacatagtcggactgcaaattttccaaacttttatgctcagcttccctttttaaatataaattccagtttccaatcatctatttgctcatgcataacaaaagtgaccttggctgccattctcaataagttccttatctccatctgagaccatctcagcctggacttcattgtctatatcactatcagcattttggtcacaaccatccaacaattctctaggaagtttcaaactttccctcatctctctgtcttctgagtccttcaacctgttccaacctctgcctattaccaagttccagagtcacttccacattttcaggtatctttgtaagaatggccccttctcagtaccagttttctgtattcattcccacattgctctaaagaactacctgagacttggtaatttattttaaaaagaggtttaattgactcatgattctgcaggctacatagaaagcatggttggggaggcctcaggaaactttcaatcatggtggaaggtgaagggaagcaggcacaacttacatggctggaggaggaggaagagagcacagggggagggctacacacttttaaacagccaaatcttgtgagaactccctcactatcatgagaacagcaagggagaaatctagccccatgatccagtcacctcctaccaggctcagcctccaacattggagattacaatttgacatgagatttggacggggacacaaatccaaaccatatcagattttaagtagctagaagtatcagaccacaaattgtccagtcatggtaagtgataacattgggtgaagaatgtggaatttcagcctctgattaatccttacaggtatattctgttcgaggtgggtagacctccaagaattttgagactgcctttgttctgtctaataaatacaacaggaaaatgaaaacccggttgatgatttcagattttttaagaacagcctatttataaccacttccttgcttaatattatgcttttttctctttccaaattagatatttatttttgaaaacaatatctactactgtgcacatgtcgggaaacaggccatccgtgtggtctccactggcaaggaaggtgtgatttacaatggcctcagtgactggctgtatgaaggtaagatgtgcacagagagaaaaaaggaagatttgtggttgctgctgctgctacattggagttgggttctttttcatttttctttgactttaactgtaaattaaactccagtttcttgaggttctgcaaaatttaaaagattttgttagagcttttgggatcaggctgatcagcatcagagaacagcatcaggctgttgtcaggggcctgcagtgttgtgcactcacctgggacaggtgtgctggctttgggctttgcagagctctgcaattcatccctgaagggcaggaggctcgttaatgggagatttattatgtcaggaggtgacttctgggaacgctcagggactgcaaatgcatgtgtctctaccccactccaagacataagtgcctcgttttgccttgggaaggggacagttggaaaagaaagaatgagttgcatctttccaaataaatcatcagagtgacttgctgctgagagcgcctccaccttgctggacattttctaccactggtttgcctttggcaccagaagactcatgctgtatacattattaaataactagaagtcagagggggaagctctcttcttaaactttgataacctgtctccatgctcatgacccttcatcgtaacaataacaaccaggtattgattgctattagctgtcaggcactgctggaagcactttgttttctgttacttcattccaccctctgtcttagtttgttcaggctgctgtaacaagatataacaagattccacagactaggtagcttaaacaatgaatatgtatttctcacagctctgaagcctgggaagtccaagatcagggtgctggcagacccactgtctggtgagggctctcctcctcacttgtacatggctgtcttcttatgtcctcacctggcagagtagagagagctctggtctttttatctctttataagggcacaaatctttttatctttttatctctttataagggcatgaatcccattcataggggcaacaccctcataacctcatcaccttacaaaggctccacctcctaaccccatcaccttagggatttgggtttcaatatatgaatttggggggacacagacattcagttcatagtactgtcataacaaggttctattttatagatgaggcatggttaggttaaataattggcccaagtttacacaaggtaaggaatatttattggggaaaggcgttgtccaagctcagggtaattaccttttttgaattccacatgtggctacagtaaccgtatgctttccagcatggggctgatgaacaacccaagctcttctcagcctcctggcctgaaaccgtgtggtcacagcaataactcaccctgctaggctgggtcaagggagggtcagggagattctgggtgctttctcaagccagtatcactttctcctagtgctgtgcatgcctcattctgcattttagtggctttatgcatcataaattataaagcagatggatatgcaagcttagtgttacctcctaggataatttctctgaagccataaagttctatgacttgatttttaatttttgtaaatggaggtataatttgtacataataaaatgtacatcagaaggacagtttgatgagtttggcaaatgtatatactatatagccccagtcaagacatagaccatttccatcagtctagaatattcctacaagtccctttccaagggctttctccctaaatctgtcttccagagactgccacggtcctgggggctaagcagcccattctctaacagacatactggaacccaagcatccacatgaggctgtccttccctgtgtggtcaccatggaagccccatgtttattccaatgtggctgccggtgctcagagcatgctgaagagtccagtttccttctgagccccaggagaatcaaccctgagattttattgtcacatgagtccttggctacacctgaaaaagccactggaatgaaagaggggacacagtctgctgtagttatgcctgttctgtgcagaaacagccctagaaatggtgtgcccggagatgtccccagctccaccaaagaggtacaggcagcagcacaaagggaagctccggaggggctgcacctctgcctggggtgcaatccctgagcctctggggcttgcctgccccctggactcagtagactgttgacaatgaggactctaaagccccttgtgtgctgcccttttgtgagaaaaaggccttatacctaggagcaactggaaaactgggtcctgtttgctccctgatatctgagatcccactaacagctcttttgcttgggtgtgagatcagctcaatatctggatagggaagggaacccaggggctggagatcagaacatgagtggttcaaagtaaggctgtggagctgcagggacccagggaggagacctggcccagtcacgggacatgacaagggtcttccactccatcgacctcaacatgctcatgtgtacatgggaagaatgccccaaacactacacttcctgaggactgtgtgagacttggagtggaatacgtgcagcacatgacatggtcagcaagggacagttgctgctgttgtttcttatcacaataaaaataacaataattatgtatttattactattattgtaattatttgttagtagtatttttatcacaaaggaaaaaagatgtttaaaaaagaaaaaaatggcatagatatcaaggcaatgttacccaggtggtcattctgccacagggcagaaattgtctgacctgaaaattcaagagagatcagtgcaaataataatgaacccaaggtgtgtcccccgtccctaagagaaagggcccctagaattttggctgcaagagcctaggcattctctgggactaatctccctcaaaaatccataaccaggagatttaaaatatcttttttagtatcttcttaataaaataaaaagttcattgctttgccattcacattaagcttttgctttagcaaatccattgaaaggacttttttcttcaaggcatttacacgaaattgtgttgatgtgataacagagccctaaatattttaaatcaatcacagttgatgtggcagcttaatctacttagtgttgttccctggaaggtttatatgctgatgcttagatttctgaggctgggagcacaggagccctgaggattcttgcttccttttttaataatgggaaagtaaactttgatgatcgcttttgcctactctgtgacttaactgtttcaattccaaacacttcctttaaaaaagttagggggtggggggagattagaatgaaaatgccctaaagcatttgcagaggggctcatttgcttggagatgttagttctaagaagataagctgtgtacgtgggaaacagccactgcagtccatagcttgttggcagaaaaatgccttattgatttgttttgtttcccagaaaggatcttaaacatactaaacattgcaaaatattggagactgaggaagagaagaggtgggcagccatagaggcttctgggagtctccaacccttgacctaagctttaaacacacaaagtgggaaaagctccagtttactgaagcagtcgcccacatgccagaatgtgagctcaacactggctgtgaactcagcactggctgtgaactcatcactggctgtgaactcagtgtatctgtcttgctgattctctaaagagagtcctgtggctcatggtggccacaaactgattttgataagcaaaatgcatatcttcattttattcttctgggaaaatgtcataaaattacatcgaattttgattttaataaaaactaaagacagcttaatagagtcctacaactttttaaagtttattaaagtttgtttattcataaactaaacgtaagatgttactgaagatgaagattttgaggcctgtgagtgagtgttctgttaagaatgtgcactttgatgcagggctcagtaattttgcaaagttcctagtatgtaggcatatgggcaaagagttggaattctccaagttttgatgaaagttctttgttaccgccattacatggttgattgtgtttccagctgccactctttgtttataaattactctttgtttttcttttgtttgtttttttttttgagatggagtcttgctttgtcacccaggctggagtgtagtggcgcaatctcggctcactgcaagctccgcctcccagggtcacaccattctcctgcctcagcctcctgagtagctgggactaacaggcgcctgccaccatgcccggctaattttttttttttggtatttttagtagaggtggggtttcaccgtgttagccaggatggtctcagtcatcttcgttatcatcatatgcatgagctatagtgggacagcacagaatttttggccaataatttgctaataatgactttaagttattaaatatttcagctaaacaatgagtcatccatacttcttttaccaaagcagtcacatgcatatgcatatccaaaatacatataattattcagtgatatgccattatcatggaatgactcacagccctgtggaaagctggaacatgttagggtcattggaggacaacatctttccttatgtatataaaagatcttatcccctcaaagggcagtggaggtagagtgagggatgatgaactcgagaagatatttatagagctcagcctggagtcatcagcctgggatggcagggaaagtgagaaaagggcccgaagggtatttatttcatatctggtttggcatggatgaaattccagggctggattttccttaactagtcaagaacataaaagtacttgaaaaatgtgatcagatcaggagacccagtttggcacggaagcatttccccgtgcatgtcagcaggaatcatgttagatgagactctcgaagctgcccctggcactagttccccttgcgtggttctaggacccatgcagtcaggcagcccctgacaaggagtagctgctgggaagtctcctgccaacaatactcacttctgctccaccctgcccagtccaccgccctcgcctggactccatggcaccctccccattttctgcagccctgccctgactcctgaggcccccttctcccagtcacagcccttgccacagtccccacggagccaccgtcctggttccacctacctgggagcccccaagagagactgtcttcactgtcccacactaactgccaccttcactgggtggccagcatggaggaagtggggatgtggctagtctggccagaaaggacttccttccagaactgctgctgctggagaggggtttagtgcctcttgagttggaactcagaatgctctcattagcgatgtagtcaggcccactgtacaaggagcagagcctttcctaagctagggccctcagtcctgctggatgagcaccaaaccctggtggtgtgaccattaccctccatctgtgtgtcctgctcatgtctagggactgcaaggccagcgtgaggcaaggcctgctttgcacttctttatagtttctcaaagcatctttaaagagtcagcactcatgacctaatagttttctgttccaatgaagtgctctaagaggtaccagcaaaaggtcaggtgggccccaggcagataaatttgagttaatgaattttgggggtggggcaattccatgctttattgtcttgagtattcaaggaggtggagagtgtgtaggagtagtagtgcagtgtagtagatcacagtggattttcacactttcatggaagaaaacacattattaaaatgaaagccctcctggggatcgtggaatggttttcagggtctgttttccacagggggcacattcaccaaaagaaaagggaactctttgttcatccagattcccataaactctctaaatcccatgaaagcagaacaaacttaagtaacacttcacgtgaaacttgcatattggctttaatttacattcatgacacgttagatatgttgtacactttgtgtgccttgtgtcacgctgatacccagtgtgctgagtacctgcttcctgcgtgttgtgaacagaccagagccagttgtgaccatcgataactggtacagtcttcagtgaatagcggcagccttggacggttcgacgcagatgaagaaaatctagcacaccatctttttatctaagaaagcaatatgctggaaccattagacattaatgacacttatgctacttttctttagagacaggctctcactatgttgcccaggctggcctcaaacttgtgtgctcctggcttcgcctcctgagcagctgggactgcaggaacctgccactgagccccaaccttttatgctgtttttaaaactccctgacatacatttggagactgatatgtgaggtgcttacagaagccccctggagtgtagattcttgattgggttctgcaaatattaactgcctctgaagcacctggctagggcacttcaactgctagcaaactgctcccaggtagtagatcaaagtggatttttacacccgtcatacatcttagtgaccatactgatgttttttaaataagttatggagcaggcagtacaatgggaattggaatgatgttcaaatatgtacattactatgtaaaccatagatctgtagttatttggacctcttattgattacatctcttatttgcatgatgggaaatgtttggttagacaaggacatcactctcagtaaattggcagaaacttgtgattagcttgacaaagctcctttgtggaagagcagggcagagtctttgtagtgatgatgcctgtgtttaaacaaaagcttcaccacgtaaaagctgtatgaacttggatgaatatttgacctctttgtgtctctgctgccttgtctgcaaaacaaagataacagcagtatatgctccataaggtcacagaggaaattgaaataagctaatacacatagagctcttagaatagtgcctgccactggtaacgtctacgtattggtggtacaactactattgctttaccttgtaatttcccaaactcggtaaaataagaggcacctgctcaactatttcatttgcaatgtcaggaatcggaagcattaatgtgtaattaatgatacctatcagtgttgaaaactctgaagctctattcactcataaaatattatctgtagtatgttcacatagaaaatgcactatgagttcccagtcatcctagaaatgctattgataccatgttgaacacctcttcaagagccttctgtccacgtttagattctccaagctgaaatcacacccttagttgccactgatgcctgacagagagacagctgttttccttttatgagccccaaagttcttgtgacttggtaaaaattatgcctcatgatctcttacagaaattgagtacttaaaaaaattatattccacttcatctatgacttctaagggaggatatgaaagtaaaagtaatgatgaaaatatctaaaatgtaatcagtgtctggcgaagctatcagacctatgaggtactgtgcaatggagcattggctcaatcaaatagcaatcattctgagcaggagtctgaatgctttgggtatttcatgtaactaaaatgagtattttccttgtctagtcctagtctccaactctgtaaagtattaatgatcttgacttgaagaacatgttaattttaccttgtagagagacaaggaggaaaagccaagaagctgtttggtagaagttcagttggctctgaccagaaaatggctgagatggcctaagagttccattccttctgtgcttctctgaacctgtgagagatttctgggtttctagatttctgcaaggatcaacaggaaaacagtgttctaaggcaggaaataagaatgtcaggagcataacatagactgtgattgccacaggtaagccaggctggctgccaaggccctcttagccccctgggtccaactgcacctgttcctcacttgaccctgagtcccaccagaccctcccctgccatcgtctgctctcaacgtagcaatcatggcatcatggctgcctcagtgccaaactttaaatccaggtaggtcaccaggaaacaccagcacatcctaaccagcaccatctctctgtttctgcgatcatgggcagaccactatctttctgctgtaacaacacaaagtgtatgccctcacttgcctatgttcatctgagttttcttgaaagaaaaacacatggctattgattctctaatcacagaaggaggtagtgttggagctgaaatggacgttagcagacattgagtccagcagtcagtaaactgtttctgtaaatggctaatagagtctgggtaatagagtcagggttttgcaggacatatggtcttcattgccactgctcaagcctgttgtcatagcaaaacagcagccatacaccataagcatggctgtgttccaataaactttatttgtggacagcgaaatttgaatttcttgtaattctcacatgtcattaaatattcttcttttttaccagctattaaaaaacacaaaaccaattcttagctctcaggtcatacaaaagagacagcaagccagatttggcccaaaagccatagtaagccaatcccaatttgtccagtcatcacattcacagacgaggctactgacatcatgtctgaattcttccagctcttgtcgtctgtatcaagatcatttgtaatgacaaccaattatttcaaattttgcttctccaaataagtctagttacttgaagtcaagaactgtattttatattgtatgtttcccataacaccagtgactctctgagtacttaataaatgttcagaaaatacttttgaatgagttaattcacagagagaaactcacatattctaggaacctccacaaggaaatcatattgtttctccatgatcactcttattagaatttccatttccacaaaattccctcaacagaaaaacacctgattaacaaaaagcaacagtaattgttaacctcgttttaattatgagtttcacgttttatccccaaggataaaggaaaaaactggagtgacgttgggaaggacatggtcttcttaccgtgagcccaggggcacaggatcatagctcatcagactctagaccatctaaattcatgctaagtcatagttcacatactgaatgaatagagtaggaatagcagtatctaagtttcagtgagtctttcttccatgccaggccttacacaaataaacttcgagagcgctatgaagaaagctctaggattgttccttggtatcctcgggagactggttccaggaaccccactgcacccacccttcttcaatcagataccagagtctgaggatgctcaagttccttgtgtgaaatggcttagcatttgcctattacccgtgctcatcctccgggatactttaaatcatctctaaatcacttataaatacctaacaccatgcaaagcctatgtaaatagttgatatgctgtattttttatttgtaatattttttatggtcacactgttatttttttctttaatatttttgatctgcatttggtgggagggtctagagatgtggaatttttagacacagagggccaactctttccttatcctattgcacagctgtggaaactattaagtggcctttctgtggacaaacaaccagtagggagcctgcctgaagctgctaagcactttcctgctgcatatgagttgcattaatttcttgcctatgaaattaggcttgggtccatactcaagttctgggtgcagcatcctgtagatgtgtctgctcaatgccccaggcttgaaccatctgtgctgtaaaaggtgtgtctcatggcacagatttaagagcccaacagaccttgatttaagccctctgtgagccattcagctgcctggtgaccaaatcacaaaccttgtctgaccctcagtttcctggtctggatgataaaacttcaggcacctttctcaaagaattattgcaaagttaaacaagagcgcttctgtggaagcgcaggcatattacagtggaaccataagaaattgccaacaggttcattgtatattagcatgtgcatgtgagatgtccggtgaaggtcaactttcttctcccatcctgctggctatgctggatgagatctcagatatggtaaagtctcagatgtctgcgtgcccagcacagagaatttaccatggaaaaggcgggggtattttttgactggaaggtcagacctattcacctccaggtatagcatctccagggcccccccagcaaacaggagataaaagggatgactgctctcctggtctgtgggtttctcccaagagaaacttgacagagacttccttgctccaaatcttcctcttcgtggctccttgtttctggtactgattcccaccaccctcctaattgccatggtgaccagtcggtttgctatttaattaatgttgtatctgattacatctgtaccctgggagttctccagccaagagttgcaatttaaactcagaaataaataaaacgttcagctgtgaggatgggggaattatcctagtcaatcccggaatattcttccgacctttcttagatgaaaaattatctggtggaagttggagtgaggcagtagtacacaatgaagaaggaacaatattctgcttttggaatatttaaaaggaagcctcagacagcagctaggggtcctgcttagcggatagagctttggaaagaggaaatattagaaatttggttgagaattttctatgaagttcagtgctaagagcagagaccacaacttaggctttgcagccagcattcccttccataaacttcaaacgtaagcctgatcagaacaaggctagcaggaagatgtgctggtggggacaggctaggtcctgctgtgggtagcaaaaaacaaacaaaagcaaacagaacactgcctctaatttaaaacagcaaagtgtatttctcgtcggagatcactcaagcccactctagatcagggatggggaggaggtgaggctctttccctcacggtcactcaaggtcccaggctgctggggctgtcctcttaggcatcgcagccacactagtggaaaggggagtgttccggagggacacaagctggggaataaatgcttggcctgggaatgaccctggcacttctacgcatgactcattgtccagaacacctcatatggtcccaccagggttccaggaagtagcactgagccattgtccagaagagggggaggccagacatgtctgggaggcaggactgaagaccccacatctgggcagctttcttgccaacagtgggcctcaagtttggtgcccaaagcagaagaggaattgtctagagggatgttggggaatctctcagaatcaacaggaagatcagagttgggttgagaaagcaggcagccgtccagggcagctgaggggacgccaggggtccatctggttgggacactgctgtgggggaatgggagtatgggagaggcattgtctgcccggatcacaaatgacgttcttgaatgagctgcaaatagaaatgccatgtcccccatggaatcatcaatatggcaacttgggaagcgtattccaggaaaaagctagggtgtgtaacgttttattgttgcaaactctatcatttcacacttaaatgataatcgcaaggagagccatcagaaccattagtcatcatctcttcaatgcgaaggttcgtaattgtcacatgcaccttgcaataaggcaccttgcaataagctcccttccttcttggcatctccttggagcctgtgaagtgatgaatgcagttcccaatgcacagccctcaaactgcatgggagaaaccccagtgtcccagaggacagtgggggcggcttcagcgtggctgtgtggcactgaaacaggttaaccgcaaacctctagttctcagaaccaaagctgaatccacatttgaaaatccagtagaagctttgttaatattttaggaaggctattgagtattttaattcaacatgaagaggtgatctagctggtcttgtgaaaaatcagtaataaatctaaagggagaatgttctctaaaggtacaggaagaattctcattggtcttgagaaatgtccttacaattaatgacctactcctgagagatcgtgacaaatatcttaggatgttcagtgactatatttttctatctttcaaattatgcatttcattgtgagattaggacaaacacacttttacctttttttatagcgccctaatgaaacttatgtatttgaggttgagatatttgacacccttgggaactctaatttcttttttttttttttccgtcttcttaagtcacctaaggacattagaccatttgccctattattgagagttttactaaaatgcaagctgcaaatgccagaaggaagataggcaacaagacaatatgtacttaaaagagtttcatttgatactcagaagctggaactagacttagctcttttgctcactaaacctgtattctaacctttttgggcctcagtgtctttttcttgttctggaagcatcactagggtggaccagataatgctaaactcctttccgtctctaacccttttcatgtttaattatcagtgccataagcacacagcgttgatggtatgaagtctgtgtccatgccagataacttcacaaggaaatagttaacaattctcggttttacttagtaaacatacgggagcaatgctcctcagttgcaatggtgggggctgggcacgtgggtatctcggcctttttgtccccttcctctcccctttcgtcacccccacacacaggacatttgcgtactgggagaacctttattagatgattctgataaaccttctccttatccccacgtgaaacctatctgccctaaaggaatcagtcttctgtctcctttactccccatttttttctttctataaaatttgcattattggcataacttttctctttactatgggttatctttgggaaggtgtaagggaatgcaaagatagctcacctccacgtcagagctccctgcacttgcaggcgtggagaggacatacccttcgtcactcgttctgtgcgttaggaccagagtggaagaggatgcgaggagtcagatttcaggtcagttgctcttccccagccttcaagcaatggcagaggctgtcctgggaaggtcatgctcttctgtctgggttatctgaagtgatcattgcaccgagtgggagactggacatgcagacctatcatctgcagccatacaagctcatgattctgggcaccctgagtcaagtcccagagcccaggcaacctggcagaacccaggaagggtgaagcctctgcatgctggccactcaggcctacgattagcccctccccagcacatccgtgcattcagcgcaaggccaagctccatccagtcgatggaaatgggcacctgagcctcagaaacacccaaagaagagagcacctttcagctcttcatggaagaaagcgagccagccagcaccttcttctttttgcaggaataaatatgtctggcacctggattattttatttaaaaggccagctgtgtggacaccatgcctataaagtattgggatttttaatgaatgttaaccaaggaagagcccagctaggatacttcctgtaggtgtcactttgtggaggtcttaggtgctatccaaccctaaggacaaggcagccaggccagctgaaggatttcagatcagctctttctctgctcaccaccctcattattatccacttcttttatgggtccactcagatgctcatgctcacagtcttacctcccttctctccatccagaaaggtgaaacctcacccaccgccatgtggctcccacatcccagtgtcctgcatctgtgtctccagaaacatggcagagatagaagaaatttacatgtagcaaaattcatctcttcaagaagatattccaacacctgacagtggcccacacagtcctcatttactagggaatcctatttcgagccccttctgggcgcccagattggatgagtcactatggattgcagtgccccacccaacggggtacctgaaaaagaggaagaaagggaggcagggagggaaggagatgaaggaggtccaagacagggacccttcccttgaggaactgatacacagtcagtccgatggaggccaagaccacctgcaggaagcagctccttccttccattattcgagtgggattcatgcatttattctgcaccgaagccctctaccaggtcctccaagggagacagagatgctttaagatctggacctgccttcacaaagtgtatatcctgcaagatggtattgaaccacatcctaattacatggcacaaatctttcacacatttagacacttttggcagaatggtatcttctgatttaaaactgcagaaacatgaaaattagaaaaccaaacaaccattaatgcattaactcaagagttcattcctaaaatccaaatttccttctctggagataggaccagatcatagctcccaatcttttctccagtttttgttttacgacatttcggatttgagattctgtaagaagtgacctaatgtgagcatttcctgatatggaggagacgcaaaatagctcagggaaaaagttgatcattagaaaaatctgtggttgtcccactgtctcatcgtgccactgggagtttctggcctccgctggcatctctgatgaatgttctatgccaggacaaagaaggcgggcatgggccaggcagtccctccagtcagggaacggtggcctctcccagctgccttggtgtttaggaggccctgtaagggtatttgggatctcaagagcctctgggacttacgggcaaagggcagaccttaagagccagtccctcctcccccaaaatgtttagcaagccagaaattcccctttactgctaagtcaaaggaagatgttctttgactcttcagggagcataacgtaccatcctttgatggtcatacacattaaaagaagataaagccagaaataaaagggaaagaaacagttatatgattttggtgggaatttgcagaaatacaggctgaagctgaagtcttccatcaggtgaggttttttccattgatctcatctctcgggctcagctcttttatctccagcgcattttggatgtggcttctctttccacctgctgggcctttagatagagtacttccttttgtttcaaggtagcatttaactgagtctggaaaaaccatcattaagggaaaataaagctgaaagatgaattgaaaactatgtaaaagggccctttcaggctgccggagagattgcctttccagcctaatgagcctgtgctgcctctgattcagatggtgcaaggacaggagaaaagaatggagttttgtgcactgcgattttccaaagcacataatgcttagtcatttggggtgttaggaaagagagaaagtcggagcggagtgtgtggtgaagtgagagaaagaaagaaggctgaattttcgttaagctgctcaaatgcctgctttaacaaaagtctgccagggctagaggtgattagccatcagtgctgctgctgtttttgctgtcgtttttgctgttgctgaagtttaaaggtcctgtgccccttggtatatacgcaggggattggttccaggacccctgcattaccaaaattcaaacatactccagtcccagtcagccctgaggacccaggtatatgaaggggtatatacgcaggggattggttccaggacccctgagttaccaaaattcaaacatactccagtcccagtcagccctgaggacccaggtatatgaaaagtcagtcctccatatacagggatttcacatccctcaaatactgtactttccatatgtatttggttgaaaaaatctgcacataagtcgacccacgcagttcaaacctatattgttcaagggtctgctgtcccgtccttatgtgggatggtgacaagcggccctgtgtcccatggcgtgcagctgagcggccttggtgcagaggtggatttgcagccagttgtccacacatcctggatcctcccggtgcgtcctgtgtaatgggttaactggacctgcctaagcctgggcctcccacccctcaaaagcagcttctccaagctttcctacttaaatttctccagccacagagagaagcatttattgtctctcaccacacccgccccccagtatagaagaaaggaagactggggaattgatctctcagagcacttggagaagccacacgtcagcagccagtaaagctagaatgaaaatctgagcgatcaaggcaatggaatagaaagtcaaaacccaaacttcatctcttccccactaaaggaacgggaagggacactgccacctggcggccagccgaggcatgttcggggagccgatcctcctccctgggccccccacggtgttgatttgtgggaatttgcagatctctgatgataatgaggggattcgcagtgtgtgatatgcaaataacacagctctgattagtgaaggaggctgcgagccttgcaaggtaaaagctccatttgccttctggcttgatgttcgctgatttcttttttaaccccccatttaattctgctctcggcaccttggataaaatatttagtggcaggaaaaaggcaacagatgcaagcaggaataaataagattttctgtatttagaatgaggccacgtatttcggagcacagatctatcaggcatgttatttatgtcttttgcaatttcccgggacccagatttctcagggtgctttgatttttctcaaatatctacagcagtaggggtccagggagcccagggagcacagccaggcactcactcacagtcagaatccagggggctgtgttatttaggatgatccgaaacgcgaccttgctgcctgcattctgttttgatatgtatcttgcctcattaaaagatgacaatctgcaatactgatattactcaggcagatggatttcccaaatgctgggctatagcctgggctgccagactgcatgaggtttaacatggaaaattaactgcagtcttgttctctggtctgccaggtccagcagtgtagtggaaggagcaaaggagcaggaatcaggagactcaccaggatctgccctctcctgtcctgtgatcctgagaaaatggcttggtctcctcatcctggaggtctccatagtggagtgggctcaacatcacacctggagtcaagtcaaggctccgcacgtcccagtgacctagagccagttgtcaacatctctgagcctcaaaattctcctttataacaaataatgtaagcagatccacagtcactaggaagattacaatagaattgccagagtatctagcattcagtaaatatttattaactagatagaaaaaaaatgtaccaggcttagtaacacccggccttcccatctcattagaggctagaatgctcaatggacacagggtgtgtcttagtctgttttgtgttgccataaaggaatacctgaaactgggcaatttataaaaagaagagtttatttgcctcagggttctatagcctgtgcaagacacatgcaccagcacctgcttagcttctggtgaggcctcaggctgcttctactcatggcagaagatgaagtggagctggttgtacagagatcacatagtgagagagaaagcaacagggtgtttaggaggtgccaggctcttttataacagcccgccctcacaggagtgaaatcaagcgagaactcactcacccttgggggaggccattaaccttttcatgaaaaatccacccccatgacccacacacctcccactagaccccacctcccatgacccacacacctcccactagaccccacctccaacattggggatcaaatttcaacacgaagtttggaggggacaggaagccaggccatagcagggcatatagcattggcatcaaagctagggtgttgattggttatgaatattgttggtcctgcctcatttatcaaggaaagaagaaaaaagaagactgtagaaagactaagttcagggtatacatgagtcttcaagagaagccagacaacattccaggatttcagaaaggggacatggctgagctgggtcttctctttgtggggagacatgtcattgggcctctgagttccaaagacacaacctggaaaaagcacaaaaagactgtctacttagaagatttaggatttcccgcatagtccccagggcctcctctgatcctttgaccaagatatgaaagccctgccatataagaagaggggagctccatgctgaggttaggacacagcactgatatgatgccggccttccttggtctatttgacacctaatgaggtggggacttgttgacaaagtccttccatcgtgaggtctgcacccctcacccccagcttgattgtaccattctgttttggaaatccccaccagaagtaccagcaaatgcttcttaagcttctagaaatttctatctgggattattttgttcatagagcaattctggcagccagagttacttctgcatctttgctttggaccacaatcacccaaaaagcattaggagaaaagagatcacagcaatggttcactcaattttcaacttccctatgctgtttagattttggcaaaagagtattcactgtgactgctgcttttcactataaaaagaagctgagatttcctgccaactatttcacaaaaacaaacagaagattcattgagagaaccaaggaagcatctgatcctacaacacacgaccaaaatatactgtctgtatcttggaaatgaactccctaagaggatagaaaataagtcgttcaagctcttctctaactcaagtataagcaccctataactggaattatgtcttttacctcctgcttattcccagggctgaggggaccattcgtagctgataatatcagttacaatcatgcaggatcatccaggaataaaaacattggaggaaggcagcatgaaagggaaagaaaatcctggttttcagaaaataacatggagacctcatgagctcactctgagtaatcacccttcagcagtagcatctccctatccagtctgctccgtttaagggaagagttcatctcaccacagtgtttcattgaagagctggtttttaattggccctgtaccacttaatttattttcatttgcattccaatgctgtctgccttgtactgctttacttcaaagctggatctaaaaaacataggctcttagaaggttgcaaacctgcaattgtacagaggctctgagaagcgaaatgatttgcccagtgaaatggggtagtgtggaaactgagagagctctgaagtctaacacccctggcttcacaattctacctccaccatttactggttgtatgaactcaagcaaattgattcacctgtcagacctcagtttcctcctctgtaagatggaactagcagcatcgaccttgtggggtcattgtgcgaatcgccatactgtgttagtctagcattgctagtcacttactaggcactcgcgaagtgtagctgactcctagtgttgttgctcttagaaaacacccatatgttagaaaaaaaaaatagaacactttttctgcctctgaataagtgcctaagatcctctaccacttcttgctatgaccacccacccagagtaaggaagacagctgctcccccagcctcagcaatgcggagacggtgtccaattctccactgacaccctagttttttctgtacggtgcatgggaaaatgtataataaaaagcaaagtgcgtcacaaatgataggtagtcctcacgttattagtagtaatagttgctatattgagtgctgtgggtccaggcagattggtttatagtcactgagatatgttgatctaataataatgagaatgaatagataaaggggtacaagctgtcagctgacaataatgtctgaataacatcagtttggtttgcttacgtaatgggtcttacatgaagaggagacactcggaactcaacacctgaactcctcccgcttccggcaaggagagaggcagaaggcgcccacgtggtggacagcagcccatgtagaggggccacagaaaagggtgatgggcatcctctctgcacagggcagagctgcagggtgttgggagtcggcttgctcctctccacctcctcccttctgccatgttcccacctgtctcagtcagtctgcagtaacagctatagaatgtcttcatttggaacttggagaatttgcacaaagggaagcagactggacaaagagctcagatcgggggtctccgggtctgggcacagccgttacccttcccctcccatcctccgttctctcctgccgccacccacactgtgctcctggtgagctagagccagagcgaagtggaacccagagcactgtttgccaacacccgcggcactagacaacgccaagagaatggcttagtaataatgagataataacttaatgaaaaacccctgcgagccctgcggggcggggagggagacctggtgtgtggtgctggacgcttcctgagcacctccctgcacagcctgcctctggagtttctcgcgcatggcggtaagcagggccaggcctcactctttccccttcacagtggagggtgtgagcagggcttcgatgccttttgctcacggtgtccagcagtggatgcgctggttggaacggacgtgcctataaccatgactcccaccgaggccttgtcctgcaagcccagttcccatcaacagctcattctagggagggtggaggcccagtaccgcaggcttgctgcatttgggtatttccaggtggctcaagtcaaacttaagagcgcgacccattcggaaaatcaagtgaataaagcaggatggcatggaaagggatgggggctttactgagagagggtgagggaggataggacgggacaggagagagagggatggaggctttactgagagagggtgagggagcataggatgggaaagagagggatggaggctttactgagagagggtgagagagcataggaccggaaagagaaggatggcggctttactgagagagggtgagggagcataggacaggagggagagggatggcggctttactgagagagggtgagggagcataggacaggagggagagggatggaggctttactgagagagggtgagggagcataggacaggagggagagggatggcggctttactgagagagtgtgagggagcataggatgggagagagagggatggaggctttactgagagagggtgagagcataggacgagagagagagggatggaggctttactgagagagggtgagggagcataggacaggagggagagggatggcggctttactgagagagggtgagagagcataggacgggagagagagggatggaggctttactgagagagggtgagagagcataggacgggagagagagggatggaggctttactgagagatggtcagggagcataggacgggagagagagggatggaggctttactgtgagagtgtgaggaagcataggacgggaaagagagggatggggcattactgagagaggatgagagagcataggatgggaaagagagggatggaggctttactgagcgagggtgagagagcataggacgggaaagagagggatggaggctttactgagagagggtgagagagcataggacgggaaagagagggatggaggctttactgtgagagtgtgaggaagcataggacgggaaagagagggatggggcattactgagagagggtgagagagcataggatgggaaagagagggatggaggctttactgagcgagggtgagagagcataggacgggaaagagagggatggaggctttactgagagagggtgagagagcataggacgggaaagagagggatggaggctttactgtgagagtgtgaggaagcataggacggaaaataccagagtgcaatagagaaggtgcaaaggagagctgcttcccacacccttgctcctggcctgtgtgtgtccgtgatgctgggtcatggtcaaaaacacggatggccgctgacatgggtctttacagagaaaggctccatccaatctgaaaggcctgcagcaggcagaacctatccgtagatgaacaccctcgctctccagaagacaagaagcgggagtcgcagcctattgaagtgtagacatgatgtctacacagccaccctgtgtcctgcaagagcccaggctcagagcgtgtgcaccgtgagggccgcctgtgccggagcaggccgcttctccgtagcaaccacatcccacagtgtggaggttcccagcggcgggtagtgcggaaaacagggaaggcaggaaagaaacttagccaggcactgagtgcgtgggaaggcaaaacactcttttctcctcccacggcgggggcgctccctgggcgatgctcacggagagtgggagggcgtcccgcaccgggcagagctgaagggtggcgggggtcggcttcctcctctctgcctcttcccttccgccacgcttcctacccacaccagccagtctccagtaacagatatagaatgccttcatttggaacacggagagacaagcgtgccgtgtgggaaggagagaagccgctgctggagcaagcgtggtcccagaggagagcctgatttgagttaaagcgagagggcaggagaagcagttgggaatcgaggcagtgggccgaggatggcccaggttcaagaggcacagtgggaggctgcaggtgtaaggagaaggacggctcaggtgagggctgcacaggcgctgaggggatggggctctgggtggtgacatctccaaggcaagagagcacgtagatttcagagcaaaactatctgggtcagaatcccggatccaccctttatcactataaaatgttgggcaagtactcacagtgcctctgctctctcatgtataaaatgtgaggaaccatagcaccaaaatcatggaggtgttaggcagatggatgtgctgggaggaaacctgtttactagggggctgggttggagatggggagcttcttatgatgtctgctgtcagcagctttaaaggagatgtgggtgtctatcctggtggtctccctatcagcctgggatcaggtggtgagtggcttcacctactaagcccaaagatgtgttaggaaaacaggccgatatctatcgataaggaaaactggccggcacgatggctcatgcctgtaatcccagcactttgggagaccaaggcgggccgatcacctgaggtcaggagttcgagaccagcctggccaacatggcaaaaccctgtctctcctaaaaatacaaaaaaaaaaaaaaattagtcgggcgtggtggtgggtgtctgttgtccccactactctagaggctgaggtggaagaatcgcttgaacccaggaggtggaggttgcaatgagctgagatcgtgccactgcactccagcctgggtgacagagtgagactctgtctcaaaaaaaaaaaaaaaaaagaaaatgaaactcaaagggtcatgtcatctccgtcatctcctaagtgctgcaccactaaccaggcagataggacagacacatgtccagaacatcgacgcgggcccatgtgcttccctagagcagcgcccccgaggcagggacggataggacttccacagcatcatcgtcctctgagagggaagaagcaacgtgggagggctgcatggccggtggggggtccctctgggatgtgcatgatgctgggggaggggaaggaggagctggagacagggcaagtcctggtagcagtgtcaccctaaaaagggatcctgatccagatgccaagagagggttcttgggtcttgtgcaggaaggagttcaaggtgagtctcagagtacaatgagaagacagagtttattgaaagttgctcagttacagagcagggcgtccttggaaagcaaagggaggaatgcgccatctttgtttttctcatataggggccttgtctatgtaaagactgaactaagctgtgtctgcttgggtgggggagccgacagcatgacaaaatgtatattattctattgttttaaagaaaaggatccttaacatttcagtgtgtaagtacatcaaagcataactataattatctccaaagtgataatgttaccagtactggacatcaaggctttctgttgttggaggagtttttgtccttgcaggcatcaccaagttgcttccttagctgtaaacatcttaggaccatgggctgtgactggcaaggagcgggccttgctagtttcaagatagagttggttttaaaaagatgttgccctggctctcctgggctcttgcttccctgacagcaggagtctcttctgcattttgtatactgcagctatctagaatctgcacactggaagaacgtaagtgtacaggaaccaggaagcttggagaggctgctggcctcctggtcttcctgtaggtactaaggaggcctcacccttctgggatccagggtctctccctcaaggcttgggttagggacattaacatctaaggaacactatccaccgcaggaggctgtagctctgacgtgcccaagaggaaagccctgacctacagtggcggccgctctgttctaggatgtggatggcacagactggtcagagagagccagaaggttctgggggtgagctgcagctgttggcccaggggtaaatgttgggttctacccagtgccatgttaagaccaagggaaagacatggtggacgggtgtggctctagtgaacgggatttccaccttagattctgttccccttgagccatttattgagcacctgctgtgtgccatgccctgtgcggggctgtttgtcctcctgctggggttgtgtttcttgggggacatagctctggccgcagagggattaatcatgcctgaaggacctgggaggcctccaggaagtgtggccactggacacagtctaattcccttctcttccgagaccttcacgcttgcctcctgcggtcctgcccaggctacaaagttgacattgtctcctaaacagtttctttggtgctaaattgtcaggttgcaaaagctatgagggaataaacgggtggtgcatggagctggtgtcactcattgatcaacgtgctattatacgctggggtacaaagggtgcccggtgacccttccgaatctattatttactcgaaagcagtgaccacatccacacacccagggtgacacagggtgtgtgacgaggcccacagatacatgccgatttgcaggggcacctgcactgggtctggggagccatcatcctccacaggagacagcgaccacctgtggatttttgaaagaaaggagtggcatggatttccccgagcgccacctctcattcctcctctcccattcatggtcacagcctgtgtttgagagaaggctgtccagctggggccatctgggtgtggggcaggatgaagctcacgtgccagtgtggaatcgacaccctcattctctttagtatcatgcagtccccacagcgacttctgcttcaggctagttccgtaacccgggaaattttgaggatggaaaagggcagggacaggagcggtcaggagtggctcagccctgagcccagggttttgcccagccgccttccgtctaggctgtccctccatccgcatccaagaagcggcatgcggacatctgtgactgtggaggatgcccatgcccctgtggggacaggaatccctctcctctacacagaggccctgagctgcttcctggggtcaggacacacctgcacaagttgaaaggccggctcttgttctttgaacaatagaaccaggaataattaatcatcggatatagttgggcagagaaactgcttataatttacaattaattaaccttccccttaaaaaaaaaactggagacctaatttcctgtctgatccacattgtttttgatatccattatttttcaatgtgtttttgttgagattaggaaatatttgtgcagaatatctcagtccgattaaggtgacaattgctcaggattttcgttgaaactgtgtattataatgaggctttctgcagcgcatcataaaaggaaaaattctttccatcatttaatttaaaactaaagccagactatgtaaaaaatattacatgtaattttaaggctataactttgttttgtggcgaaaaaattctaactttcagatgaggacaaaataaggtcagcattttttaaaacccttggaaaatccaaactctggtaaatctcagctggtagttaagtcactgtctaattaggattctaatttcacaatctcaattatttttaactttctggtgaatattaacagaatgatcagttttggcaaaatactaggaagaaaaatgtaaactaaggaaattaaaaatgatgatagggttcacaatccatattacctaaaacactcaaccagtcactgtatagatgagtaataacaaagtcagtctcagtataattgtgaacattccttttgaaattgaacatgtgaagacacatgcacacgtatgtttattgcagcactatttacaatagcaaagactcggaaccaacccaaatgctcatcaatgatagactggatacaggaaatgtggcacatatacaccatggaatactatgcagccataaaaaagaatgagttcatgtcctttgcagggacatggatgaagctggaaaccatcatcctcagcaaacaaacacaggaacagaaaaccaaacactgcatattctcactcgtaagtgggagttgaacaatgagaacacatggacccagggaggggaacatcatacactagggcctgtctgtgggtgggcggaaagaagagggagagcattaggacaaatacctaatgcatgcagggcttaaaacctagatgacgggttgatagatgcagcaaaccaccacggcacatgtatacctatgtaacaaacctgcacgttctgcacatgtatcccagaacttaaagtaaaataaattaaaaaaaaaaaaaaaagaaactgaacacatgtcaggagctgaatttaaaacaatgttttggtcagtaccaggacacgaatgacaggctgcctgcctgtccgaccctgggccttatagacagtgtcacttgataggatgttttgagacccggacatccccagcagcccagcatgcacaggctcagagcccacaggtgcacactggggttgtcatgggagacaggtgaggagactggagacaggcaggtgcagaaatgtctctgtcagtatttcccatgggttatctctcacttactagctgtgtgagcttcggcacattatttaaactttttttcccttagttcccttaagggaaaaaataaagataataatagtgtctacctggagtgattgcgttgaggattaaatgagttaacccatctacgcagttagagccggcttggcgtgtgctgggtgctcaccgactgctgggtgtggccatcaccatcaccacccttctaagaggacttacccggaagctgccaagtcttactggaattcaataagaaaacttacttccaaaaataaaaataaaagccacacacacattttccctgtaaatcttgataggaagaaggaaaaggtcaggatgttgccgagcccttgggttggaagaggtcggagtggggcgcgtcccaggtcgggaatgttaggacaaggtggcctctgtcttcatcgtgtgtcttgggtcccccttcgtaatgatactgtcctcaccacgtctttttattatgaaaaggaagagtggcgaggacttgagtgggactgttgggttgttgtgttgcagaggaaatatgctttttgcagagggcttagaaaacgtgcagtgaaaaaaacaatgagccttcttggccccaaggcctgtggctgctggcaggacagcggtcatctgctccaaccccctagggaagagtgagccgtttgctctttttctcttctccaacttcccagaacaatgagggtgatgaatgaagaggtttcccatgatagtgaggtaactctgtcagtagaagccctgagatgtccagaggcctgggctcaccaggccccaggtcagaaggctcggcagcgccccacacttggctttcggatcatctcgtgctgggctcatcttcccttgcggcttcctctgctccctcagttgggcccctgcctatacgtctccaggcccccgaggctggcatgcagccccatggtcataatcaatgttttatgacacctgcagactacaggcaatagtagacgattttacggataatagttaatagagctctcacatcgacaacccaatgagggcagcctgcttctatccctgtttacagaggaggaaactgaggcacccaggggctgggtcacttgcccatggtcacagctggtagggggcagggccggatttcagcctcgaaagtctagctcctgaggccatgctgctgcctgccacccatcccacctccttaaggtgctgtgttcccaccacttcctaatcctcaatctcctctcccctccccatccaggaagcctgctaggatggtccttgtccatattctccttcctggcctccacctgatgatagcttgttgtgatacttgattcagctcgcgagatattcctagaacaacgagagaaaaatgaaggcgcattaggcccgccacaatcaaagctgtcgttcccttctccatccctcacggcccccgaggaacaggccagcccctttccacccgtcacatcccctgaagaacaggccagccccttctccatcctttatatctgctgaggaacaagccagccccttctccatccctcacggcccctgaggaacaggccagccccttcttcatctttcacggcccctgaggaacaggccagcctctttccatccctcacggcccctgaagaactggccagccctttctccatccctcaggtctcctgaggaacaggccagccccttctccatccctcacgtaccctgaggaacttgccagccccttctccatccctcacgttccctgaggaactgggcagccccttctccatccctcacatcccctgaggaactgggcagccccttctccatccctcacatcctctgaggaactggccagcctcttctcctttccaatgggtgtgcaggtccctccctgcgaggccctgcaagtgtctgcaaatgcaccagctgatgcccactgcccagtgggtgttcagtgcactgaaaagttccctctcctcccccactgcagccctcctgcctcacttggagacaatgcagaaccaagatgggatcaatagtcattgatttctcttggtcttgaatgatttttacacaagtcattttgcaataagagggccttcgtacggtgcctgtctgcactgagggcgtgggatgacagccatttttgctcagatttctgcttcctgatccacggtaagatgtttcctccctagctggggagatcctcatggctgaagacagtgtcctggcctcttatctatcctctggagagtctgcctcacagcactggcatagtcgtggtgagcgcaggcactaggatggaaaatctccggcacacgggaggggcacgttcaacaagagttcaggataatccctgttaccacaggggtgttcaggccttcacaggttggcagagggcccaagtgtcatctgctggtcacctcagctctgtgaggaagaaggggtgcagaccaggaagtggctcagggaggtcggaggccagcccaaggagggggtgcctgagtggccccaaccaagtgccgcgctctcccccccgccctctccccgccgccctctcccgccacgcacggcctcctggcagctctgccttttgggcacacgcaccttccgtcttcactgaatccactcccccttcaggtgggcaaacactgcctcttgcagacatgttcttgcctgtgccctgtcctgggaactgtagttggcagttactttgaagagcttaggaaacagcatggagttctgtcaggtggcagacattctagaatctctctaacaaggctgagtcggtgtgtcagtcagggccgggaaacaggccgtggagctgcctcagaaggcccgcaagttcatggccacacctggttctgtgtaggaccacatgccttgtatgtcccattacattgaaatcttttcagactgtgatgaaggaaatacagattttttttttttttttgagacagagtctcgctctgttgcccaggctggagtgcagtggctcaatctcgactcactgaaatcttcacctcccaggttcaagcgattctcctgcctcagcctcctgagtagctgggattacaggcatgcaccgccacgtccagctaatttttgtatttttagtagagacggggtttcaccatgttgaccaggctggtctcaaactcctgaccttaagtgatctgctctcctcagcctcccaaagtgctgagattacaggtgtgagccactgcacctggccaaaatacagattattttaaaaaagacattgaatgtttagaactgaattaaactgataactgcaggtttttgtttgtttgtttgtttgttttgttttgtttgtaagaagggatgcttatattcacagagtttgaaaaacaagtgacctaagccaacccctcattttacagtagaagaaaggcagcccagagaggtgggaccagagctggagcctgggtcccaccgcctgtttgcgtccttcccgtgagagcacgcagcctctataagcagcaggtgggacccaggcgtttgtctatggattttcctctcaaagttgctcttctctttactagggcagatcccaattttgaggggcctagagtctatgaaatttgggggatcctctttagaaaaaggacagaagattgtgaatggaagcaaaggcccatgaaggggagaagctctgagacccagcttctccagccccctggtgcgaattcacccctcgccaccaccccgcagggatgctcccattccacagcaatttcccgcagactctccagaagtgtgcactccggctcactgcttccccagtcttcacatgtttgcttgtcacttgattatcctccccgaagaggagccacttgtactttaaatgcctccttcacatcagcaggcaattaacagtagggaagggagaaggagggtgagcagtgaggcttctcaatcacacaactcaagagcacggggacgttctcccaggagcagcctgtctcttgtgcctaaagcacaaggggcagcggcaataggacggaaggggaccacccacgggctggactctcgaggccaggcagaggccactgtgcggtctttccttccgcttccctctccctgagccttatgcaaatccggctcttagcacagcctttagctcttgtctgaattccaggggaggcccaagatgggaccccctacttcaaaaataagcttgaattcaaacctccagcattgttccacagtgcgcaggccagaagacatccattctgttcctccaattccctgtaaggcccctctctgtgtccagccagatagcgtgtctccaatccatggggttgcagaaggggctcgctgcctgtgcactagatgccaatacggtgacaccaggattttcagaaaagaaaagctttatattaaaagtctattcccagctgggcgtggtggctcatggccttgggaggccaaggagggcggatcacgaggtcaggagttcaagaccatccaggccaatatggtgaaaccccatctctactaaaaatataaaaaattagctgggcatggtggtgcacacctgtagtcccagctactcgggaggccgaggcagaagaatcacttgaacccagcaggcagaggttgcagtgagcagaaatcatgccattgcactccagcctaggtgacagagcgagattctgtctcaaaacaaaaaaaagtctattcccaaggagacaggcatccagctcaactctgcctccctgtgctggcttcaaggcagtaattttatttttaaaggaaaaggattcagcaggcggattctgggattagcaggtgattggtggaaggaacggggaggtttggaaagtccttcagcacacacaattatttcttcacgattactcatgggctgtgtgtgcaaattcaggggggtggggtggaggaaattcagtccatgacatcagcaagctcattctgcacagaccccagttgaccaacttggttctgacagacttcagccagttctcttatctcggggcggagggagcgtcagtgtttcagcaggttgtttctattcttgtctgccattctgcgagctcaagaacttctgttagccattcgtttctttaactctttgaggcattgtttcattattaggatgcttgcttatttcttgtctcttgagcaactgagtgggtggatgacccagtcgattaacaaatgagtgagaaacgagaacatccttgccacactgggacctgtttgagcgtgaggcaggtgagcagaagacatcaggcccagaagttctggaagctccctcaggtgcccacaacacaaatgaagaggaaagagagaagacaaaacaaaaagaagggtaaaggagcctggcatactggctcagccttcctctttcaaaacttttgtttttttttttttgagacagtcttgctgtgtcgcccaggcttgagtgcaatggtgcaatctcgactcactgcaacctccgcttccctggttcaagcgattctcctgcctcagcctcccggatagctgggactacaggcgcctgccaccatgcccggctaatttttgtatttttagtagagacagggtttcaccatgttgaccaggctggtctcaaactcttgaccttaagtgatccacccaccttggcctcccgaagtgctgagattataggtgtgagccaccgcacccagctcaaaacttttttgaaactaaatttgagctcagcgatctaaaatacaatggcataaaactgcaagtctataaactgggcatagctctttcctcctctgctctgcaccaactggggtgaccagaagggactgaacagtctaggggcaggtcttgctcactcacgcgtccatggctgacgctggctgctagatgaggcctgctctgtgtcagccaggacaccaaatgtggcctctccatctgaccagggcttgctcaccacatagaaggtggtgttcagagtgagtgacccaagcaagagagagccaggggaaagccataccaccctgtgtgaggccgttcttgcattgcgataaagaaatccccgagactgggtaatttagaaagaaaagaggtttaattggctcccagttctgcagactgtgcaggaagcatagaggcatctgcttctggagaggcctcaggaagcttccagtcacggcagaaggccaatggggagcaggtgcatcacgtggtgggagcaggagtgagagggagtgagtaggggtgagggaggcaccacacttttttttttcaaggttttattttatttttattttttattatactttaagttctagggtttgttacataggtatacatgtgccatgttggtgtgctgcacccattaactcgtcatttacattaggtatatctcctaatgctgtcatccccttcccccaccccatgacaggccctggtgtgtgatgttccccaccctgtgtccaagtgtcctcattgttcaattcccacctatgagtgagaacatgcagtgtttggttttctgtccttgcgatagtttgctcagaatgatggtttccagcttcatccatgtcccaaacagtcagatctcatgagaagccgctcactatcatgaggacagcacggagtagatggtgctaaaccatttgtgagaaatccaaccccatgattcagtggctcccacctggccccgactctagtatcagaatgacaattcaacatgagattcagacagggacacacatctgaactataacacaccctttatgacctagtctcacaagccatcactttctgccacattctcttcattcaaaacactgccctggttcaaggagcaaagaatcacctcttctttggggagtctcacgccctggaagtagcactgaggctagttttggaaaatacagtgtgccacactcaccaaggcgtcagtctctgtgaagtaaattatactgagacatcagtgacttcatagagaaagggcatgaataacccctaaccacaaataatggcaagaagtatccatggaggcatcttgggaagaggcttctgatgttccatgcctactccaggcagctgtgtgccccacggccttccgcagtagttgaattcgcagactgagcatggcattggacccgatggccttgcttccactgagcctctgcacaacactggccttgggaaagaccacaaaatagtaaccggcagggctcagtagacccggaagcttagaacctgtagaaaagagaaggcttcctgtgatcctcctgcttcaagcaagggctccgccatctctcctgcagataaaaactcaggaacattttatgttctgcttttggagggagtttataactttacattctgtcttaaagaaaacacaagttttgaattctgggataccgagttcctaaaagaaaatccaggcaacaggaggctcccaatgtgtccaacctgcctccgatggtgcaatgaaacagcaagtactaagaaaatcaccaaagtgtggaagtggcaggggactgctttaacagcaagagaaggagaaatcttagtcgtgctagttccacatcgtggctgcctttgacttctggccatttagaaatggctctgctgccagctgggtgcggtggctcacgcctgtaatcccagcactttgggaggcccaggcgggtggatcacccgaggtcaggagtttgagaccagcctggccaacatggtgaaaccccgtctctactaaaaatacagaaattagctgggtgtggtggcgggtgcctgtaatcctagctactcagaaggctgaggcaggagaatcacttgaacctgggaggcagaggttgcagtgagccgagattgtgccactgcactccagcctggatgatagatcgagactccatctcaaaaaaaggaaggaaggaaggaaggagagagagagagagagagagaaagaaagaaagggaaagggagaaaagaaaggaaagaaagaaaagaaaaatggcttgctgccgagggaagagagagagatgaaataaatatgtctcctcaccctcttcctacccctgagctaggcacagttcgcttgtccatatgatgagatatagatgcgagggtttagctgtggattccacagcctccatcagcagcctgcgtgctcctaataaaaatgcatcctagcctcccaccttggcctttcctcacccagaaaaacaaggccagtgaggtcctaaagagcctattctgcaggagcgcatgtgagaagaactcttagagaaacagcagcaagttcaatttccccagagaaccctaaagcctcctatttcccttcagcctcacgtctgtgctccctaagctggctttggatttctctttagctggacttcattggcaggtgcggcaggagggtgtggggagccccctagatacaactgccaaggagactttaagtctgcctcactcccggcctccctttttgtactttctagaactcctcttggtgccctctctacccacacccctgtgccctttctgctgtgcactcaccttgcacagacctgtggatttggatgccccacctccatctgcaccacacctgagctctgtgggcgctcttcacctctatgccctgggcactgcatcttaggccttggatgtcatttggaagcagagtctctcttccttgttaaagcattgctgggatacagaggggagagctgtcctttcccgggcttgggtcctttgtagaagctaaaatggcacctgttgggcagctctgtcttcatcttgtgaatggaattgaccactctcgctcggtggatttgctagaggagcttcatctgatgttatactaaggacctcaagaattcaccttattcttgacctgttaggtccatgaaagtgttactgtaacctgcgtggccaatgagatctccactccagccagcaagaagtgggaaagagaggcggtggtcataccctttctccttaaaggcggaagacaggtgtcactcatcaccttttctcaacccagcagcaggaactcagcacacacccaacctcacatctggggagtctgggaaaggtctttatcctgggaggccgtgtgcccacctacaagccattggttcttttactaaaaagagaagggagtgtgggtgttggaggacaatgagcaggttctgccattccaccttccacaagaggcttctctaatttcctccaataagaaagaggcctctctgtattcccagaccccatagttctttctggtttctaccttgcccactttccccgagttgcaagttgcagttctccttctgtttactgtattacaaacttccaagctttgtctctactttactataccctagggaattgtgtgtactgagtactcagtctttgttcaataaggttaatttccctgaacctccaattcctcagttgtaaaggggcacttaatataagcttgtaggtgcatcacattctctccagagagagaactcactcctaagaaagcagcaccaaaccattcatgagagatccacccccataacccagacacctcccactagtccccacctcccaacacctccacattgggaattagatttcaacatgagctttagtggggacaaacaaaccacttccaaaccacagcacacatatgaatgagatcattcggcattcgtctttctgtttctggtttatttcacttagcacaagtcctccaggtttatctactatgttgcaaatgccaggatttcctctcttctagctagtcattgttaaccagaatgtgcaccaaactcacctgaagaggttttgcagaaaaggagcctgtatcctcctcactgcccccaccaaataccagttctcctgcctgaagtgcagcctcagcatctgtataagcagcacacacatgcgcacaacagtccaatggagtcccctgcaaacctacctaaacctcactaggcaaataggaaataatagtggtggtcacctcttcatctgtcaaacaacctggaaaatgtgaagattcctcttcattgttgcattggcctttattaccttgagcacaaagggatttttctcctactggatatgaccttaatgctgcttggcaggaatgaataacactccagataatggcactggcttcttcaaggtatagtgacaaaaaatgaaaaatacccagcccagatcctacctggggctgaagctctggatacaacttttgccatcttcaagagagaagcagccattgaacaccgactgtccccggatgtatctttcttttctgatgctaaaatagccccccagcaggacagggaaggtgaagaaaagatgtattctctagttttcccaagttaattatacttgctcagaaagccaagtgattcattttgttccaaggcaggcgtccatgcaattaatttcgttgatgaaataggttttcttctgcaaaactctgcttctaaactgcatttggtgcatggcatttaagccaactgcctcattaagctggaatcctgcagaaaaatgtttgcagaatagggacatttggaattaatgctaaaatgtcaaggtttcttctgcccagcacttttttaccccttagtttcttatacttcattatcacattaatgagcaactaacgtacaggaaaataaaaatggcaaggagcgatgtgttcaaggacacctagggaaaataaactaaagctgccctagttttgtacggctggcattttggcgtggcacaggttcttcgcatgtgccactgtctcgatgtggaatgacattcagaggaactaccctctgccatcacacacaccagatacctgtcatccctgaacccgatgacccaatggtcgctaagttcccttcttttattttattttatttttttgagacctagtctcactctgtcacccaggctggagtacggtggcaagatctcggctcaccgcaacctcccaggttcaagtaatgattctcctgcctcagcctcccgagtagctgggattacaggtgtgcgcccagctaatttttgtatttttagtacagacagggtttcaccgtgttgaccagaatggtctcgaactcctgacctcaagtgatccacccacctcagcctcccaaagtgctgagattaaaggcgtgtctctaagtttccttctaaccgttacatttggtaacctgtagtgatggttttgttctacctcccagttctctgaagagtgaattgagcttcatggaaacactctggcatttgctgataagatcgatggaaatagagtattctcagcccagccttgtggccagccttcacccacatttttttcagtctcttgtcccaacaagcatgacccactttggactgtgctggtcagaaccaagcagcagcatttcctttaggtcagagagcgagtctagaaatgagatacaaacaaccctgggtggaaatgaggggtgacccttgcccccccttgcctagtggcctcttgtggaacctacggggtaggaatgaaagtggcctgatgttgcacgtggccgatgatttatcatccctctggtctcagaaaagattgctttgggttcaaaggaaagaaagaaatgagttgtctcttcgggggttttgttgttattgttgtttgtttgtttctgtccaaagctgcttcatttttaaagctcttgttgcagccagccgtttttctgttttggattttcccgagtcggctgtgaattaatgtcccgtggaaaccactgcagggctcctctgctgatttctgtgggctctgcaccttctcgctctgccctgtgaattctgctcactcccagggactctactccagccccattggcccctttcttgtggccctgcagcgcagacgtgattgagcacaatcacccacaaattgcattgcaaatggtgcctattttttccagcagaccatctgctggagtcaattactcaccattccaagcgagcagcctgggcagatctggtgactctgcataaagtcacttctgagtcacctcatcccaaactcgcacctgaacgtccacctcctggctgccaaagcgactggaaaattacagaccctggaggtctggcttccttcctttgtcttctcctcactgacctccacaggcctctgagcttctattggcactgccaaagcttctgaggctgtgagacagacgcagaggggaaggggatgctagaggcggctgttgtgcccctagctttgcagatcgggactcaagaacacacagcaggactggggctcaagtccagtgcaccagggctcctgaattcatttttccctgagcactgctctccatactccgggatgcaccagagtacaggaggtcaaacccgccacagggtttgtatttcaggagactctactgagatgttcaggagtctgcagcagactcggcattgccttcggtggggggctgtctgctggggagtctgaccaaggcaagatgaggaagactcacgtgacaggggagcgaggctcaatgagctgcagcatccccatcagtgccatgccagatgccacagacatctgggcagggaggggcagggcatgcaggcacatcacaccctcagccccactgcccttagagcctggctcctgctcccaccccaggaggatcatgggcagcgtgcctgctgcaggcctctgggcttggctgtgaaatgccaccatggatgacactgacctggcgctaagccccccttcatgaaccctcctcccggccagctggtctcctcctggtgcctcccgcagaacctgggaggctgttgatgtgggctgcttcttccctgtctgggactgtgccctcctgtgggcagtcagcccttggcttccttccaatttacattgttctgttgcatttgatgccctcgttttgtttttgcaatgtgttttcaggcttcttaatcacctttctacactacaggtacatagagcagatttatggtacgcacctaataatagcgagttgaatgggactcatgaattatattaatcattattttagaagcaaatctagagggaattagtttacactatatatagacccagtacaagacagaaccccttgacctaagagctgttcacaatgaaatgggttctctgactggttacccttgggaagtgtattctcccaacgtgttgaaaaaaacgctgtagaaatttcccctctagaatagatatcacaccctacaaaactcatctgtcgttaaaacactaaccaggacactgatgggctaggaaggaataatgggtgtttctggttgaagcccaaaagaatcagtctttcatttcagtccttctgaagatggatccattttggttttctgccatgcatagtgagcttgtacccttcttgtaagaagccacacagagtgagcttgcaccctttgtgtgctgcaaggagcatgctgggcctttggactcattatctgaggagggagctctgtgtgtgcgtaaatccctggtctgcttttgggcgactcagcctctgccagagttcactttctcatttggttccgtctgcatgggacacgcttccatgtgaatttactttctccagtgctgtttttcaaatcatattaagtaataatcaacaatagtacaatcatagttcaactcaaaaggacgtgttgggctcatagtgctcaaatgtgtgcaaagaaaaaaaaagtgtttccagacgattagcatctgtttgattgagctttggttaatggggttttcctgtgctggacttagtcatcagcatcagacatttcttgagcccccatggaatggaagcatgtgcagaacacagtgaaggttcctcaaaggttgtagcagataaggggctctgcagggactcgtttctttcctggccacctcatgttcctgctggtgcagctccaatttccactcacttgttactattcacatttctctactctgttttcccttagaggagattttgaagacacacatcgcacactggtggtctccggatggcacgagactcgcctacgccgccatcaatgattcccgtgtccccatcatggagctcccaacttacaccggctccatctaccccaccgtgaagccctaccactatcccaaggtaggcaaagggacaccgcacagcaaattctttatattattcatgaacaccccaaccctgctcactcagtgtgcagacgtgatcatcagacatgtgtatgagcaaagcagttaacacaagaaagactaatcatgtctcattacattgcattacattcccgcctctgttgagctgagtcattggcaggtttacttcttttaggtaaccgaactaatgttcatcacctgactcagcttcactgaaccaaaacacacagggtacctcccctcaccactccccagtgatgaaggtgcacctgccctctctcacgcatcttatttctactttgagtttggcctctgggaaggcagaaagacttccatctgcccctggtcccctgggtctgggcaaggctgttttgttcatggtcactgctacgggctaaatgtttgtgtccttgccaaattcatacattaaaatcctaacccccaaggtgatggtattaggagggagatcactgggaggtgacaagacatggagggcagagccttcatgattgggattagtgcccttatgtatttgtctattttcatgctgctgattaagacatacccaagactcagcaattgagaaaagaaagatttattggacttacagttccacgtggctggggaggcctcacgatcatgtcagaaggtgaaaggcacgtcttacatggcggcagacaagaggagagagtttgtgccgggaaactcacctttttaaaaccatcagatcttgtgagacttattcactatcaggagaacagcatgggaaagacctgctcccatgattcaattacctcccaccaggtccctccctcatcttgggaattcaagatgagatttgggtggggacacagtcaaaccatatcaccttataaaagagaccccagagagacccctctctgattccaccatgtgaccatacagcaagaaagcgtcctctgtgaaccagaaattgggccctcgccagatactgaatcagccagcaccttgatcttggacttccagtccccagagctgtgagagatacattgctattgtttgtgagccagtcagtttatggtgttttgttacagcagcctagaggggccaagacagtcatgttctgacccaatgagccagtagaacagcaagtgtccagtggctgggagggaatattggggggaacagggatatccaaatctcactttattaccaaatcaaagcatcccagtgtgagtggagggcctgatactaaaacctccacagccactcagctggagagaagccagtgcccgagtatggacacagctcccatggacacatagagtctgccatgctggcttctggcttcactaggcttctccaagacccctgggcttggtggaggtgagcagtttcctgcctgcaccctgcctggtgactggaggctcacttcctgccatgagctgcctctgccagggggcatttaaacctcagcatcctagcccaccagagagctctgaaagctgatggtatgtgcctgctctgccataatcatccccacagaccagctggcttacagtttgcagcaagaggagtgataacttataaggcagatatatgaggccagtgaggttcccagagtcacagcctagagaaaggaaacacctggtgtcttagtcagttccagctgccacaatgaaataacacagacctaggcagcttaaacagcaggaatttctttctcacagttttggcagctggaagtccaagattagggttccggctgatttggttcctggtgagggctctcttcctggcttgcagacagccgccttctcgccatgtcttcacatgaaggggcaagagagggctctggtgtctcttcctctccttttgtggacatggatctcatcacaagggtgccaccctcatgaccttgtctaacctcaatcacctcccaaaggtcttacttccaaatagcatcacactgggggttagggctgcaccgtatgaattgaggaacttgttccatccatacacctggtaatacaggctcctttcaacagcctttgatcagcatggccaacatctaagagagccccagaaggaagaagaatgagacccttatggccacagccttcctttctgccttttccaattctgagagcatctggatgttaacatggcatggatttgccttcgacagaattatttcactcctttttcagctaaccttgattggtcttagtctgtagcatgtggaagggtccagcattttagttggaagcataattaaatagagaaaagtgtatgggactgatgctagttccttctaacccttctacatttcttaccagctgttcacagccaccccacccgccagaagagctggtggctgtctgaccttcatccaacccagagatgaatggttcccatggttatctttttgtgggagtttccccagtctaggagtgataacctggaatccagtagggtgcccttgattttacagtgaactctcagaaggtgctctgaagctgggattatgaaatcccagattactcaagatttggggtttcatattttaatagaaaaccaacattctggctgacagaattcagatgctccttgccccattcccacccactcctaaatcagaggcatgaataggcaagcctgcctgacatgccctgtcgtgggcctgatagcctctgtaaacctgaacatcttctgcagggtggaagtgagaacatcagacaacaccccgaagtccccctaaagaggaagccccacatctctccccagacccatacttgtcccccagagagtggggaacagggaagcagaatagtgccccagttcctttttgaaggacttaatctctccccatgctgagcatggccaccgctcctcaatgtccatcatttgctcacctccaactctccccttcctggcatccaatccatcttttctcccccactcctcttctcgtcttctcttttaagcaaggggctcagtactcacttgacattgccaaaccggggagttgggtggaatgggaagcggatgggattctagaaaagcaagaatcagcccacttagccctttgtccttttgaaaccctacacatgaaccatttgttctccacattaattctgctccttaatatggagctccagtgtcctggagtcccacctcggaatctcccaggaaaggctttgcagagctgaagttcactcttgtataaggctgcttgttcatgtctctgcccctttttaatccccaggctggaagtgagaaccccagcatttccctacacgttattggcttaaatggacccacccatgatctggagatgatgccgcctgatgatccacggatgaggtttgcttccttctattatgttaccaaaaaaaaaaaaaaactaagatgaatgttcaatgtgcatggtctcttctggatcagatttatcttacaacaagtttaaacatccaagaaaaaggtacctttcctaaagatttcctcactgctttatgattccattttctaggaaaagaataccattcaccaagtactattattttttaccttaggtcagatgcaggttatcctcctgagagctgggctcctctgggaggggcatggctgggccccaggcctgcctcagggggacaccagaggaaatgatgcggtcttcccaagacaatccatggagtctgaccttccataaatggtgctctgtatttagagcattttttagagcatggagcaatttgccagtggcaaattctattctaataaagccacatctcccagttggtaaggtcgcaaccctgtggaaggtattaacaatgttattgagttattattattagcatctgattgtggtcgcttttttctaaatcaaaacaactgatttaggatcgaatgtagtgatctgaatatcagtttagtattttccccaaattcaagcagcgtggggaatgattatacttccagagtccagctataacatcatcagccttctctctgttaaggatattgatgagagactcaaaaagaggaggggattttaggggtgccaggacccacccaagtatagattctgaaatttcatgaatggcactatttaaactaagaataactcattctgaggctcagcaaagacccaacccatattttgctatacctccagcctgggcctttattattccattcaaagctccatattactagtagcttctggcagcttctggaaagggcaggaatcgaggcctcaggtctagctcggggatggatgctccagcacctggtgactctggacctctctgaatgatgtgctggtctcctgcagtggctccagtgccacctttgccccacaccctgagctcctgcacagaagcccgaggcctctgcagaattctactgcgattccttcccctcatctttcttcagtgaaacttataatgttgtaagatccccaagtggatggatgaagcccagaagcccagtgctctaggaagcgtgaggcactgcctgcccctctcagccctgcatgggtcttctccccaacataggagggcctgtggctctagaggtttaatgaacctggcccccagcagctggtcccagggacaactggtcactggggtatcagcccaaggtgtgcgctggtttggagagttgaattgatttggctggtgatatttttgctgagatttaaaaaaaaaagttcagatgattgctttggcttttctcctaaagttccatatattttattgttttcctttcagcccccatccctgccaagcctcctggggcctggtccagcaaactcactgaattaatatggaaagtcacctggaaaatttcagccatctgtttgagttaattgaaaatctcgtttagtcaatttggtgatgctgtttccacaggcttgattagcttcaaggacaatgaaaaattagcgtcagccaggacttgaagcctggatgctgggcttcaggttttctggttgctctcatttcctaagctcaatgcaataatgcattttatatgcaatgtaaatttgtagcatgtaaatgtcacactttctcatactgcttctctatcacacatctttgagagtttttaaaagtccacacagatatatcagaaatcccaggctcaatgtagagcagatgtttagtatttgccagccatttgcctgagcactgggaatttggtggcaaatgaaccatggagttcacagtgtggaggggaacctggatcctgaagaagtcattactagcaagtaaatccctgcaggtgtgagaagggctgtggaaacgtgtggaagaggaggccacctggtctggagggtggcagtgtcacggctgaggtcagagtttctgcatgtccatgctactgacatttggggctcagcaattcagtgctgtagggggcagtcctgtgtgccgtagagcactaggcagcatccctggccttacacattagatgctgtcatatctgccttttccccctccagttgtgaccatcacaaatgtctccagcattgcccagtgtccccagattgaggactactggtttcaagtgaaggttctctagccaactgcctgggttcgagttctggctctgtggactctgtcaagttactcagcctccctgcttcagtttcctcatctgtaaaatggagataattttaataagaaacatgtttactctcgtggacagttgtgaaagttagatgagataaggcaaggatcatagggctggttcctccaatcgttccatcttgtggctatacataccccttgtatgtggacaactctcccctgtgtacctcaacctggcctgggtcaggactctaggttcaaaaagccaaccacccaaccagcatttctactgggagtggtcaccatataatttttaaatggtcaaattgtgattctcagacaaaatcaatcaacatgtgtccaagactttattaaactcattaattaataagggaaccagtgagctcttaaaaagaggccatagaaccatcgagaagctagttgtatagaggcaattgaacaaggacatcctagggtgagtctgccgggttactcagccatccgggagagacgcctaccccagcagggttgagaccgcccctgcaattggaaatcaagcccagcatgtccctggagaagggcccagtgatcccacctgcctctttaccaccttcagatccatttgctgacactgtctacacagcatctcaggccgaacccggtcaaagccaacctcccactctccttgtctacacctgctccctgcagtctccccatcatggtccagggcaactccaccttccaggatccccggcctcctttacgtccctctgtgctggggaccctccttggcaggtgcctggcatcagcctgcaaccccccgccgttccccactcctccctggcctggcccaccagcactgccccctcctgccccacccactgctgaccccacacagcagccagagtaaccctttaaatgacatcaggccacgtacccgctgctcccagacatctagtggcttctatttctctccaagtaaaggccagacttcctacagtggcctcagaagcccccatgatagatgatagatagatagatagatagatagatagatagataaacagatacatagatagatagatagatgattgatagacagatagatagataggccatgcaccctttctatcccccctcacatcggctgggtcactcccatacgaggatctgcacagaggctcccctctgcccagagagctcctccccacttaggtcctgatcaaatatatggttcccacagtgacttccctgataaccacatttcacatggcagccccaccccgcttccattttcttccttcaattcatcccagtggaatttttagatacttttttaaattgtttcattttcattttcccgcctgccacctagaacaggaagttgttgaggcagggacgttagttcctgtggggcgggccctggctccagttctgcagcagggctctggaaccttggctggatggatgtattgacttcaaatttagccggtaaaatcttatttgcatgggattcttgaagcttgagatatcttcagttgtgctggtacctttctaagaaccaaaacttacttgctatttagccatggatgacatcttgtcctctcaagcacaagatgctaaaggaactaactgaaactaagacacctcgtctgtggagggacacaaaaggaatgaaccctaagccatgcccctgagcacctaggaagggagacatgcagaggtttctggaagcctgcagtttatttcagcaggctagctcacgaaccaagaggaagggagaaagcagttcatgtatctgctatctaacctttatgccactcattttcaattattttttcctgtttgtttgcttgttaactagattgacttctccgatggttctcagatgcagggagagttaagtctgctctttcaaatctttgcattggcaagcacttactcatcatccatgtggcatgtgctgtgtgaggcccttgggtgattaagacgtgtggcctctcctaatgagagctcacattccaagaggcctggacagcttgtagccagagtctgcatggaagtgtggaaggagccacacctaggagcagaggtgccccttgtggggtgagtgggaagtgttcaggatggttttgcagatgtcagaaggatcccggggcaaaattggaggccctcttgggaaacggttctattaaagagaactaagagcggtgggcccagagtagagctcagccttccttgggctaatgcagggacccaggccttgttaagctgaacctgaccaggaaagaataaacactgtctatcctgtgggtggaaaaaaataaatgcaaatcgctgtgctgtggtttctatgctttcacacagaaacccagctgcactgataaaacaaatgcgcttgttttctgctggtttcctccggcctttcccgagcagttgagctgcgtgttgagttaagatgcggcagatagccagcacgatcattctgaagacatgttgccctgtgctgatatgtgctgttatttgcctccaaagatcctgtttggatgcagcgcagctgctcttctcctgattccctggcaagcagaggcggtaaagggctcccagaacccaagacacaaaaccaaccatgtccctgatgcacctgtgcgcagctgtgggggctcactcctccaccacccgcttccacggctcacgaaaggctcagaggcctctcactttcattttcttttgcttccatttatttgttttgatcccaagcaccaaggatttagatgctgtgcagctcctggcacagaagcatggtcggtccatgcaggcctctctcattttattgatttgctctttttcaactttagtccctactcccatgccctcgccacctcataggcacttatgtcgaatgcttagaggacctttgttcctctgtgtttttgtaaagcctgtattgttgcttgggtatgtgcgcgcttactttacatcaatggcattgtgatagagagccagataagctacaggatagaaacagatagagctccagacatagatgtctgtttctcctattttcctgtgagcaccatgtggagacctagcacacccatgtgtatttgaccaacccacggtttctaactgcacacagtgatgccagatgcccccagctcctgggcagcttacaacctcatggccttctctgcctccaggcttctccccaatatgcactgcccatgacacctccatgctgaccctgatgcgaaactcagccttctctctttccaatttatacaaaacatggtatgtgcacgagttttgggaaagctgagggtcatcagggccatgaaaacagcacagaacaatagagttctcatacctaatggcttgagcacccccccccaaaaaaaaccaccaccatcatcagtaccacctcttccccaaccttcaccacctatacaacctccaccaccaccacaccaccaccaccacaacctctacaacttccaacaccaccttcaccaccagctccaccaccatcaccaccaccacctctgtcacctccacaacctctacaacttccaacaccaccttcaccaccagctccaccaccatcaccaccaccacctctgtcacctccacaacctctacaacttccaaccttcaccacctgtacaacctccaccaccaccacctccacaacctttacaacttccaacactacaaccttcaccaccatcaccaccaccacctctgtcacctacacaacctctacaacttccaccaccagctctaccatcacctccgctaccaccatcacctccatcacctccacaacctccaccaccagcaccccaccatcacctccaccaccaccaccacaactacccccaccatcaccaccatcacctccatcacctccacaacctctaccaccaccaccacccccaccatcaccaccactatcaccgctatcaccaccacccccaccatcatctccactacctctaccacatccatcacccccacaacttctaccaccaccaggtccactgtcacctccaccacctccatcatctccacaacctctgctgccaccacccctatcaccacctccaccaccacccccactactatcaccaccacccccaccatcgcctccaccaccaccaccatcatcacttctacttccaccaccaccactgtcagctctcacttggtccctgttgctctccattcttaggtctcctctgcctccttccctatcataaacaagctctcctgcctcacatttacaatgtcaataacctgtcacatttacaatgacctgacttgcctatggttgcacttttaattagtagtagaaccaggacttgagcacgagtcttccgtcaccagagctattgctcagcattgtttaagagctgtcacgcctactgtatttccctttgtgcttgaactttcaggtggcacaaagctcatttggagggtttgctggcaaaatctctgttcttcctgctttcctccctcaggctgtggtccatctggatgttggggttgttcagacatcttcaggtgattcctaagtgtggccaaggcagagaagcccttctcagcagcagcattttacaaattatagctatgcccaacccccagttccaccccatccctgagtctgccatcttacctaaacatagtcctaacctctcttttgtctgggaagatatattattttatctgaatttgtgttccaattttttttggacgtggtctggatgtaaattacaatttcacaaatgtgctctgttcccctcacctgtagtcctatctctgttttcaccttgtgtgttaaagaaatcatctggctacctaaatactcaaatggattcatcttagggggcaccagttcaaggagattggctccagcagacagctttgtttacagccttgtgctttcagaatcagaccagggcagggtctttgttattcattagggtgagaagccattcccagtgactagggtaatggagaagctccagactagagaaatgccggatctttactgatgtgctgaaaaggaaattcacaaagttcctgttgatcatgggatcattaataaaaatgttcagtgctgtaggaggctggaaatctgagtcacagctgtcagaataataagtttctggtgaagaaagtacattttacattgtcatggcctgtgtttgaaagggcagctggattgttctgaagatgctgtaaatgcagggaatgattggttggttggcaggcttataatgagcaggagacatcagaaaaataaaatgggattctgcgtcgccatcctcatcaataaaacaccttagccatatcttccagctagcaaaacagtcttgacatctgaaattgtcagtaaaacactgaaacactggacaaggtttgccaaggcagagtcactgggctggtgagccagtgctggtaaactccaagggtgtaagtgacatccgcagtttcttcccgtggaccacaagtagcaaattcagtacatggatttcatggcatctgcaggaaaatgagacttggcaaaatttacctagcatcatgtttttaaatgtgttaacatgcattgaggcatgagcaaatattgaggaaacaggttgagtccatgggtgggtaggtgggtgatgaatagatggatgggtgatggttgggtgggtggagggatggattatgaatagataaatgcatgatggatgggtaaggggatagatagatgaataggtggatagatggataatgaatggatgggtggatgaatagatggatggttgatggatgagtgaatggatggatgatgggtggatggacggatagatggatgatgaatatatggatgggtggatggatggatgatggacagttggatgaattaatggatagagggatgatggatgaatgggtggatagatgaatggatggaaaaatggttgatggatatatggatgggtgagaggaatgaacagtagatggatggatggatggatggacagactgatggacaaatagatagatgggtgctgagtgtgtgaaaatgaatggctgggaaaaggacaacatggctttacccccaccactcctattcactgggtgtcttcatgttcacagcattaaattgttgaaaaaggatgccgcagtccctaaggcgcgttctctgtgaccccctctcacttcgttctccctcatcctgacagctggccctgcattatagccagcccttgagatggaagggacaggcagcatggtctattcctacatggaaagtgaaattatggaaacagacaccaaatagtaatttgtcttaagtcgtcacttttctgtgttgtagaaggcactctgccggcagatgtttttatgcaactgcatggctgcccgagagcatactcaaatgtggaactgtacactttagtagagcagcgcttggtatttagggtcgtttcagtttgctcagcggtgccctctattaaagcacatcatcttttaaaatgtcctctctcataacatttttgtacccctgctcaatccatgggataaacattgctaaaaaaataccagagttaactgtgggccctttatttcatgagataaaccagctttgttcccctcgccctttactgccacacaactgtcagaacatttgccaggatttgcaacacaaagaagtatcacagcacattaatccttgtgacggagacaatgctctattaatattttatggcaaacaaatggactaataaaaaattgatatgcttctcaccaggaagagtcactatattctgatttgaaggcacctttggcctaggactcatggaatgtaataacgtttcctcagccaggctgtgccattgcatgtgctcccccacgtaatccatggcagtccccaccctgtgctgaagttagtggcttgcccatctctgcaccgtccgcacctagaaccgtgtctcccacatgccaagccctgactagatgcgcttggatgcatcagtgcattggtaggcagatatagtgctttagaataaagagaaatttggtagcatttcttccagctatcttcgcttcctgttcatattttggtatcatgctctttttaaaatggaattttgattattaaaatatgaccatctattttctgtgattatcaaaatgcttcaatatctctcttcatcttggcagatagattattgcgtcttttagcactcagctccagccttatgttaaaaaatgattccacttcaaatcctattttctcctctcctttaactgctaccaaatttctctttattctgaagcactttacctgcctaccaatacatttacccattcaaagaatatttagtaagggcagatttggaaatggagatctatagttaaatagcgcttggagttattctcatgtggtcgcccactgccagacagaggatcgctcgtctccaatcagtagttctccactcgagctggcactggaatcacctagggccttgttaagccaggaagtgcttgtccccacccccagagtttcagattcagagggtctagggtgaggcttgggagtttgcatttctttttcttttttattattattattttttgagacagagcctcgctctgtcgcccaggttggagtgcagtggcatgatctcggctcactgcaacctccgcctcccgggttcaagcaattctcctgcctcagccccctgaatagctgggattataggcaactgccactaggcctggctaatttttgtatatttagtagagacggggttccaccatgctggccaggctggtctcgaactcccgacctcaggtgatccacccacctcggcctcccaaagtgctgggacatgcggttcctaacaccttcccaggggctgctggtacaggaaccacactgtcagaacctgacttgcctccttagagatgggggtagaggctgtttccaccacctgctttctcccctaattgcatggactttgcctgactttgccacaaaggcctcgcatccccatagctgtcctgctctctctgggtggcctgacctccctgggcgagggtgacaacactgcctgtgattgctgcgaaatcaggacagctcacacaggacgggcagggtcttctctcgtctctgcccgtgcttccttctaggcagcagtgccttctgagtacagtcatggtggtgccaatgatgtccctgtatgacacgagatgtgtcacccatgcagacaccaacaggtttacagggagcagcgcgggtcagtggcgtgtggcattattgcggctcgctgagcagtgggcagccattcccgcagcacaggattctgctctccctccacttccctttgtgaggcatggacgcctcccatcagtccaacctgttctcatgactgtgccttctgttgacgttgagtgttctggcattataacgttcctgtagagtctccctctgatcaatgcttccctttgtcccctcgagagacagtcttactcggggcatgggaatttgacaggcatctgcaggtcccacgccttgggacagaacacacatgagtagaagcacttccttctccttgctctttgtctcaaggagctccccgcctggccaacccaggactgtgaggaagaatggtaaggcctggaccttgtgagggaggaggcaggaaccagaagggctggaaaagggcacaggacaggctgacaaacatggctttcttggaggctatctcttcaagcctccaagaggagctttcttggagacagctcttctctgccctattttcatcattttctataggggcaaagacacctggggaactgcacaaggaaaggagagttttcggctccagcttgagccactgggactttcctgcttggagaaggttgctgcaaggggtcctgtgtgtttcattgcctgtgagcctcatgcccaacatggaacctcctgcatggcgtgaacagtgcacatccaagcttcgacagcagcctctggggagggaattgagctacaacttgcactgtgaacacgccattctcctgggacaagaggccctcataaggagagagacctaggacaagagtgagccagacctcggccccagctgtgcggacacttgcctgaggaaaaccttaccaagcccccacccttctgtaaaattcagaagtcacagaagcttatccaagcaaagcccgcagagagctcagcacaccagagcctttaacactcaagcacagttttctgagaaagaaacacttcactgttaaatcacagcaacgtacttgttccttcattttttttctaaaaggacaggaaaaaaatgtacactcagtgagctgatgtagattctagttacagggcagtctggtttttgcttggtgagaaagccagctcaagtattggtcactgttgagaatatacgtgagacccttacctgttccgagtttgtgaggtcagccaccaccatgcccgtcacaatcaggcaggggtgactctggagagctccatctaggctccctgaacaaaaagagcaagctctcaggtctgcagcagattctgtgtgtcctatcaccagctccctacctcagtccacagacccgtctaatctgaccttgccaccttcatgaagacttaatcattcccatccccttatcagatgaatgggtgggcattattaattaaatatcctactgcttctgtgccctttcctgccttcttttctttgaattaaacttatttcttgaggagcttgaaaaaaaatatcttattcttatgaacttggtctggttggaagcatctagagcggctgtgatcaggtgtgtggggaaggacatctccaccgtgtaccagtgagagctagccaataggttcagcctcattcagaggcactgaaatatttctccatgacaccgtgggtttatttattgttgttgttaagttttatttagttttaactttgcttttcttttttatcaaagtattgcatattagtgcttaaaaataaaataatatggaagagtctatagtgaaaaacaacagtctcttccctctccttctaacccatctcacccccagatggagatgacttttcactctttttacactttctcctgatatataccatcctatatggtaaatcactaagcaaaatgcacatttcactgtttttaaatgaattttagtcttatttattgtctttttatgatagacaagaattcggaacacttaccttcctacctattctaccccctccatttatatgtggattttattctctatgtcagttacctttttacatttaaatactattacaagtttgttcatgttacattaactacagagaggagctcttaacttcccaatttgtaaactgagattagtcccccgccctttcctacaagtccctttcctgtccctaccacacagcaacttctgcatctttgtttttacttttacatcattgaggttgatggcatttacactctgtcctgtaatcataactaaaccttccttacttttccattggttgattctaaaagattaaaatcaataaatagcatttactttctcataactaagtgattatctttcatgatagagctaaggagtgccctgtgattgcaattctttttgtttcactttttgttttcctggagttttaaattgtttttgttttttacctgaaatatttaattttattacatcctctctctccttttttcaaatcctctcagctattctgttgcattgcccttttccccaagtctgtctctctgagtgccctccatagccctggtattgtctggactactttttccaacctctacactaaggccatcctgggacctccccacagtgctccctcatgttggggcaactgtttcctagatctcatagatcacgtgatttactccctcttttgtctggagtgcattctcttaatgatttactaagaaaggagtgcaggaagtaaattttctgaattcttgaatagctaaaaatgtctcttttttcacacatttgaaattttagctgtatgtagaattgtagtgtttttattaactctttattcgtcaaagctagagggtatagctccattgtttccagcattttgagatgctaaagataaacctcatgttggtctgtgatatggtttggctatgtccccacccaaatctcatcttgaattgtagtttccataatccccaagtgtcgtgggagggactttgtgggaggtaattgaatcatgggggcagttactcccatgctgttctcttgatagtgaatgagtgctcatttgatctgatggttttataaggggctttttcccctttgctgggcacttctccttgccaccatatgaagaaggatgggtttgctttcccttccaccatgattgtaagtttcctgaggcctctgcagccctgcagaactgtgagtcaattaaatttctttcctttataaattacccagtctcaggcagttctttacagcagtgtgagaatagacttctgataattgttcctctgcaaatcaccttttttctttccaaaagctttttgaattttgaaataatatatctatgtgtgtgttttcttttcacttatcaccgtttcatccatatactttcaatcgttcctcctgtttgaactgcatttctgagtctcatacgatgctttacctggagctctgagtccccatgattctctctgaggtttcagctctgcaagtgtccaggttgctgtgccctccagcctgactcatccctcatgacccttctatctactttctgtcttccagaaacatgaaatctctcagccctcccctgttgtctttattattgtacatatattttatttctttattatcattgcaattaggtttctggagggaaaacaaactaatgtgataaatctactaacttaagttggagacttccagtgttttcttaataaccatcttcttgtttaaaaagtaacctatgcagtatggaaaataataatcccttgtcattgcacatcacactacccgtaggtaactactgtgagaaatttgataaattatcctttgagatttcttttctggaaatgtatatttgttcttcatttatttgggtttttttaaaaaaatgattaagccattttcccaacaccatcgattgtggaagtcttcctttccctactgatttggaatgacatctttattaaatgtaaaattatcatacaaaccagtgtgcattaaaggtgcctgtccactactgatggttgcctcagtcagatgtcaggtggttccagaaatacgcttattattagcaactttaaaaaataaatcccctgtccctatgcttcctttttaaaaccacctatctatttcttcttatatgcgaacttcagaattattttatttgactctctactgaaaagaaattcattggtttgctattaaaattaaattcatttctttaaccaatattaagtatttaccatgtgtgaagccctatgtaaggtgctaaaaaatgtacaaatgaataaggtgggtatggtctctgccattatgaaggttaaatataataaattcagttctttccaaactgatcaccattttgaaaactttaccatgtcttttctcttattccagaaacataggtgtttctattccttttttctaaataatatccttccatttcatcatgtgtaatgctgctatgttttgtttttagccttctttttgcaatttactaaatgcttatgatcctacaaactatttgcccagtatttctttatattatttttatcacttaatttgaatttatcatcaaattgatagtagtttagaactagctatggatgaactgattttagagattacttttttttacatgttgagtttttaattttgagccattaattttgagttgccttcataagtcagtgtagaatatattcaagtaaaagataaggccgggcacagtggctcacccctgtaatcccagcactttgggaggctgaggctggcggatcagttgaagtcaggagtttgaggccaacttggccaacaaggcgaaaccccctctctactaaaaatacaaaaataagccgggcgtggtggcgcacacctgtaatctcagctattcgggagactgaggcaggacaatcgcttgaacccaggaagtggaggttgcagtgagctgagatcgtgccactgcactctagcctgggtgacagagtgagactctgcctcaaaaaaaaaaaaaaagtagaagatacactttaatacaaaaatatattggttgttaaaaaaacacattgaaatattaaacattaagtattagcaatagacagaaaggaggagaagcttcagatcagcctaaattttgatcctttgtcaaaacttatttccttattactagattattgtggaatttcggttttcccataactcaaaggttctagcacaacatatttagatgtttcattattttccctggaatgtgggaaatcccttttagtcttcacattcgggtcttttttcctacacagaagtttcgtcctctttgtctttggttatcgtgtctgtagccactctggtttctctgtagaagcactgctcttcccagccggtaggaaggctcatcttcttctttacacctccatgtcaccttcctctgccttgtgggagaacctcccacattttcctcaattttcctgacccaaatttttctaattttagttttagtttccttgcagccccctcatctccctttttgatcttatcttggacttttagaattctgttctctttatttttagtgtgacttccctttcctttattctgcaccatttgaccctcacagttccgcacctcaggaaggagaatgcctcccacacctgatacctggccacagacaaagggtgagagtcacctttgactctgtgttctgactttttaggtgctactgagctcttctccggtgtaaatctggaagacagtctaacccatgtgcatctggcatggatcgtctgggctgagttgacatttttttttctaccttcttaagaatttttctttgacattctatgtaaattagtacacatggaaaattacaatcttccttaacacccatttagcaaaggtttgactttccaaatctgtggctggtgtgagcccagcatttctgagggaagaatagtacagtggggaagagaaaaaccttttccttctgcgttctcatggctggggctgccctgttccctacagggaagaaactgggcaagaccttgtctggtttcaccagtgccatctgtgttgcagttagagattttcaacattcatttctaatggcattgtgacttttcatcatttctgtgtgtctctttagacatgataacacaaagttagtaaaggtctccctctgccggccaggcaccactgcttgctggagacctctgtctggagagtccacactcgatgtggtgtatggtgtgctgtttgtgagcaagtaaatgttttattttcccttccagcagcaaaagtgtgactacaaaccttatagagcaaaagaatgtccctttgtccaaagcgtcgctgcctcgcaaggtgcctaccttgtccccagaaagctgctagaacgccttcaagattgccctgttggtggtgatgcttcaccctcgtacaccgacttgatttttagaaaataactaaaatgtatttggggccaggcacagtggttcatgcttgtcatcccagcactttgggaggccaaggcaggtggatcacttgaggccaggagttcaagaccagcctgggtaacatggtgaaaccccgtctctactaaaaatacaaaaattagccgggcatggtagcaggcacctgtaatcccagctatttggtaggcggaggcatgagaatcacttgaacccaggaggcggaggttgcagtgagctgagatcacaccactgcactccagcctgggcaacagagcgagactccgtctaaaaaacataaaaaatcaagtgtatttggcaccaggtatagtcactgatgcaactcatggacttaggaaatgttgactagagatgagatgttgctatgcgggtcatgaggcaacatcaagctctcagggcaagtcggcacaaggggcccaaaagctttatgataaatggcaacaggattagaagaggcaaagaactgcccaaaatgtgagaatcacggcttccttacatagaggtggagcccttatggatgcatgtatgtaaaaagaaatcttattatataatctttataaattccattaatagtgtttattgttttgggtttttaaaaatatttcacactgtatttcatcaccataacatctctaagggtgccaccaggctttaaaaattcatattacacaaatgaagaaactgagggttgaagcaccgtatagaattaattgtagaaccaaggctttctcaggcctctgaggtgagccacattctgcccctcaacccagggatgagccacgaggcagagtgggtccacatttaactgtcctaatttttagtacaattatatttttcctcagtgcaacagcctcatattacaaactaagagaagggaggaaaggagggagggagggagggagaggaaaggaaggagggagggaggggaggggagggagggagggaaaaaagagatgatctagcactcactttatgtaactggtcattttacttggggctctgtattagtcagttctcacactgctaataaacacatacttgaggctgggcacggtggtccatgcctgtagtcccagcactttgggaggccgaggctggcagattacttgaggtcaggaacttgagaccagcctggccaacatggtgaaaccccatctctactaaaaacacaaaaattagccaggcatggtggcagacatctgtaatcccaactacttgggaggctgaggcatgagaatcgcttgaacctgggaggtacaggttgcagtgagccaagatattgtgccactgcactccagcctggggaatagagtgagactctgtctcaaaaaaataaaaataaaaataaataaataaaataaagacctacctgagactgggtaatttagaaagagagaggtttcatagactcagttctacatggctggggaggcctcacaatcatggtggaagacgaaagaagggcaaaggggtgtcttacctggtggcaggcaagagagcgtgtgcagggagactgccatttataaaaccatcagatctcgtgagaacttattccctaccatgggaacagcatgggggaaaccacccgcatgattcaattgtctacacctggccccgcccttgacatgtggggattattacaattcaaggtgagatttgccggggggacatggccaaaccatatcaggctctgagtaaagaaacagtgtggtggctacttctagaaaataacaaaccacaccagagtaacacatccttgcctccttctaaagccatgaagcaggcttgtccctgtgtgtccacgttttgtggccaagagctttaagcaggaacagtactgtgactccgcgggccatgtcactgctgttgatgctgcacaccccagccccctggttccatccagtggcactcagcctagtgacatttccagcacgatttgttctggaggcatcaagagaaagtttgcatccatctcattttcatttataacatttcacttccaaattaagaaatagaaaaactaagaatagtgtgtagtcatatttggcctagatgaagattatttgtacaaaagaacactataaaaagcagaaagaagcataggatgaatgaatgtttccaacaattgagaacaaaagcagcattcttcctaattagcatgaaggacatagagggaaaaaatagtcattccgggagaccttacattttctttcttgattgcatgcagacgaaatgtgtttgctgagagagtaagtgcagggtaccctgtggcttcgccactgcccccattgtggacatggaatcttgcaaccacaggccccatgtggctctcacacacgtcccatggtagggaataagttctcatgagatctgatggttttataaatggcagtttccctgcacacgcttcagcgtcctccagtgtggactcaaagaccagttacaacatcattaaaaaataaaagtgttctatgtaaagcaagggctaggcagagacgttgaattatatttaaggacaaaagtgacatatatttttttcttatgattgtaaataatgaccaaatcccatcattataaatgcctgtccctgcctttgggccatgaaacagcaaagcaggacctttgtagaatgttgctggcaggatgtgccacctgtcagtgccagggccaggatggagagcaggggggagggcatggtccctgtggacatgcaagccaggttctggggcaggccaggctctaggacgggccagtatggggagcagatggtgggaagaaaagcaaccatgtttcagacatcacagaaatggagcaggttgaaaggcacgagagctggattacagctgagcgcccctcctgtgttcacgggttatgtacctcctcaccaccccagtcctcaggaactccccatgaccacagtgggcagctgcagacctcccctcctggccatgcgccagcagccgcctgtcttaggccctcacctgcttgccgctgttccttctgtttgccacatggtcctgatttaggtcaagttattaagaaccttgattaacaagttttaattgtgggaaatgggggagatgtggcactggaatctcctggttaactgaggctccagccaaggcatctggctatagtcgtttctgttaaaataattattaagtgtagtgaggtcgctctctggctcgccaggaattgtctagtgaatgtactgctgtctttagtgataaaagatcttgtaagaccacaaagtaatcattctgaacagtagatctcattatagatagagaaggggtgaatgattgaacgcgcattagctggcttctagaacattctgggattcacctggggatggtctttttggggcattaattttctcaacactttcttcttcctcttaaatgtaaaattgtatttttttaatctggtttttggagggctctgggtgactggatgaattcccagaagccccggtacccctcgggctaagtagagagccgcacagagcctgtggtagtttcaggtttgggcagaatcaggcgcatgacccttaagatatcaaaccaagttcgcctgaagcccagagccatgaaccaatttccctaattagctagagagtgtccctgggtattttatctttaaggaggaggaattagagaatggagccttcaacagcccaggctgggatgcttctcaccctgtgtcgctctctggggcctcccgccagcccttttccggttctttctctgtcccgcctccccggacccctcgctgcccggtcaggtggttagttgtgcgtttgcctggtactgcggtgtgaaagtcaaggcatcagctggagagacgagacctcaaaacccacggagcagcccccacacccctcacccccagggcagccacacgcagtgacatgcaactcccagtgtctttgggtttatttagcaagaggtaatgactgggcggcccctcagagtcccgcgccagtgcagattctttataagccagatttcagaagctcgcaggctggctgtgtcaccactggctccggcccccggctcccgtgtcgtgtccagggctggggtcggcggtcccctggcttctgtcgtgcgggggtcctgccaagctgctcatgctgtgtttggcgtttccagggagtactacatcaccatggtgaagtgggccaccagcaccaaggtcgccgtgacctggctgaaccgggcgcagaacgtgtccatcctcaccctctgcgacgccaccacgggggtctgcacgaaggtacgcggggctgtgggggtggaggggagacgggtgaagaaccgatggtcagacgcgcccgaggtggcgccagagtcgtctcagccctcgggcctgggacttggggaccggccgcccagctgctgcggggagcccgcggcgcagagtcccggctccggcgtggctgccacctcgtggctggtgcaggcgctgccgcagacccgaccgaacccatccgtgaattgccagaggcgccccgtgcctggcacctggacgccgtccgcagttcactgagtgttgcttccctttatccgcgctcaccgctgtgacctaagtgagcgtcctcctcgttgcagctgatgctcagagaggaggggccctgcctttccccagaccccgccgacagcctcccccagcgggctccaggcgtgcgtccctccccacgtcctggtgaggccagccatgtttctaggagtctcaggccgactcagtgtgtagtgagagaaggtaaacgtaggggaaagaaaattaaaatgctcaaagagtgagcaaaggaaaaatgaagtgtaagagaggttgcccgggtggagcaggcaggcggcccacggcctcaccctcgccccatgggatgggcccccagaagcaggtcaccttgtggcgggttttgtagacatcaaataatatcgattaatacattcaggcaggcctttcagaaactcctttttgatcttaagtttctgtctcctggctgaggggggccaaggcttgcaggcatatttacttgagaggctcctaacacgacagctgtgcctgagatcctaagcacagtgattgtttctaaggtggtcagtcttgcctgaccttttatctaacctggggcggattccaggctattctgatgagcttgcttgaggggaaggaaggaacgtgaggacacaaagcaggcagctaaaaatggcttgtaatctccaacttctccatgcccctgagccttgagtgtcagtggcaaacactgcttcctgctataacccatgacagaggcctgctccaggggcccggaggtccagtctgcaccagcaccaggcccacagcgcctccaggtgacacatgtgtgctgcacagcttgagtttggtgtctggagttttgtttttcttttgtttgcacctttccatagaccactgtgagacccacttttcctctatgctttagcccctttgaaagggtttctggtccaccaggagtgttactcagtattccagaatgggatctggacacaatgtccaatgttctgactcagtgtaggctgaggttcactattagatggacacatgcccgggcagtgatgaccgccccctggtacacgtgccatcttcccccagagggttcttttccaccacgggtttgtccttgttgctagggatagtggcattttctaattcgaggacgcttgtgtttggctccgagccacgcacgagacaaagaggagagctcgggattgcctcctcccagagctgccgtggcagctgtgcaatgcttgtgcagcggccatgtaggtgaagccaaattgtttcctgcactgtcggtcacagacacaatacatgcaaaaaaaaaaaagaaaagaaaagaaaaaccctcttgtctaatgctctcatttcatttcagaaacacgaggatgaaagtgaggcctggctccacagacaggtaactactgcatgtccgggtccccactgtcacctccacctgatccaccccagggctggccctcagagcttcgacaacagcagaatggcttctcagagtaaatcacacagggctccccaggcagaaacagacggcgtgccggctccactcacggtgcctcccgttctccagggttgcccagagagctccaggagaatccaagttccagggagggtcgtgtgaaaatcacggctcttcagagcgtggaatgtttggtgagacctcagcttgcagttagatgccagcaccttgctgaattgaaaatgaacagtccatcaaaggtggcttaacataatctactatagtaaaagggtggaaaagtggtggatatccctgtttgttgccaggggtggttttgttggtgtctcatttggagtcacctcctctgtgattccgtaagacccgtcctcagggacataactgcaaaccatccctggagagtcttcatccctaactcagataaaggaacacacattaaaacagactctaggaacttgagaccaaaagagatcaggagaagcccaggtaaatcattctgagacaattttttctaaattaaacttgcacaaaaagtatcagtattttctttcttcaagcctttttgtctcattccacactctgacactaagaagaacaggtgaaaaagctttggaagcttcctgtctccttatccttcctaaggggatgaaaattgtcttaaagactctggaaaaagtcaagccagacttcagtctcatgaattatggtagagacacaggtatgcttcttcatcgatatggtggatcctatttatggaaaataactgaagctggacaaaactatcgccatggctctccaagaacattccagcactatagatgctgggctgctgcttctgcctgtggagtcaggaatataattatctcagaagtcagagcctcatcaacagacgggctgctccgaaatgtatcctgtttctgctctgtgtcaatcttattcacaagaggaatggttccacatggccactttcattttacatgtcccaatttgggtgccaagtccaagccaagaagatatcgggaagagggaagacttagggaaccctcaaacattagcatgctggaaagttcttgaatgccacctggaccaaacatataagcatataagcatacatatcaaaaatagtattgtgatgttcatctcacattagacaaattgtcagagagattacaataaaaggaacattttgtaaactccgttatctatatatcatgtgttcaaccaatatttatggatcttaccaggcaccatgctaggctgtggatttcaaaaaatgagtcggctactatcactgagcacacattgtggtgtgtgtcagaattttattccttcttatggctgaataatattccagaatatgtatgtagtatatatcctggaatattatacatatgtatgtgtgtgtgttatatgtatatatacatatatatacaatataatacatatactggaatattattcagccgtaagaagaactgaaatagtattccagtatattccagtttgtttgtctgttgatggacatttgggttctgtctaccttttggctgttgtgaaaagcacatctaataacagatacaaaaggctaccttattgtacaattccatctatataaaatatccagaataaataaactcatagacacagaaagctgatcagtggtgtcccaaggccgggggagtatggagaggaacagcttaatgaacaggggtttattttggggtggtggaaatgttttggaactagatagaggtggctgcacgtcattgtgaatggactaaatgccactcaattgttcacttttattagtacgttttcttttgtgttatgggaattttacctcaacgattttttaaaaaattaataagctagagcatgagctcttaaagatggtacatcctagacagggagatgagatgttcacgttacatccattgtgcaggctacgagggtgatcctcagacattcagaagcattgctgaagtattcgggtgttggtgggagtgggagccagaaaaagcgtggtggacatggagcaggaggccctatgccaggcccactttgtgtttgaacaggaggaggtgagggacgtgattctttgttgggggcagggaggctatgggaaagcaaggtggacatgcacactctgcttccctgtccccctcaagaggcattctcacagggggagctggcttcccagctggccacctgcagttctgccctctggatggacggcagagtgcatggtccctggaggcccatggggggccgtggttctgtcctccagcgctcacttcattagctctacagagtagctacagagccgaggtcgtcagcaggactttcctgtattagcgattgtgtgtctcatcgcccatatgagaacagctactaaagtgtggggtaagacagcctgaatgggattccagaaaccagatccttccaagcagaatccagtcaacacttaaaaggtggcatgaattaaaataattcttactgttttcaaatgtaaagtttaaagcatttactaagcacacagctaaatttttaaaatagctgcttaaacgtatgcaatgctgccatgagttggaaacataaggttctgtgacaggtgtgttttcctgggatggagcgtccctgggtcaggtcagcccatcagctgcagttgtgattgtgacactgggttggggcatcccgcccatggcagcagttgggaggccaggatgtctctgaagaccctacaggttgtgagtctgcacctgtgaagattgcagctccatggtctgcaggaagatttaatttcaaacagtttcttatgacattgtttttttcgtaaaggaattcatggaccctatttttcaaaaacaatctgtagtgtttctgcatccctcgagttactgtgatatcctggagaacaacttagtaactttttaagactgaacctgccacctgctgccagcgaagccattggctgctgcttcagacagagcctaagggggttttcctgggagggctgcaggcatgagtgagggagacacatggaggccacatgccctctacccatccatctccaatgggtcacagaagcttgccccagctggcccaggagaaactggcatctggaaggtcctgcagacctcagggagacccggcctgcttaggtccaccgatcttccaaggacccggtgcaagaacagaggtgagttgtagcgagcctgctaattttgtgtcatctgagctgttcatctgagccgttcatcctcctctcttctcttcccaactccttcctggaatcctcagtacggtcacccgcagagattccccatgagccaaacagaagaggaaaatgcatgtgtggagacccaccaagttccctctcctctaggaatattccagagaagcaggcaatcccccctgccacatacacaccctgtcactgctgcgctgaccctgcagagtcagtcctgatgcagacccatgaggatcctctgccagaaccatctgcatttgccatagaaccccagagcctattgttttggttgaaggatcggttccatggatccatttctgactgtctttattcttttatcggaattttggttttgtgatttcaaaatttgggctggaaggggggttggacaaaattattatatctgaaccatgggaaaaaaacactggcaaaaatgctacaaataactcacaaagaagctctcatgagtcaaaagggctccttcttcacagatctgctgagtggagttgaggaaaccaggcattgtgtgtgataaattctgttatccagagagactagaaacgcttcccccaaaatcaaatgagagacagaaccaggataaaatccaggtcccctggtcaacaatcattgcactttgtcactaaaaatacatttaccacatgagaaaccgggtctcagagagactcagaggcttcacctgtgttccgaggaatgtttccctgacaaggtagagatgacatcacaacggtggaggccttcttattataaaaacaatgcttctggccagaattaattatttattacatttatttagagtatctttgtctgccaaacgtgcaaacatttcccccagaaaactgaaggaatatagcgctacccgccgcacagttggcaaatagaagtgcattttaaaagccaaattaaccgctggtttttccatttcctctgcttttaaataccatgcttccaactctaaataggaaaataaatgtttgcagattaaaggttccattttattgcaaatattcatgaagattaaatgtcattttaatcacatgttagtttatttctctgggcatatcatatctgcatgggttcactcactgtagggaaatgagttttgcttgtgccagctggggtttatttaccattagttctcatccccgcattcgtgtgaagctccttgagtcagaaaatacatctcgcaaccaactaattggtgttcacggatggaaactttcaaacttgggcttcagagaggccaaggtaccgcggtagcaaaatcctttttcgcccatcaaagcaacagccaccctgtgggctggtggaaggctgaggccgctggctgttcactgtccggggaccaggcagagatggtggcgacacctgccctaaatccagcctggaacccttcccccagggaaaactgggcatgctgattctgtttccagggaaaagagacagtagatccaagcaagtgttgtcatccagtgtggcccgaggtggagcgtgtccctgggactgctgtcccctcccacctgtgttttagaacccgtggcatttgtccttgtgtttattttctttttttcttgccttcttgatgggctattcagtgtgagatcaattgtattcaataagaagaaaagacaggattgaaagaatagattttgcttttaggcaaaatctggtttgggattgttgagaattatgtttttttctgatatataataaatgccactggagaaatctcacaatacactctggtttcaatgggcaataattcaaggaggaagcacctccttttgagttttgagagcagagttcctgttctcactggtgagcttggcgtgcacatggggctgggctttgtctcggtgctgtgtagactgagggatgcctttttatttgccactgccggggctgtagcctcttaattcctccatcttcttcttttagaaaacgtaacagttgactcatgattcccgaggaaagtgacggcctcatcaagcacttattatttcaactgttcctctccttagaaatcacatagaaaatgtatctcggggtgtattttatcctggttcaacctcttcagaataaatgatgttttagttgtggtttcatccgtggcctttgtccacagaatgaagaacctgtgttctccaaggatggccgaaagtttttcttcatcagagccatcccccagggaggacgagggaaattctatcacatcacggtgtcctcgtcccaggtaagtcctgctagtttccggagctgaactagaaactggcctgctagaggccgtggggtgacagcctctagggctgggcacacttgcgttttcgaggaccccaaggaatctgaaggtggttcccgaaggcagggcagggcatggcgctggtgagtgcagaggttcccatcaggcctggtggaaccttgctctatctggtcacgtgcgagaatgtgaatgacgcttctgccaaggtcagcagagaccctggggtcccctgttcagtgtaaggccaaggatgttggaggactgtctgtgccgggggccctttccttctccctctgctgagggtctccttaacatactccccgctgaggcatggctccatgcactcaacatccctcaggggtccagcctcccatgctgccctacctccacccggagttggatgcaggtattattttattatgtgaccgctaccagccatcactcactggttctggggtctggcgagttcggaatggagcatccctgagtagggaatctcagagattaatatacgtgaatctaggatcaaaagtagacatctcggggtcaccatctcctgaagaggtcacctcagggagcctcacgcctgcaggacggggctgccatggtgttgactttgggggactctgccctgaggaagaagggaagcatgatcttggatctcctcagttttggaggcagtctaaagttatttgggatcagggtaaatgaatgaaatttgattagagaaaatgttaatcacaaatattctatggctatgacatagaaggctcatatttatgatgaggcctcaaaggcaatttcaaaagaaaatccaagaacatccgcactaagagcagctctgatggaatcagggtgggggctgcgggacccctgggatggaatcggggtgggggctgcgggactcctgggatggaaatggcgtctcttggaggttcaggtgcaattttttctcagtgcacttcatgacacgattgatagaatgtctgcaagctgttgcctttgctttttcctgcggtcttcattctaccatccaaattcttttgtttattattttacatcacttatatcaagattttaaaatgctggccaggtgcggtggctcacgcctgtaatcccagcactttgggaggccaaggcaggtggattacctgagatcaggagttcaagaccagtggccaacatggcgaaacaaaaattagctgggcatggtggcacctgcctgtagtcccagctacttgggagactgaagtaggagaattgcttgaacccgggaggcggaggctgcagtaagctgagatcgtgccactgcactccagcctgggtgacagagtgagacactgtctcaaaaaaaaaaaaaaaaaagatttataaatgcttcagtgttttcatttggctcccagtcttgtatttatccaagttgccatcatttgcccggagccctatcaaacattccagcaggaagcaggtctcctgcactgcccatgaggcaccacctcctgcaggttcccaggaacccctcggggggcccccagggccttccctttcaaaacctgcttcaaactccccagcctctcctacacgctgtctgcgcccccaggccctgctgccccccaacccccatgttcgagtctgcagcccacagagtgtgtgccttgggccctccacctagtttaatctccacctgctctgcgcccacctcccagggcatctgccttccagaacagctgcccatttcaaatccccactgaaacatcgctcccgcctagatggccctgtctctctcttctgttaccattggtcgttaccattgtctgttaccattcttcttagctcaaggggaacatagggaaagacaatgcgtgcaaaacttgtagtgtggcaatacaggtccaaactgtccttgtcagtggcagcagggagcgccctttctccctccgtttattcttctctctttttccctccacctcccggcatttgtctctttcctccctcactggtcccccttcagtaatggctccattaattagatttacaaatgaaaaaggcctataaagcattgattctcctcctgagatgcttccatcatggttggaggccaggtccaagtgattcgcgtcaccaaagaggacagggcactgttcccaccactgacattcgggggtcggggaggctgcgggcctggggttggttgggaagcctcaaggaggatgttgcctcccaggagaggagcaggcagaaggggcagagagcccttcccacagagagaatggcagcccctgtcacctggtgtccaaaacagttggaggatgaagagccatgctggggccgggacaccggtgtctgctcctgatgccatgtctgtgtgtttcagcccaacagcagcaacgacaacatccagtccatcacctccggggactgggacgtgaccaagatcctagcctacgatgagaaggggaataagatgtgagtgagaaccaggggcctgccccatcttactggccaatggggcacatttgttattttttgtcaattacacttatggagtacaggagcacaggaggcctcctctttcctcctcaggcagcatcactgactcctagtttcttcatgaaaatgtatagtagattcccgtcccaacagtccgacttccagagctgcggcgtcctgaggacgcaattaggcttgcagccagcccatgaagggaagcacgctagcggcagtagtaggggtagtactgatgttgattgagtttttactagtccaggctctaagccaagtgctttacagacattatctcattgaatacaacagttccatgaggtgagtttactgctttccccattttaaaaataagtaaatgaaaacaaaaataagtaatttgctccaggttattcagttggtagcgggtagatttggctcagatgaggggagcccagttcggaggactttaccaccatacaatttcacctccctgctcctggggtaaaagccaaggtttctgcattgggaggtcttaggtgaaaatgagtcaacaactatttattgggccaggctatatgtctgaacttgtcttaaatgtgctcagctccttgcccttcagaaggtgagtgatcttgtaaaagatttccacatccacattcaggtgtgtgtcacccccaaccacagtaccctctggccacgaagcagaggccagtgcagggggcacccggagccagtggaatctgcactggtgtccctcagcccttaggtgtctggccaccccctgctctggtcacaggtgtagctggacctgaacaggggagctactccctgcaggccatgggcggcagtccctgaggagtgtccatagaggtagtgccaggaatgtgaagtgcagacgtgccttggagcaaactaaccctgtgcaccttggtgatctttgcagctacttcctgagcacggaggacctgcctcggagacgacaactctacaggtaactcctgctccccctgcacacagggctctcccccttaggagggcatccaggctttgcagaattgcaccttttcagcagttcggaaagggcggcagcaaagacagaccccaccacagaggagtagctgtagagtctggagagaagtaatgaaacttgcagaggccaccaaaggggtagttttgagacttttgaagctttatttttctgctgttgttgacttgggttttccctgtcacccacttgcctctttggctaacggatggactttaacccgtctttccttttcacttctattcaatgtcacctcggaggaattctgccccccctgccccaccacagattttttgtagggagcagagtgtgatttggaaacaaacccgtgggtcagcacgaggaggccggccctgctgtccggcattgtagctcactggctttggggaactctgccctgaggaagacagggagcatgatctcgaagctcctcagtttggaagcagtctaaagttatttgggatcagggtaggtaaatgaaatttgattagaaaaaaaaggttaatcacaaatattctatagctataaagtagaaggctaatatttatgatgaggccctaaaggcaatttcccttctcaacagcccaactgtgcgactttggacaagtttccaaatctcaaagagggcagggaccctgtgttctgaaccctggagggggactggttttttttctagggcgtgtccctcttctacatttagtcctgtcatctgcccagtcactgttctcactaaaggaggctttgggttgtgaagtgagattagccctgggcactttctaccagggccacagaggtgaggagggggtgtctgctgcctcccccgtgcctctgcatgggatggctgcagccagttacacctaaaggcacctgggccgctgaagaggatgttgttcaggggagacctgaggcttgaggccagtggcgcattgtctaaatggtgccaatgcctgttgcccccgccccactgctgggacattgggaagcccccctggtgaacgcagcctcccttcccagccatcggccgctatgcggacaggatgaggtcagcatgagggagccagtccgtgtagatgttccatcgtcaccatgtgtctactaggaaaattgaaatacacatgtcaccaattaataaacatgagaggctgcctgtggcccctgtcctctaaattacagaatgagaaggttgtcttctctctcccgtgaaatatctttgctcctggaacaacagacttcatattgaaacctatggttagaggggaccctcctgcggcaaaatgttcagataagaacttcttccaggtagatccggtatcttaggatctttccattttagggagcacattttaggccttcttgacttgaaatgacacttgaccacagtggtcccaggtaacatcttcaagccagttcccacttgtgtagctccgttgagtgggaagcgcgagctctcgaggtttcactctgtcaggggatgtggcttttggaagctgccagagttcaattccactggtgctgctggagcccctgcctgctcacatgccagcgtttggaacccagataatttgaagatatgtcactctgtctactgttctcagattgctagccatccactcagagggacaggacacgtgcagatagagtgctagatcatataacactgacagctccatgctcctcacaccaggccacctgcagagcctggagaaggcagcataggtgactgccttccagccctcccacaagcaaggatgctgaaagctcttgagagtgggagggacccaccagcaaaggaaggtggaaatggagctgggtggtctcaggggctccagcagggagacagagggagaggcccggggggtctgtagcagggctccgcagatcaccctcatggggagagcccaccagcttgcggcacccagcgtggagggcagctcctctccgcccacattcacacctgcgtcctttgctcttccagtgccaacacggtgggcaacttcaacaggcagtgcctctcctgtgacctggttgagaactgcacctacttcagcgcttccttcagccatagcatggacttcttcctgctcaagtgcgaaggtcagctcctgccaccccgtcagggcaaagagccctggcaggcacatttgcagggagggggtgggcacacttgcagggagggggcagcggctgtggtgggagcacagcgtattccagaacaggtgaggatcccgcctacctgataacattgcttatggtgcaagatgactggacccccacagagcctggtgcagtggggctactttacgtttcatacaggtgtacagcttatcagagtgttctgtgcacactgtgccagtaatctctcagtttgtctcccattgtccacaaaaaataatagtcccatgagctaggaagggcaaatatcctacacagtgatgagccaaagccatcaatccatcaataaagataggaaaacaatttcaaagattaacttttcaatcatatttaaggatgattgaatatcaccaggcacggtggctcacgcttgtaatcccagcgctttgggaggccaaggtgggcagattcacctgaggtcaggagttcgagacctgcctggctaacatggcgaaatcccgtctctactaaaaatacaaaaattagccgggcctggtggtgaatgcctgtaatctcagctactagggaggctgaggcagaagaattgcttgaacccaggaggtggaggttgcagtgagctgagatcgcaccactacactccagcctgggcaacagagtgagactccatctcaaatgactagataagaaaaaaaggattgaggttatgttaaagaagtctcagaaaaatatttccctatgtcccaattcattgataatttatcccaaactgcaagagtttgatcacaccaaccagcatacacaaaagagtaggccatgttgcatatgggatacaaaggatatttttgctgcttgtctgtatcttggaaagatatgatatgaacccatggaaaggtaagtcatcctaaatatggtcgtaacaaaatatgatctcctgcgatgacctcaaagaatgaaaatatgccacaggcagagactaagatcaggagcaatttgctcctctgtcagagtttcaatcccctaagccataggtggagaatgaataacttttatcagagcaatgtctttgctagcctttgctagctactagagagctcatgacttcatgacttcgttctctttttatcagtgtcatctaaaatcttgaaaatccgcagaacagggacactcagcctcttgctcaacacaagctcagcccctgacattcttctaagacagcaaggagaccacggagggatgaggggggtgcgactgaaatataacattagtgccccagtccccgcaacgttaatggtaccaaattcctctttcctgtgtgtcccaagaaggaggccaccaagtatctgaaatcatagagtgctgtaggggaaagaacctaagatctaactgacccacttcatgtatcagatggcaaaccctaagccagaagttgagtggattccctgactcccaatgagccagtgacacagagagggccagcatcaaggtctcccagttcctagcccagtgacatctgtctcctagggcgggatcttcttgaaataagaacttgggaaattacagggattgacggggcatagggattgggaaaatgtggcaagcagacccactaggagccagagagtcttttgaggagctacataatcagaatccacaatcctgtctcagaagcaggaggcagcttcagcacacaggaggtcatgatcaaacacagaagtgaaaaattgaagtagatttcaagaagagtgccccaagcaacaaaggttgaatgagaaaggtgacagagcctccatcgtggagatcctgagtcagggacagaggtcatttgccagaggggcttggtctggcctaggcaggaggcagagcctttgggatctgaggtctgcactggtcaagacagcaactttatggatttgtatttcccaaattcttactataaccagcaagaagggtctggcttctcaccgttcatggaaagaagtcaaaataataatgagttgtgatatgaaggagtgatatttctttattacctatgccaccaaggggaagagcagaaagcaattccactcttcaatttgtggagcaaatacagggtttctttttttaaaaaaaaaaaagaagaagaagggtttggaatggggaagagcttggggggttaggaggtgccaaggagtgtgactggctgtggtggcccctctttaattattgtcccatttgatgaaggagctggcaccattgtggatcccaccaggttatcagttaatcacagtcagccttgtagtcactcttcagccatgagcgggtttcatccttgaagtaatcttttgttaaagaaagaattctggaggtatctgggtcctatcaggagctgactcctggaggttttaaggaaatacatgaccagataagaaagcatggtgtgtgctccacaagcatccgggttaataaatgtgcataaggcatgagagcatagaatgggaaaagaaagggagtggaggcgacagcacattctgaggctgtgtttcaagatgaaaggtaacacatacgcagcttgtctcaaagttgtatcttgagacagggagcagacagaagaggagaggagaaagaaaaaaagtttaaatcgtggtttgaggctgagctgctcggtcatattcctaacacatactaacatctgctccacatggtgaccctcccagaatccagaatccaacagcttatttgttgttgttgttgttgtttgagatggagtcttgctctgccgcccaggctggagtgcactagtgccatctcagctcactgcaacctctgcctcccggtttcaagcgattctcctgcctcagcctcccaagtagctgggattacatggatacataatttttgtatttttagtaaagacagggttttgccatgttggccaggctggtctcacactcctggtctcaaatgttccacctgccttggcctcccaaagtgctgggattacagacaaaagccacctcacctggcccttacttaacaaacactttcgctgcttccctttggaggtcacagctccctgctaagttcaagctcaagttcagtctggatgcctcattctgacaactggaagccttttatggttcagtttccataagctgcagccctgggttgaaatccaaaaggctctcccaggagatccatggccatggatttaggcagggaagttccagttcccacatggtggatgtaaacatggagcccgtggtagatagaaacacagcctggtgttgggaggctgcttggacagagtgttaaagtttagagagcactatagggtggctcctgtgcggatttctagtctgccactggccttctgtcccaagggagattcgtatttctttttatgtttatgtatttgcaaggcttgtgttgtggtctgcaaatagttattgtgaagagatgactccatagttgatacctgggaggaaaacagaagcaaagaacaagtacagcaacacaaggtcagacacacgactgacccagcccccaggtacagccacactgggtcacacacacatgactgacccggaccccaggtacagccacactgggtcacacacacgactgacccagtccccaagtacagccacactgggtcacacacacacaactaacctggcccattgggcacctccacaatctcaccttcagaaaggatgggatgctcctcctgccaatgcctggatccctataataatcaaacagattcctagaatttgaagataggaatagatctcagagcatctaatccagtctccaccctgcctttcttttgttgattcagaaactgaactcttagtcattatgaaattatcacgctagggtttcctgaatcatttaagatctatttaaatatttagcctgttgcctcatcttaaggtagacataaactagccctcttctctacaaaattgctctttaaagtgtttacataataagctattttctggctaaagtaacttttgaatgcccaaattaaactctccccatggaggtaaccaaaatcccacttataaaaagagattttctgaaaaggtttaaatttacaaagacaacaaagtacatggggagacaggagcagccaactgtttgaacctggaagcagttaccagtgataactgacctggcagaccctgaagctgagcctcgtcctgccatggggaaagctgagcaggcattggcgatgattgcctaagggatgagaagatcaattgctatgaaatcttaaaggagaaagtgattatacccatttggattgcttggggcattttgctggaggagaagactcaaggaaggtgtcaatgatgaggtggcatttaaaacaaatgagtaggtaggatttggaatgggaaaaagcagtccaagtggaaggtacaccctgagaaaaagcacaagaaatgttgtaagattatgcaatggaatcttttgcagcatgtgaatcaggatcaagtgaatacaagcaacctgatttaataaacaaagataatttaaaataattttatttttctccacgtttctcagtagatattaaaatggacccagatgtgtagtctagagcaacgtttagtcaatgctcatgtcctgtcctgtttccttcacaccccaagttattctgagagattcttggaaacctgtgacaaaaataacgtctccactcctagcattagagactcttgttttcttctccttccctcctcctgcagcattttgttatataaattaacttagtcttctagttgcaaccagaaccaaaaaaatcctccttttttaggttgaggataaatgtactggcaatgagaggcttctctatggtaaaatctgtaaacatgcccacattcaaagctgttcatcccgtcacacagggagggaagtgtaagtagttcaggttgtctgggcataggaagggatgatcatcaaaggatttaacaactaggacaaggtggataccaaccagccaaaagacatgtccctgagagcagatataggctatcaaaccacattaggacataagggctgggtataaaatcatgaaattataactgtttcatatagacttcaacattcttcctgcctttctgtgggccttccattaggacagtttttggtaagtttagctgatattgacctatcctgtaacttatattcagtattataacttatattcagcaatataactttattgtcttagtccatttgggctgctatagtgaagttctatagactgtgtggcttataaacaacagaaaattatttctcacagttctggaagctggaaatccaagaccagggtaccagcatggttgattctggtaagggccctcttctgggtcacagatgaccagtttctccttgtatcctcatgtggtgggaaagagggtgacagagctctctggggcctcattataagtgcactaatgccattcccaagggttccactcttgggacctaatcacctctcaaaggccccacctcttaataccatcacgttggaggttaggacttaatgtataaatgtgggggggacataaacactcagtccattgtaatcatagctgattgtagctcatcagttgtttgcaaacagtatttctatttcgttagtcctttggcatactgatcttctcctaatgttcagtttttcttccacagtgtattttgtccaacatcattatagagttccatctagcagtatcaatgtgtgctttctctaatttttcattaacatttcttcagcggcttctcaatatttgacatttgtatgcttatatgtttatgttttatgtttataattcttaattccttaaaattttttattgtacatacaaacctaaaaattatttttaggttaataataattactattaacttaaataataattattttaggttaattcctcaattttttttttttgagacagagtctcgctctgttgcccaggctagagtacagtggcatgatcttggctcattgcaagctctgcctcctggtttcacgccattctcctgcctcagcctcctgagtagctgggactacaggtgcccgccacaatgcccagctaatttttttttgtatttttattagagacgggttttcactgtgttagccaggatggtctcaatctcctgaccttgtgatctgcccacctcggcctcccaaagtgctgggattacaggcatgagccaccgtgcctggccaattccttaatttttgattgtacatacaaacccataaattatttttctactttgcacagttacattaaaaatatattcgaatacaatatataaatagaggttcagaaatgcttatagccactatatccactcactacctcactggatcccatctctgagtgtcaatatttatatctaaaggacatgggtttcagatgacccctggatacttgtgcgagggatcagctgtaagccaaactcagtggaacattgtggaaactcacctatctatgtaatacagagagtttctgtccacctctctattgtctggaagtgaagccagctatattctaaatattgtattatgatgtaaccttttatgatgattttccagaatataccaagcagcttttggcatacatacttaattggtcttctcaatgaccctgtgaaatgggtagtaaaagaaataatcttctatttgttaagttctttacaatttgaaaagcacatttcttttttttttttttttttttgagatggagttttgttcttgtcacccaggctggagtgcaatgacacaatctgggctcactgcaacctccgcctcccaggttcaagcaattctcctgcctcagcctcttgagtagctgggattacaagcgccaaccaccacacccagctaatttttgtatttttagtagagacggggttttgcaatgttggttaggtgggtcttgagctcttgacctcaggtgatccacctgcctcggcctcccaaagtactgggattacaggctttgagccacggtgcctggcctgaaaagtacatttctaattacattataacagttgatgactatgttcccatttctgattccttgaaatttatattctagcgtaaatatatctacttagaattccctaaactcaatatcatttttcacatttccatgcttttgtctttgactacctgataaacccctatacattctccaagactttcagggcagggttgattttcatccccttacaggagggatgaatgagaagtcagagaacatgaaagtggctgtgtattcacccgcagaccaacgcctgtgacaggaactcagtcttcagctgtcttagatgactggggatgcccaggacaggggaaggctgggtggtctcaccttctagtcctggataaacccaattccatctttaaagaaaaaaagcactcacctcctggactcatcttctaggacagctaacaaattaccgcaatctggatggtttaaaccaacagaaatttagtctctcacagttctggaggccggaaatccaaaatcaagctgttagccagtgtggtttctcttggaggctgtgagggagaatctgttccacgtttctctcgagcttctggtggttgccagcagtccttggcattttttgacttaccaatgtattgctttcatctttgccttcatcttcatgtggtcttccccctctgtctctgcatccaaatttcccacttcttatgtggatgccaatcattggatgaggacccacctaatccagcgtagcttcatcttaacttgactacacctgcaaagacctcgtttccaaataaggtcacattcacaggaaccgagggtcaggacttcagtgtaacttttggggggacaccattaattaaacccacaacacttcccttctaaggactgcattgccttcttatataagaaagaaagagtgctcagcttgttcttctcaggaacacaaaattaagggcagccacactagactgtgccagagacagttcttaatggtttcactgcattctggaagcagcaagggggtcactgaaggaagtaatgtgatactaccatatctttggatagcaactctagcatattagaggaagaagagcagttccagtatagattctctctaggaatacttcttccctgtcataatgcaaaattcacagtcaagtggcatacagccataacaagttctgtagggttttctcctacccatctaaattcaaccgccagagccactgaacaacagaatcgaagtgcccaatttacataatttgtgtttcacagtcctcgcctctgttgagagaactggatttttctcttcaaaatgaatctcaagagtatgatttattttccttcaagtttttgaaaacgactcaatcaatcctgtttctaagaaatgtccaaatgccaccaggaaagtgagttccgtgtatgaattggccatttggtgcttcctactgaaacattttttgtatgtttaaaaatagctaaataaacttccttctcctgaagccgaggatggaattattgcagtcacttgctgctctgagtgggaacgggacagtctgtgttcatgaatcccttacagctctgggctctcacccccgcccctttcagtgttgagccatgattagggagctactttccagactttaagaagtttggtcttagacttagcagattggtttatcaagacaggcttctccttctccaagttgagtggaaccaaagtattattacctgagcctaaaatacagtgactcaaatctgataactattcttcttactattaaatattccccaagatcttctgtcatcaccatcattgccatcattatcaaaatcacaggagattgaaatggcagtaagggaggtctatggagtatggaaccgtagagctgggttcaaacctggactctgccacctacagcttcgcgaccttgggcatcttggttaaccttgcttaatcctccacaccctcatcctgaaaatcggaggaataacagtatggcagtccccccttatccacagttctagtttttgaggtttcagttacctagagtcaactatgctctgaaaatattataaacaataagatattttgagagagagagacaccacattcataataacttttattacagtatattgttataatagtttgatttcattattagttattgttctcttactatgcctaatttataaatgaaactttataattaggtatgtaggcacagaaaaaacattatatatatggggttcaatactatcattggtttcagacatccactggggtctgggaacatgtccctggtggatatggggcaccactgtacctgtcctgtgaggctgttttgaagattaacctagatagtgcatgtagagtacttaccatggcatctgatacatagtgagtgtttaataataagtgttaactatcataattgttttcatcattgtcatcaccttagtaatcaattgagtttcttacacatccacttgctacccactcagtatccaaaagttggggccaaggctgggggtggctgacgtgcatgaagtcaatgaagcagcatcccttcccacatgttagtgggcactccagcacctcagcaggcttaggttggaacccctggatcttgcacttacactagcaaattccagaagcggccatggatgccagagccacaaaacattaaatcaactgtcaggcatggcaatgagtacctggtggcttccagagtgcatgtgtccaccgtggtcctcacagttggttcctggcagaagttaagaagtaaatttccagctttcttagcacctgcccgttccttctgctgtgacctttcccctccatgccttcaggtgcccggagctcccagatgcccctcctacatcctctcgctgcaaaacataattaaccaggggaaatgtccacgaaggtgccattaaggtgtcctgcaaatatgtatactaaggtgcttgttattcttccccaggttttagtcagagcagtgagtaaggcagggatgaaaaacaggaatcagccaaccagctccacttgttgggaaggcactggctgcagtgctatggatgagaagggttctgaggccaagtgcaggttcagcaggaaagaacatcatgagtgattaacggatgatgtcatgaaagtcgtaagcgattgatggatgacgtcacaaaagtcatgatgtcattaacatcatgagtgatttatgatgtcatgaacattatgagtgattgatatatgatgtcatgaacatcatgagtgagtgattaatatgagcaacttcaagagtaattgatgaatgatgtcatgagggtcatgagtgatgatataatgaaacatgagtgagtgactaatgtcaggcacatcatgagtgatcgatgttacgaatatcatgagtgatcgattgatgatgtcatgaacatcatgagtgaatgattaatgtcataaatgtcacaagtaactgatgtcatgaatgtcctgagtgattaatgacatgagcatcatgagtgattgatgccatggatgtcatgagtgattgaagggtgatgtcatgaatgtcctcagtgattgatggatgatgtcatgaatgtcctgagtgattaatgacatgagcatcatgagtgattgatgggtgatgtcatgaatgtcctgagtgattgatggatgatgtcatgaatgtcctgattgattagtgatgtgtgtcacccacagtcatgggggagcaggtggcagccacatgccatgcatctatgatgtttggtgtaatcccctgaaatgaatgaacacctccacatggtgagacttcagattccatattatccaagatgacatacatttggaagtttgagatttatcctaaaactcaccttgtactgcagaatgaggtgaaggggcttatttttttaagggcctagactcctgaagcattatggccagccaaaatagaagtgacagcatgtcacttcagagaagagaaaagggcatgcatgaagagacgcagattgagactcggttacctgaagggatggaaatggctgtcatggaaactctcctgagggaggctgttgcccagggtttctaactgaagggcacctcttctgtcatacatcttttgaatgagggagaagaaatctccagatccttccagagtggctcaggggtgatactgattcacaccccttcagagtgctggatcaacagtgtaagcaggcatgccctttgcatgatcccaacataggaattaaatattctactgctggtcaaattatttgctaataactcatgcctaaccgtaaatgagtagtcccagagctagaaaaataatacatagtttgcgtcttcattgataaaactgtcttattagcctcaaacatgtagggtgctattgactcccaacagcaaatttgaaaacaaatggtttggttctacaaactagttaatcctctagacatctcttatatcaaaatttccaagaaatttacctcagctgccctttttaattttgaatttatccaagtgaatgtttagaaccggtttgaagctccttggagcattgctggtgtgtttgtaagaacatctgttcagtctctcaaacatttggagccattccctttgaggctgcatgaaccaagaacaaggaaagggattctcaaggcaggttatattgttaatgtaagtgacatgaatactctggaacatgtcacactcttcagtaaatgctaccagacaccacgcaaaccactcatattcctcctcagtaacaaccaaacaaacatcttccatggaaaagaagcttctcactttgccactcaacacctttcccattcctgggcagtggcaggtatgctgaacctggtacgagtgtgcctttctacatcagaggccatgtcctgcagtctttcatctgaaatgtccattaaaaataaataatgggctgggcatggtgactcacgcctgtaatgccagcattttggaaggccgaggcagacaaatcacctgaggtcaggaattcaagaccagcctggccaatatggtgaaaccctgtctctactaaaaatacaaaaattagctggacgtgatggcacgtgcctttaattccagctactcaggaggctgagacaggagaatcacttgaacccgggaagcagaggttgcagtgagctgagatcatgccattgccctccagcgtgggcaacaagagtgaaactctgtctcaataaataaataaattaattaattaattaattcaactcaataaataatgactctagaatgtgtccattccttttatccttgttgccccagctctgggtaataaaagccattttgttactggtcagttttcctgtgagatttcccactagccagttcaccttgcttctgcctgaatatgaccagatggtatttcctaaagaatatctctcttcaaaatggcttccagagcacatacatttctcttttttctaagtaaaatgatagaagaaataaaacaaaaacaaaaacaaaaacaatgccactgggccactaggaaggggccccaatggactaaaatgttgaagaatttttgtaaagtaaacataaatggttcactgttaaagtgaaagccagacacaagggaatgtaacataattggcaaaagacatgattataaaatgaagaccaaaaagaagtttgtttttttagaattctgaattgtggagcacctgtcagagtagatgctgccgcctcccatttttgcccctaagacaaaaggagacttggccagggagacttccagagtggacggtggggctggaaggggagctgtgccgcaggtggccacaaagccaaggccccaagcactgcaagaggccccctcatcccttcatcactgccctgtctccacctggcatcagaatccgcattcacggagggagtggctctatggctgctgaagccatgtgtccacagcctgggccccacctggacgagagtatagccaacagggcaccactgcagcacacgggacacgcgaaagggaggcctcagaccgagcgcctgggaaggaaatccctggagaagcattttaaagatcttgtccatctgctgcagccagaccgactgtaaatatcctccgagagattccagaaggcgtcacctttaccacacagagcggtaaagagtgggctgctgtgaaaatgaaggaagctgactgctcaagacttacaatatttacaaaacaaatttttgtaattcagaagaagaactgaataggtaaagtagtcaaataccccagttgcccccaaaagcctggatcacgctgacgtaaatgaatacggcttcttaattatttctagtgcttcttcccttcacttcctgaagtgttcttgtttggtcaaaattatgaacagaacaacaccagaaagtgccctagaaaatacaaccaaaaggcttcccagaggacccaagaactggacaaagatgaacattcaaacacttttgagagctatgaaaaatagatccaacgaatgtaatctcttggtagaggctttagaaggagagattggggagaaggaagggggaagaaataaatcaagatatgatggaaaaaaactttccccatgcttttgagtcgttagggaaaagaaacctaatgagtgtaattctaagaattttggagaagatctaacgatacatacctcctaataaaacttgacaattcaagtttagaaattatataagattacaggcagggctcagtggctcatacctgttaactgaaccaactaattaaatatagactggccccatgaaacgtgttcttcatgtttactgaaagcatattcttaaggccggtgttggggatgcccttctggctactgtacttcaagatgttctctgcagagggtcatttggaataaattttcctctggtctcaacaccaggaatggttgagcttctcataacctatctaatgggctgtgaattgtgtttccctaaactgtgttggctgctagagagcttagcatgaaatgtgtggcatatgtgggtaggtctttatagcacacatttttaatctttttcctgatgtcttttcttttttctttttacattgttctgatagcctcacttactcattttaagcttattttatttttatctgtgcattcatatcatccttatctgccttcagtcctttttgccactagatccaacatggatagacagataatagatgagagggaaatgactgaccgattgattggcaggtaggaaaattaaagtactcttagcctagcattcaaggctgcatacaatctggccacatcctacttatccagcctcgtaatgacactactcctctatcagagctttcaaacacttttagaggcacaatcagttttcaaatgaaatgttaagtgaatatatatatatatattttttttctgtatatatatatatatatacacatatatatatatatacacatatatatatacacacacatatatatatacacacacacatatatatatacagaaaaaacatggtgttttgttagtattaaaatgtttcctcaagtcaaagtatagcatttgcttttcagttcaatcaaaggaaacagtaagaccattttggtgactacaaaatgtaaactactaattaagagatacaggtccaagttacagcctcttgttaatcaccgtcatcctccaggaaattcacagtaagcctttgcagacccacagcggtgcttccggttaaaagccagtgtggaatacatgtctcaagcttccctgatgttatttctgtacctgtcaaactagcaacttatttaaatatctgatacaacctccgagattcaacctcataaactttctctggtcacatcctcgctccctccttccctggggctctgagggcattttttgcctttacgccgttgcatcttgtccatccctttacaaatgctgagctcccagaggcaagactgtttcactgatatctgtgcagcagccttatagtagactgtcttcatccatcctggcagctgtaacaaaataccataaactgggcagtgtctaaacagcagaaatttatttctcacagttccagagggtgggaagcccaaggccaaggcaactcggtgtctggtgagggcgtgctatctcgctgcgtcctcacatggtggaaggggcaagggagctctcttgggccttttttattaaaaccctaatcctattcagaggcctccaccctcgtgatttaatcataccctaaggcccgaccccctaacactgtcaccttgtgggtaaggatttcaacagaggaatctaggagggacacaaacattcaaaccatagcccagactatgtgtagctgacgctgtgccagattgcgatattcactttgtgggttcaggggacaagaagacccagtgaaagcttgtagggaccttagggaccaaagccagtgacagtgtcagccccccgcccccaacgacttcatccacacctctgctcacagatgcctccctggcaccctctcaaaggccccaccctaattgctctctagccctcatcctgctcctccatcctatttcctgctcttcatcctgttttctctcttgcacgtttcactcctgccattgatttttctgtgtatgttttcagatgcccatcttctccactggcgtgtagttcagtgagtataggaactttgtttgacccaccactttgatcctgacatctagtgcaagagctgtggcatagtgtcctccataaattagcatttttaaatggatgaataaaagctgcactaccatactatactttggggccaatgcagacctaggttagggtcataatcttactctagaacttcctggaaaataagttaatacacatgccatttttaggttacaatgaaagctgcttctcatattgtgagtagccaaaatattctttaagacattattttttttgccctcgtttataaaagcctgctcacaagacctggaactgtgaacactgatttaattttttaaacagaaatgttgtaaacaatgaaagagaatcaaaaacaattaaaataatgcaatatgcagtttgacccaggagtttgatgctgtggtgaactatgatggcaccactgtactccagcctgggtgacagagcaagatcctaactgtaaaataataataaccataatgcaatatgcaattttacaccctatacttaatgcacagtaaatgggtctgaatgaattttcaaagtgaatacatagaccttattggcaactttatatgtgtcttctctattacttcagagggaagtactggtgcctgcggataaagttttagggagacagatttcaacttaacataaagaaaaagtcactaaagtcctaaccatcattgtatggatctcatcgtgtgtaatatatggacatacggtgaaggtggacatgccaaactctcgtcccaggagttctccaggcagaaactagaggaccagtgataggcacatttgtgtaggatccctttttggattattttggactcgatggactaaggtccttgccagtttaagagtctgtgattgttcttctctgatactgactcaatagagcaacttcagggcccattgcagcacccaggcagatccggcaccttctccaaagatccttctctctgctccatgcagtggtgctgatggtaataataaaaaaccgaatgcatggagagatactgaagtgcatcctgaataatcatcaaaattcattgcatgtatgaagtcaaaatttctatttgcaaactttgttgaattacccattttgaaaagttgatctttgtcagtccctcaagacaaagtcaattccattcttctccttagtggctattggtgaaaagtctgtttcttagttgtagatcaggaaacagtgctgcttgactagaggattcctcgccttacacaaagactgctgacacattttggtcaacagtaaaatacctattcatctcttccacccatatttcaaaagtagataacttattccttaaggaatgtttttgttgttgttgttgttgttttgtttgtttgtttgtttgtttgttttgagacagagtttcacttttgttgcctaggctggagtgcagtggcgagacctcggctcactgcaacctctgcctcccgggttcaagcgattctcctgcctcagcctcccaagtagctgggattacaggcatgtgccaccacacccagctaattttgtatttttagtagagacagggtttcaccgtgttggccaggctggtctcaaactcctgacctcaggtgatccacctgcctcagcctcccagagtgctgggattacaggtgggagccaccgtgcccatccaggaatgttatcttaatgcttagtaaaatgaattagaagaggtgggaagtatctactagctcctaacaaaagtttttactttagctatgaagacataaaaagaatcagtcccaaacttaattattgatgctaatgaggaggaaaaagatgagagaaaatcagctgcttccctggctgtgcatttctgcttcagcaattccttgttgtttaagagaaaggtggcaaacgcaggtgcccactgcagccagaaaggaatggaaatgagtgaacccctctttgtgtcatataacggaggccactggagagaacccccggtctctgacaggaaccgttgtgactcagctctggtcagtcattgccattcagaaattgttagattgccagttcttccagtatttcagcagaagtactaaatccatatttccatataaaaatatgatttttaaatgttgacaacccattacaatttgaaaaatatttcttttggcgaaatgaaacacctgcaggccacatctggtccgcaggtgaccagtgagtggtgttcacttgaatcaatataccagatggccaaagaggacttcttcctgtttctcagccttgcttacaagctactcacttggtcattaagaaatcaccaaagcttatgtagccagagggagccataacagaagtggatgtgcttaagtgtcaaggatccaacctggacactcagaaatccacaatactttttaaactgctctgtatgtaagactattttaaatctacctgtactgaattctgagctatgcaacagagttgagtaagacagcgttcatagtaatacatttctcccacttcagcacgcataaattgtcttccaagaaaagggatatttgtcacttattctaccagctgtcagtcagtcttcccttgatgttctgggaagctctttggcacctcagtgccttcgtcaccgacgtgagcatctgtccatgtgaggaaaagagaatgctgccacgacaggggttgtggtgactgttgaatctgcttttgctgcctcagtgttgaggaagccagggcccaggacttgcgcatggctagttaagagtggggtcaggactgcttcccgtgccccaactgccacactgctgtttctccaatgtcattcttctcattcatattctggttaattcagtagctggtcactgaggctttctgtgcttggcacacagcacgtggagaaggaacaggaaacaaacctgcaacattccctaagggaaaggtagaaaacaaagatcagggtcacacatttattctcacaaggcctgttggtttcatgagcaccagttttatagcttctcaaaccagggctagctcacatctaggtgagaaggtagcagatggtggttccagccactcatcccaccacacagaaacttatatcctagtgagtaactgcagaggaatcagtccagaagggaattacttcaccctacgtttcacaaacgcaaacccatgatcattacaagaatgggagctgcaactaatcataaggattgtgagcagttccaatcctgcacattccgagtttggcacagtgtatgagtttaataaatatttgaagccttcaaataggaacaaagagttttatggacacaaaatatgtcttaagtaactgttgagaaaagaaatgttggcttagctttagataaagtctctgtcttcctataccactctttatcttctagacattaaattgggtgtatattcttggtcaatatcccatattaaaaatgtactccctgaaaatattagcatgggtgacattttcctttgtaatcctgattccttggccagtttccttgttatcttcccaactgtctcctagctgaattgttcagtggttattattttacggactcatggagattcacaaggaggaagatgtccatttctccaccaacacccaaaggcttcttgagaacctcccagtgatgaaaatcgagagggtttctatgtgctagagctacaaatcaaacatggaacaacaaccttctcctcggcactgttgtccaacagcaacgacaaagcctaaatagggcagagaagggagagattcgaaaaatgaattagaaaaatctccttacaaagtgctttcttcaggaaatgtgggaccaaagaggcctgcagctttttctcttaatggagataaagtaggatcatccatgtgcttaaaatagtcacatgcagagaaaaatgagcagagacgtctggctaaatgttacatctgctttcactttcattaattttcttgcccagaagaaggtattagttaatgttagacagctgtcgaatgatacaccactttaaacacatttttaaagccactatttcatagtttgtagctgtaagtccatcagagtgagacaacatgaacatgaatatggagaacctagaaacacaacatagcatctatcatagtagacatcatctcctagcacatagtttaagctacgttgacaagaagtgtctgaagtttttattacttgcttctacttagaatggtaatataaactatttttaaatcagatgttacgggcatatgagatacataatctacactgaaatccaccccctcccagacacacacacacacacacacacacacttgaagacacccactggattttgaacatctcaatcagctcttccccattctcatcctctttcttatctgtttcttttccctcttcctcctccccttttcctcccttccccttcccttcccttctttattcttctgaccaattcagtctcaaagcctttagctgggtgaagacaggtgggcatctgcacagagaagtagccccgcatgggctgcctgagctcaagccaggaggtggaggcatctgcccgcctgggagcacctgggctgtggagtcagccctgggcaggaagagagggcgtctgcgcagaggggcagcctgtcgtgggaaatcagagcctaagagtaagggatgcgtctcttggaaaggatggcccactgggggtgtttaagcccaagcagagtgaggagggggtgtctcccagaaaggacggctggcaggggggtggtgtcgcagcccaagcagagtgaggagggggtgtctcccagaaaggacggctggcggggggggggtggtgtcggagcccaagtggagtgaggagggggtgtctcccagaaaggatgtcctgtgggggggtgtcagatcccaagcggagtgaggagaaggtgtctgcaaggagaggtagcagcgatggtgatgaaaatgtcttagactcaggagctagatcaagtaagaacagtaaagaagatgaaaacccagtttctccctgttggggatggaagtcacacatatggggaggtggaaactggaggcacacctgcgtggtgctggactggaactggggggagtggagtgagtccctgtctttctaaacgcagcgctgaactttcagctgaatcttcctgggactatttgcagaactcgaatggggtgtgaagattagcctgtaggagtgcgcctgtgtgaatttcctgaatgtaacggtaatgctgtggttctggaggagaacgccttattcgtgggagatacacagccccaagagcatttggggaagatggggcatcagctcagggattccttctcaaatgcttcagggggcaaagtcctttgccctgtacttgcagctttccttaagtttgaagttgctgtaaaatcttttttttttaattagataaaattttacaaaaatgaataaactgtgtgcctggcaaaggaattgagcgtgaaggtcactagcttcaggttggaaagtgctcttccctgtcaccaagcgtgcagccaccggcaaatgacaaagtcttgttctcaaaaacttaaaaagttttctaaagaaatagctgctaaagaaaatgagaagccagatagaaaaggcattgcctagtttattcttctccatttgagacattttcatcttctctaatatattccagcgggctacattaaacacctaagcagatagaatgtgtacatgttctagtaatcggtatatttatttcatgaaggtcattatgctagagtatgatcattatagttcaggcacaaaatctaaccatgtttcccctgggctctgacccatgcagatgtcagtatgcctccacaaggaccatcttccaggtaaacaggttacacttagctcagctttaagatggccataaatcttaaaatcgtggcatactgacttttgtttcagagtcaactctcagtagcctacacacctcagaatttgttttttagtttttcagccctactttcaattatttacagtgccctgaacatcaaatacagtctcggtctcgtacctttgtaagtcatgctatcatcaataatgcagataattgtattttgaaatgcctaattataattcacatttatatttatattattcaaacacccaatgcatttgccacatgctagacaataagaaaaacagaccaagaggctgagcgcagtggctcatgcctgtaatcccaacactctgggaggccgaggcaggtggatcgcttgagctcaagagtttgagaccagcctgggcaacatggcaaaaccatgtctctacaaaaaatacaaaaattagctggccatggtgtcatgcacccatagtcccagctgcttgagaggctgaggcagaaggattgcttgaacctgggaggtcgaggctgcagtgagctgtgattgtgccactgcaagccagcctaggcaacacagtgagaccctataagaaagaaaaaggaaaggagagaagagggggagaggaggagaggaggagaggaggagaggggaggggaatggtggggaggggagggaggagggagggaagaaggacagaaggagggaaggaaggaaggaaggaaaatggagagagggaggaagggaaaaagagaagaaaaacagaccaagatattagcaggaaagggactgaatttccaagcaaattgggagtcagtgcaagagtaatatcggctcaatggccaacaacaattagatggttttcagcagatgggggctagctggcatcatacgcaagagcatcagtctcagccagatgggaactttgaggttcctgtgattagcttggtaattctaagaggaactgcagaccacttgccataggtaagatgcttcctccatcctgctcaaagccctcccacccttcaccaccaccaaacaccatctctgctcctcatgtggaatctagggccctccacaattgaaagtcagccttccagaagtgcctcctgtgatgctggtgcacagacccctgggccctttctgtttgctgttcaagtctcgagactgcctgtgccctcccgcagctgtgctcttgccgctgccgttctcaccacccgatagctccttcccagactttcaggccgtcaaaatcctcaccttcctttaaaattctctggttcacatcagctttgtaagtatatcctgagcaagtattaagtgatcttgatgatttttttgagtcttccagctatgcctttgaacacgttttcctgtctctatctttttcatcttgaaaatccacattcgctgctgccttttttctgatcacctgttcggtccttacctcctttccatctggcttcctctgtctatcgattgctctcacaaggtctctgctcagccactaattgccacaagttccaggaagaggcagagccggggccaggccaggaggcagaagccactcgggggactggggggccatgccgggggcagtttggtccaacaaagaagcgcttgaaggaaaataatggaaaatcagttctgaaaggtagattgagataagtagagctgtataaacgttgtgacatagataattgtgaataatattccactgtctagccctagaacaatttgactgtccagtggaaaaaccttaccagcaaggtggtttcttgaagaaaaggaagtttgccacacagaaagctccaactggttctaagcaaagggtagcacctgcaccaagtatcagggcatgaacctgcctcctgggttgtcccggccttaatcgtacttcattttgatcagatggcttgcagggttgctgctcacagcctatttctactatctatacgtccacatttgaaagccacctccaagcacacaccgtgcacgccctgtggagaggaagcatttgcatttctacccctcagataactgctgctgcccagttcatgtttcaagtatgagttccttcattctatcaccaggcttaagatccctttggtagatgaactggatgtttacatccattattgctggacagccacagaaccgattctcgcagcatggctgtagttgtgaaccttctccaggattctctaccacggactctgttcttgcctctcaccgtccacgcccaggtgaccgtgtcatccccacggtgagtgggtgccctccttcaccctcagaagccaccctgccccaacgtcagccctgccttagaaaaaggaccacagacctctccatctggaaagacaaagagaccacacaggatgaatccacaccaatccacgaccagtcgtccactgtggagagctctccaggccacctgccaccaagggctttcaatagcagtcaggagccagatgcatgaggctcggagtggctttgatgagatcttcaatcaccggttgaccacacaggccacagtgctgtggtagagaccctccctactccaggggccactgatgtagggttacctagaatttaggcagagctgggtagaaatttaaaaaggggaaaaaaaactctttattgcaaaagttttagaaagggaggctgctgaaaggatgttgattcttcttaagaaaactttctgcacatcatctttgcatttttgtgctaatttctactgcaatttattttctcatcccagcaagtagcaatttcaggtgacgtgacagtttatgaatgttacaaacattatttctttttaaaaaaaatctcttgaaatcagacttggcaatccagatacattttcccattcagtatgagtgggagcattttattagccataatcaagttttccttttcatgacaagaaagcttacagagacctgggaaccactcatataccacggggtttctttgcaattcatgtaactgaggaatcaaacccacatctgcgcctcctctggccttacttattgtcagaaagttcctctcttgtcctgtcagttagagcaccagtaggaactgagctgtgtatagtcagctgctagcttgagattctgacaaatctttacaaaaatacataggcttctatggccctctccttcatcacaagttaaacccacatgaaataatgtattatgagactttgcaaagaagaatgcaattcatcttactgagaaagcaaaaccctgccaggttgatttctttctcagtagcttcgtgacaatttcaaggaagccactgtaccagcacttcatttccctaaaacaggttatgactcttctttccctcatgcgttcggctcagttcctgagtggctgccgtatgccaggcaacgaactgggtgcttgagatcgatgcttttgaggggcttgtgttggagggagagagaggtactcaggaggactgtccttcactgtgacaatgctgggacagagacatgctctggggcctggaggacccaaggaattccacatccatgtgccagggactttgttggaaccaacgataagtatgcatttgcatgaagaggcatcgtgctagacctggggagtgacagacacacatgaagtctctacccaacaaccgatcatggggtcataccattgggagcctggaagctgctggaagcccaggagctcaccatctcccttcccagtagcaaagccaccacccattttacagatgagaatattaagacactcgttacgtctcacgcgagggcacacagctgatcaggagctgagcccacacaagagccagagttcctcccacatccgcacaccccagggcctgtgaacagcgctctgccctctcctgtgcacagggaaacaccaacatttttgctgacacagtcccagaaatctcctccacagacctaagtgtgttgaaccctagtgacgtcctagacacaagagggcactgcagtactgcacatttgtgcttctcctcgcaggaccgtgatgggttctgcaagtgactggtaacttcccagggaatggtgttgcctccaacatgtaaaccacacaccacatcgccactgccacaactgacaatgtcaagactaccctgtggggacacagagaatcgagccctccagttcgagaagtctttctttgggacccaatatttggcagatgccaggcagaatgctgagtttgtggagatgaggacagaggccctgccctcaagtagcctgaagtctaggaaaatgaatcccattgggaaaccagtcaagggacccaagcttggggaagggactagcacgtgctgagacctctgctaagtggaggcatctcactcacgccatgcaagcagcctgggctccgatgcacacaggagcagtgcagaagagtgagggtcccggggtcccagtgccctgccagcatattgtcgtagagacaggcacacacagccagcaggaggacagtcaaaggcagaggatgggatggcaaggtgtttaagaaagaccataagggctgtaggaagccaagaaaaggagtgtttggtaactggtaaaaatggggtgtggggaggaaaaggcagacaacccctcatcgagaaggagcaagaagtgacttctgtgtgccttggctgcctcatctacaaatttgggatagtagtaccagccttgtacggctgacgaagtgtaaattatttattatctgaaacactcagagcaggacctgttgctggtagacggtggtgatgctggaggggatgctgacattgatgctgatgtcatccgtcattgtagctccgactctgactccgtatctcagaggtggggggctctggtcatttgcaccaatttcctgtcatatggggagaattcacctcttgtttccgatgcctggcaacataaattcacatagccaccagttaatagcagctgatgagtttccattctgtgcaaaaaattacactaaaatgaccaaagattctcatagacaaaggaaatttaaggacaaaggaaaattatgtggacaaaggagttttattttctttctgggtacaagagttggtggtggccttagcagaactggatatggaaggcctgggctaggcctggatggtcccggggctgcacggatgtagctcatcttcacgcagacaagaataaggacgcctgtcctctgagtactcactgcccagtgaggtcatcagcaccgtttccaaacagaaacaagatgaagaaacaactcaatgatgagttgtgccttgccagggtgggcggacactcagcctcccctagctcataagctagcatctgtctctgtctccctagaaatcccagctgccactgaggaatatttacactattaacaacagctcccagccgggtgcagtggctcactcctgtaatcccagcactttgggaggccgaggcaggcggatccccttaagtcaggagttcaagaccagcctagccaacatggtgaaacctcgtctctactaaatacaaaaaaaaaaaaaaattagccagttgtggtggtgcgtgcctgtaatcccagctactcaggaggctgaggcaggggaatcacttgaacccaggaggcggaggttgcagtgagctgagaccatgccattgcactccagcctgggtgacaaaagcaaaactccatctcaaagaaaaacaaaaacaaaaacaaaaacaaaaaaaaccagctcccatttatttcgctctaataatggccaagaactgcaaagagcatctatgtcacttaccttttagaaacgacactattgttcacatttcacatgtgagaagagggagactcggagactagggttgcacggtggtgagcagaagcgctaaagcgtaaagtgcaagaccttcactagaccctgcctcttccgctgctgtgggatcgtgatgttcacggcaaagaagtaaagttgaatgtattcattgcagaaatgattatcatttgtgggccagcgactggaagagccccttttctcttgatgtgatttggggccagttgtctacggtctgagaaagactctaggagacactgccgcagggcacccctgccctgcaaaggtttgttgtgatagtgactgcttctgtgccgtatttcgctggcttgggggtgtctgaaaatacagtctaagtatgatatgtaagggaaagggagaatgagaatgacttagacgtatagggtcagtgtgcaccaaatggagctcttctgacatcaccttagagcagtggaccctaagacctacctctagctcccttttgtgacttatttccccacaaaatgtgttaaagtcctaatgcccaggaaataggatcattgtagatgtaactaattaaagtgaggccatactggagtaggatggaccccggatctgatacgaggggtggccttccaagaagaggagaagagacagacacgggaggcagacgctgctgtgcgacgtcagaggcagggaaaggaaggacaagccgcggactgatggcccccaccagaagctgaaagagctgccgccctgcccccaccttcatctcggacttctggcctccagacctgtgagacaatctatttctgttgttttaagctgcccggtctgtgggaccttgttaggacagccttaggaaactgatccagtccccaggtacctactcctccaaatccttcttcaaccacctacaatcctctctgacttaaggccagctgacaaggagcttgctttaaatcactaccttggagcagtggaccccaaagtgttttggtggctggattttgttagagacacacattctcaggccccaatcacaaacccatggagtcagaaacacagggctggtgcccacccgtgtccactttaacaagccatccgggtgattcagatgcagttcagaggctgagagcccagagtgtacaaaatgcccattctttgcttccaagacacacttttcctattttcattttctgaaatcagaatgcctcttaggcaatctctgtaaaatcttatgattaataaatcagtggttcatcttacagctgggggtgtctcagaatcaatgaaaaggaaggaatacaacctccacctgatatgcctgtgagtgctgctttgtttaagaaagcggcttctgatggtggaaaggattcctgtgattttaaagcggtttgtgtcccagcagtgggccctgtaatgagcacctcaggcacactatgaccttcaggaatgttcctccgaggctcccaaaccttccgctcatttctgatgcaccaaagctggcctgaggcctaatctctgggtcccacttctgtttaattaccgcgagccttgtttctgctgcctgcctgcccgccgcctgccgcccggctttcagaagcatctctggttctggaggcttcacttcgaagatgcagccccttgcatggaggggaggcccctggctgggggaaatatgcatttggtcgacgtgttttcttctctctcttctgccagtattttcttctgaagcacacagcactgcctcacccatgcccaacccacctggggagctgagcctccagataaaaatagtgtgcagtttggaggctggtgtttttgagatcgaacagctgttctgtcgcactttcacaacacggttattaaagcaggagagaagtaattaaaattgtcacttgtgcggctgttcgaattatatttccacttcctctccacagagcattcattatgtgttacaaaaatatttcattgtggtgttttacatcattaattttgtttaaattattcttaattgctcactgacatgacaaaaaatgaggaggaaattgggaggaagagattttattttaacaacaaaaaaactggaaagggtgaattttatttattttgattttgatttcacctcttttcgagatgagtttcgctcttgtcacccaggctggagtgcaatggcgtgacctaagctcactgaaacgtccacctccccagttcaagtgatcctcctgcctcagcctcccaagtagctgggattacaggtgcctgccaccacgcccagctaatttttgtatttttagtagagacagggtttcatcatgttggccaggctggtctcgaactcctgacctcaggcgatctgccagcctcggcctcccaaagtgctgggattacaggagtgagccactgcacccagcctgaattttagtaatgagtcctgggctggtgtgggcatgtctgtggccaacatgcacgtacacatgcactcacacatgtgtgcttattcacacacctgcatgcacacacacacatgcatgcaggcacattcacacatgcatgcacacacatgcacacaaacacatgcatacacagatgcatgcatgcataacgcacattcacacatgcacacacatgcacacacacacgcatgcataaggcacattcacacatgcacacacatgcacacgcatgcaggcacattcacatgcatgcacacatgcacacaaacacatgcacacacatgcataacatgcacacatgcacacatgcatgcatacaggcacattcacacatgcacgcacacatgcatacatgcatgttcacacgtgtatgcatacagacacattcacgtgcatgcacgcacacacacgtgggatgtgcatttgggatgggctggaattgagcgcccaggagccacagttcatcccactgctgagccagctctgggggtgggggcaggtagagtgtgggtaccagcatgggagtatttttctgtccctgggccagtgacagaatttgtggcaatttctggtgggcgaggcgctcttccttgttactttttcctcagttggtcttgtatagtgtggccctttatcttctgaaagaatgagactttgtgttccgctttcaacttaaacctgacaaaatctctgtatttctttcacttccacagctggtatggagggaaaactaaaccacgtttactctattagtatgagtatcattgctcatttctttcctttccccagtattggtgaggttttctagaacaatgattagccaagacccaacatctgtgttcatttcttttttctcacttccttttctatcatttccatttcaaagcaaagaaaataagactcttatattcacattcccccaagcgatcttacatttttttaaaaattgttcatttagtttaaaaactgagtaggcagcgtctccacttgcagggcactccagggacccagcagccacgttaggatgcttctcgggtcctgaggtttggttggtggcactccgtgttcacgaggacaggaatacaaggagaaaacagtaagcataatgacagcagtaaaataattcttaaataattcatggaactaagagcttccagctagacgatgtcaggaatgtttttagattcacagaatgttagagcagaaagaagttccaagatccgctaatccaaatgttttcaaacttgttttaagccacagagccccttcttcaaaaggaaacttactgggaagcccaatatggaaatagcggcttctcaagagactctggggactcgctttgaagatctctgatcgggttccattgccacattttgcagattaaagaaatgtggggccaaaaaggttaagtaataagaaaagtctgcttgcaggaaataaaaacaaattgcaccaagagccaccgtggaatagcacagaacgtgtacgtggcttatgtaagtaggtatttgcaggggcttctgtgcaagatgcccaggaccgcagcgggatgccttcgggagcagagatgggatggaaaagccgggcagactctggaaggcagccagggtgctggcccctaaggacgcacgtgcaagaccggataacgggaggctttgtgtgtgcacctggagaacagaggtgcctccttataagtgacctccctggactttaaacatctcacaaaatgtggagccagttctcaggacaacagcacatctggttggccggtgggtccctcgaggaaaagaggatggaagactggcgcgcaggaatgccagtggctcatacctaagaacaagtgttaagaacagaccagttttcatcgtgaacagggtttcagtaaaagaatactcctgttgttggggcttcttatctttcttgaagggtcttccactaaccctcaccaaccaaccatctcaccatatgcccattcgtccacagagccccaggcaacagagtgaatggatgttaatagctccttgattaaatagtaataagaacaagaaatacagataagaatgcaaataataacaatactagacacacctactgaagggttaggagggcatggcacattctaagcatttgatgtgtgttactatgtgatgctcagaacagctctttaagatgagtggtggtatcattcccatttcacatatgaagaaactacagagcagctgattcaagtaacttgcccaagtctactgagctagctagtggtgcagccaacactgaacactcaggtttacttttactttgtgataaagacatagactcacacagggagcaaacggagcccagtggagcccagtagaggactgagtctgtggccaaagtgcctggcttccagtgctggcgttaccacttacagttctgtgcctgtttattcctctgtgaaatggggacgtagcgcctcttgcctggggctacgttaaggaatgaatgagtttgtgcatgtaatgcactgggacactgtggacatgatcagcggggcgggattgttaaccgttgttgttgccattactgttattacggtggtgccacagaggagggaggaggcagagagccatcacagagaagatgctggggctgaatcttgaacactatgtagaggtttagcaggaagactgggagggaagagcgggtgctcaggcaaagaacagcacagcccccacgcaggaacgaggagtccagaatgctgggccacagtgtgtgataggtcaggtctacagaggtcttgtatttcacgtcaagagtttaaacctaagcctctggacagtggaaataactggaggtcccagtcagaggagtgccacatcacaactctttgtaaaccctcgggcaggagagtgggggacagcgctgaggacattagcatggagatgggaggtatttagcaggcacagtgagaggaactaatgaggaatcaagggtggaggttaagagaggccagagcgtggaacgacttccattcaaaaaacggggtttgcttgcgctacatcctcgagtccaaaaagaaaagcaggtgattttgtatcacaggtagcgcccaccaagtgtctgaagctttatgggtcagcccacctggtcatccccattgcttgcaggtagtgacatctcccaccttacagatagctgagaatggaagtcgctaccctcaggacacacacccagcaggtggccatggcgaggtgccacccacattcctccattctgctgtcacacggtggaccaaccatcaggggctaaagaggaggatgggcagcaacctcagcctgcatgcagactgaggaatccacaggaagcggaagcctttccagtctcctcctcactacagtgacctgtcccgtgtccaggtctgatcagatgtgaaagcaaagatggactcccatgtactccatgctcactctgttgatgaaaaggagcctgagtttcccaacacaccataatttgtacacgcaagcgttgtctcgggaagctgagcatttattcccatgatgagcatgtgctcggaagtttttagatttcctcttgtaaaactgtttttacgttccagactcatacggaatatacaactttttacttcttagtatgcttaactgctggcagcgttacctaaacatgaattttatcataccttcattaccaaacttcatttcaatgatcttgtgcactttttcaaaagcaaagctaacctctaacacaggtagctggcgatttagaggctattctagagaatgcgccgccaactctgaactgactctgccaagtgttcaccttcccagggaatgtgcaccacccgcgagttatccacccattcatcctatcggcgactgtcaattggcgacttgctgttaacgagtcaatgtacgttttcctaggtgggatgcaaagttgtacaaaatagattcctatgttccaagtacagttgaagagataagacataactagatcactagaaatcaaatcagaacttaattgctcggatcgaaagtcattgcagaactttgagttacaacatggcagactgtgctcagtgctatgacaatctgagggcgagggtcataccaggagctgcgagaagtatgctgagaaggccgggaagtggggccagacactccatccacagtctagctgtgggctcagtcggggcgaacgaaacagccagtgggcgctgtacctttcccctgcaggcttttgcccacccctccaagcaggctttgcccctctgcaggctttgcccccctgtagcctttgcccccctgtagcctttgcccccctgcaggcttgcctcagcgcacaaaactgaaatactaagttccttctttcatacttggaattctgtgaatcatgtaaaacacctgaaaacgtcactccaaggggcataaaactgatgctgtgagttcaatgcagataattcctaacccctaaggcttttacaaatcaactacccaaaggtacgagctgaattttgggaatgtactgagaaccttctcttttcttcttttttttatgattgggaaggtttcccttattcaaaatgcctatcatgagccctgagtgtcactagtaatttctagagcaagaggttccctgtgactataaaaagtcaacgtgccattgcctccccatcttttgtgagcgtgtaaaacaacccatccatttccacggcccccctcgagccgcgctcctcggactgctgtatgggaaataggatcactttcaagttccctggacacataaaattggattgaagcaaaactaaatgctgtggggcacggagtggagggggtggggacagcctcaatcccaggtttgatgtcagcgataacaaggtttccaaatcaaacggcaacaaaacctgtcggcagtgttgactaggaaatgctgtcctcggaacaaatattttaattatccgcagtagttctggtagcttggctagctccctgtttattagtatgataatatcacctcaatgtataaactttatgcatcaggcatgcataatgcatgaacgggcaaataaagagatctggagcctgttcgcagcgggccatgccaattatctcgctcggccagagcctgcctctgctcacagctgttctttgaaaccattcaccaatgcttaagagatatcagtggtgccagccaggctgtttgaatctccattgtttacatactaggagtttagctgctggttggaaattatctgtcacataaacatcctctgaggatacagacgagaggaagggagacaagccctgtctttatgaattttttttatttattctgatgacttttttcttttacagttttgtgtcctttttaattacttcgttttcctctggaattgtcacatttctccctccagttgagcaggtgaaaactaatgctctaaaatgcctggggctgcaaaccagagacacagaaataaatattttctgttcacaagtctgttgtgtaattcaaagcttttcttttggtaatctgattttttttttatttttgtccctctggtcacaggatctttacagggcaaaaacgaccttatatgtgggttgtgaattcacttgcttccatttgtttattttcccttccaggaacaatataaattttgaaagtcagatattgaacttgagccaaaatagtgtgtgtcaccaaccaaagtttttaaagggccaaatgttgtttttattgcggttatctcttcgtaagcaaaggctgagcagataccatcagttttctgctatcagcaggcgtgccattgtatatttcagtttgaacatcagggctgttgttgcatgctccaaggctgcaccagccacgaggcaggcttatttatcaaggacttaggaaatatgaggaccaggcagagagaatcctagtgaacacgtttttgctgatgcatatgttcacgtgaatttgggaacacgcacataagagtgtgtcattagacaaatgcatagagaatcagatatctaatatttgacctgaaccaggaaggaactcacaatgaaatatgattgtatgctttcatttaaaagcgtatcctaaatacaaaaattagccaggcgtggtggcgcatgcctggagtcccagctacttggaaggttgaggtgggaggatcacttgagcccgggaagtagaggttgcagtgagcccagatagtgccaatgtactccagcctgggcaacagagcgagaccttgtcttaaataaataaatatataaataacagcatatcctatgttccaagactagacctaaacataaagataccagagatattggctgggaaaaaaacagaaaagcaatcccgtgttctcagcctcttttctttcttctttcctttccctcagacttagaccagaacctctttgtcggtacaggcagacaccatctgcttccatcctttcccatgaccatggcaaatgttgacattgcaaaggcagattctgaccacggaattctcatctctggaggaaggtatccccatcacagagagttgtgacgaggttgagagaatgtctctaagagccgagtgcagtaccaggcagatagtaggaaaaaaatgttggctgctgttgtttttgctgaagctgctgttgctcttactaaaagtagaccttagcaagcctgtatcctgcagttgagatccagataaggaaagctgcttacctggaatcacaaaatagctggtcccctgaccccttctttacttacaggagtccccgcatagacctctgaaccatggaccgcgtctggtggttgtactggccacatggcatcaaagcgtattttcatgcaagtctgtcttccgtactggactctgagctccctaagagtaaatgctttgtctatttctgtctgtttccccagcagctagcaccatgccttgcacatggtggcatctcaatacctatttgttgaattacatgcaaagtaaaaaagaaactatgaatatgaattgtcagaagaatagcagctaagtggagtcctaaggtttagccacaagaatctgtgccaaggcaatacagatggattgtcttacaggcatcagagacaaaagggcaaaagcttcctattgtatgaaacaaatcatttaataagttttactgaccagacttgcataagatcatttggaagaagaggaaaacaagtaaaaaaccaatgtggtaaaaacccctcataggtgtccttggtaaaagtattctctgttgtttcagataggtttaaagtgttcctcttgaatggtaccagcttccccaaaattctgtgtatgttcttcgtgtgttcggcatgtcccctcttctctagaaatcttaggtaaatgctaacatgggtctagtctggccaaagtagcacaaattttgagtatctgattcctaattaggattctgcttctgtttccttattaggagaaaatgtattttgatttagagaaattgtattttgatttagatgttttcctgaattatttgccagttttcaggggccatcacagaaaccttgaggcctgtggtggtcctacagttcacatagacagtagtgggcatgcatcccctgggccagagaaaccggatgcgaaggcggcctgcagagccgacctcagaccaccagagggtctgatctcagggcagagactcagttagactgcctgggattaggaatcaacagatacaaaattatacagaggagctgtttttcaacttttgtttagtggcctccttaaatgtaattttattcacgttctttgtattccactagtgtaaagaagtattctatattaaaatatcagtgaagatggcctggttgtcatatggcttcacaaacagaatataattccgatcttagacatggagactgctacccttggaacttagtgaaaagggcaggggattccctatgtacgaacagagagaccacagcctgaattagaaaaaccaggactccaagaatggtcttgagagacctttccttagcctgatttaaatttgccaccttgatatgtcatagccaattataagcttgggaggtcattcattcattaaccattaatctgttcgtcaaacatttttatacaacgctgagtccaaggttcagaacaggtggaggggatgagacatggcttcgtggcccaaggatttcagaatgtgtttgtctttctgtctgtgtgagatggggttggaacacggtcagagcagctatggctttaaaattgcaactcagtgtgacacttgctattattggtacttatggcactttcttcaatcacaaattagaaagcacacgggagaaatacctgcagcaacgtggtaagaaacaattagcttctaaataacataaaaaacagcaatgccattaaagtggacgaaggatgagagagggcagtttgtagtcaggaaaacctatgagaaatgcaaatgtcaagggggaagggaggagggatagcattaggagatatatgtaacgtaaatggcgagttgatgggtgcagcacaccaacatggcacatgtatacatatggaacaaacctgcacattgtgcacatgtaccctagaacttaaagtataataataaaaaagaaagatgtccagctttactcaaaatttctaaaaattcaaacatttacccattagagtggttttaaaaacttttttaagatacaacctagatctccatacactatcagttggagagcaactagacaatatttactaaaatgtgaactgtttcgactttcagtgtagaccgtattattgttccccatgtttcacagcccctccctgtaaaaagatcatcctccaccccatggccatgtggcctgcagggcctctgtggagatacagactcatccctgctctgttgggaccaatgggatgcgtcttggccaacagcatgacatggccatgtggcctgcagggcctctgtggagatacggactcatccctgctctgttgggaccaatgggatgagtctcggccaacagcatgagagtggacatgaactgcaccatgtccaggacattttttagttatgcaaattatttttggtaatatttatttttaatttattttttattgaggtaaaatatacatatataatgtatatataaatatatataaataaattatatgtatgtgtgggtatatatatataatttaccagttttaccattggagtggtaacaaatacatttatattcttttctcccccttcatcgtgcatttctgcaagccccccttgctcatttccttttgttgtgagctcagcctgttccagatgaaggctgacctttcaaccaggatcctagaaagaagacgcatcctggaggatagcccagcagagcacagccgggctgctgcagacctggttaccaggacgcaacattagcggaaagtcagcttccttgtttcacaccattgagagtcaggagttatgtgtttgaaaccacaagattatttcatgaacgttgactataaaacctttttgaaacagcaactgcagtgctaccaactagcttaacgacagatgcagtcttacccgtgtgcaaagatatatgtaagaggtttttcagcaacactgttttaagatagcagaaaatgaaaggaaacaacctaaatatccaccagtagacagacaatggactcaataaattattatatttccatatgatgggatactatgcatctcttcaaaaatgaagttttacaacttttaaaaattatttacatcattgtatattatagtattaacccttctgctactagatgttttcgcttaaccttataatcttcatgttggcccatgtcgataggtgtagatctactaattcattctgcatgctctataatattctgccatgtgagtaactgcgttttattcatttaatctcctgctaatgagtagctgagtaatttcccatttgtgacctgtacatagttgctgttaggaacaatcttctgcctgccttcttgtgcacaggtgcagaggatgctctgagatgtgttcccaggagtggagcccgcaggtcatacgcatgagcatcttcagatgtcatggatattgctaagctgttctccagagtggctgtgcccactgacacccccaacacggcttcaccctcttgtagtggccagactagatgtcaagaccgtaccaaatatgttacattgagacatgtcatatcatactatatatggcatgtatattattatgaatacatagccatgtggtagaaatatcttttaaatatgcagagaaatgatcaacattaacttcaaaatgatggtcacttctgggacgagagaggactgggattagggaaggaatgcaaatgacatcgtagctatttgttatgtcttgtttttttttgtactcaacactacttatttattattgttttccccatattcttttattttgtttggtttggggctctttcatttttattcatcattaataattgcatatatttattgggtacaatgtgatgttatatacatatatacattgtggaatgatcaaatcaggctaattaacatatctgtcacttcacgcatttatcattctttgtggtgaaaacatttaaaactccactcttttagcaattttgaaatatacaatgcattattattacctagagtcaccatgctgtacaatagacaccaaaaggtattcctcccgtctaactgaaactgtgtacccttcgaccgataactcccttttccccacctgccgccccctcacttcagcctctggtaaccatctttctactctttgtttctacgaaatcaacatttttagattccacatataagtgagatcatgtgacatttctcttcctatgcctggcttatttcacttagcgtaatgtcttccagattcatctgtgttgtcacaaatgacacaagtcctttcatctctaagactgagtagttctccactgtgtatatgtacctatgttttaatacattcatctgttgctgggcaggtaggctgtctccatgtctggactgttatgaatagtgctgcagtaaacatggaagtacagacagctcttcaacatcctgatttcaattcctttggatctttacacagcagtgagatggctgaatcatagggaaattctatttttagtttttttttgaggaaccaccatattgttttatgaaatagttttactaatttaccttccccccagagcatataaaggtttccttttctccacatgcttgccgacacttgttagcttttttttctttataatagccattctcacaggtgtgagatgatatcttattgtgcttttaatttgcatttccccagtgattagtgatgctgaatatttttcatgtatctattttctatttgcatgtcttctttgacaaattcaggtcctttgcccatttttaatagggttgtttgttttcttgctattgagtagtttgaattccttacatattttggttattagccccttatgtgatatatgatttgccagtattttcaacacaattcatgaaatgtcttttcactctattaattgctttctttgctatgcagaaatttaggatgatgcaatcccgttcacctagctttgcttttgttgcctgtgtctttggggtccaagccaagaatcattgcccagaccaatgtcatggagctttttcactatgttttcttccagtagttttacaatttcaggtcttacactgaagtctttaatcgattttgagttgattattgtataaggagtgagataagagtccagtttcctccttctgcatgtgaatagccagcttttccaacaccacttattgaagagactgtcctttccccagtgtgtgtccttggcatctttgtgaaaaataaattaactgtagatgaattggtttatttctgggctctctatcctattccattggttgatgtgtctgtttttatgttagtactatgctgttttgattactacatctttgtaatacgttttgaaatcaggcggtgtgatgcctcctgttttattctttttgaacaagattgctttggctatttggggtctttgtggttgcatatgaattttaggatttttctgtgaaaaaaatcaatttccttctgtttctatgaagaatgactgaaatttggatagagattgcattgaatctacaaatcacttttggtagtatggacattttaacaatattagttcttccaatccatgaacaagggatatctttccatttatttgtgtcgtctccaattttctttcatcaatttttatagtattcagtatacatattttttacttccttgaatttattcctaagtatctttttcttgatgccattgtaaatgggattgtttccttaatttacttgtagatagttcattgttagtatacagaaacactgctgatttttgtgttgcattgtgtaacctgcagctttactgaatttgtccatcagttctaacattcctttggtgcaatctttatggttctctttacagaagatcatgtcatcagcaaacagaaaaattaacttcttcctttactatttggatgacttttatctcattttcttgcctaattgctcttgctaagactcccaggactatgttgaataaaagtggtgagagtgggcatccttgtctttctctgatcttagaggaaaagctttcagcttcaccatggattttgatgttagctatgggtttggcatagatggcctttattgtattgaggaacattccttctatacctacttgttgacagcttttatcatgaaaggatgttgaagcatttgtcaaatgctttttctgcatctattgcaaggattgcatggccttcattttgttaatatggtgaatcacatttactgatttgtgtatattgaaccatccttgcatcccacagctgaatcccacttgtttatgatgaatgatcctttttaaaaaaattgtttatttccataggttttggaggaatcagtggtatttggttacatgagtaagttatttagtggtgatttgtgagattttggtgcacccatcacccaagcagtatacactgaacccaatttgtagtcttttatccctcaccccctcctcccctttcctccaagtccccaaagtccattgtatcattttcatgcctttgtatcctcatacttagctcccacttatgagtgagaacatacgatgtttggttttccaattagtgatccttttaatgtaccattgaatatgatttgccagtattttgttgaggatttttgcatttatgttcatcaggcatattagactgtagttggggtttttggcgggggtgggggagtttggtagtctctttgtctggctttggtatcagggtaaggctggcctcataaaatgagtttggaagtactccctcacgttccattttttggaagagtttgagaaggactggtattagttcttctctaaatgttggtaggattcagcagtgaagccatcaggtcctgggcttttctttgataggagactttttattattgattcaatcttcttactcattattgatctcttcaatttcttcatgattcggtcttggtagattatatgtttttaggaatttatccatttcttcttggttatccaatttgttgccatgtaattgttcatagtagtcgcttaagatcctttgtacttctgtgttatcagctgtaacatctctttcatttctgattttatttgcatcttctctctttttttcttagtctggctaaatttttgccaatgttgtttagcctttcaaaaaacaaactttagaaaaactaacttaaaatagagcaatacggtgtgtaatgttaagattttgtaaagcttgcagatatacatgcaaccattttcatgttatttttgtctatgtttaaaatacgtgcttatgtgtaaatatgaccatgtatgtgcagacaaacatttaagaacattttagcaacatttaggttacttctgggaagtggggataaaatagatcactgttactttattcctttctttagtgtcttttagaaacatatattaagtttatgaattaaaagattaaaagcgactaattcaggctcagtagcttttttattgtatggatgagacaaaagacttaaaactatctacacctgtggtttttttcctctgtaaaatatggttagaaatatctactttgcagagctgctgtgaggatttgattagaaattattcataaaaatatctaacagcatgccttttacttagtaggcactaaataaataataattgtttacattattaataagaacataagagatattctgttttcaaatttattcaccctgaaatgtgcagagaaaatacttataggttctttatttttcaataactgattctttcttctacttgagctccccatgggggggaaatgaatcttagagccaagaaacttagtttgactcaataatttaaactggcatttaaatctcttttggtaagtgctgcctctttgggtataaatatgtggactttcagatcgctgttccctcactgggtagggggtgccatatttagcaaataaaaatttaagatactcagttacatttgaattttaggtaaaccacagataatttttttgtagtatgtcccaaatactgcatgggacacacttacagtaagaaaatacttattctttatctgagcaccacatagaaccaggcatcctgcatatcatctggcagccccatctgtgggtgaacagagaggggcaccacgttggggaaaagggccctggactcctggactttgtgcatggggtagagactggatccagtccttgggcaacagataggcctcttctctgatgtccaaggccagcatgacccacagtctgtgtgtctcagctcatctggacctgtggatgggcactggccagaccttccaccttacctctcaagggtagaggactccttgcatttctgccacatgctctttgggccctggactagggtgtccactctggggcctctgcagtgaggccctgaagccctcagcatggtgggatcatagcagattccctagctttcaaccagttgtcagacggcccctcagaagcgtgtggggagttttgatgatgaccgcaggaatactgaactccacccatccccctgcccaagatagtgtgcatgcttcagctttgctgtggccaccccttgtgagtccatggcatcctgggtccatagcctgaagcagagcgcaagcagcagccctggccacagtgttcccacagtgcatctgtctccctgggaccacccacttcccacttcctctttctccctgcatcttcccacaatccacctgagccaaagggacaggctctcctggctctcctgcctctcctgcctctcctgcctctcctccctctcctccctctcctccctctcctgcctttcctgcctctcctgcatgctctgtgctttctcattcagcattcactccacaaacatccaatcgagcacaactctattcaaaacacccttctcaatgcagaaaacaacagcagtgaatctgacacattcttgactgtctcggagcttacatcctagtgcagtagatgaggagaaggacagcaagcaagtatgctgatcattacatattataaggtcccaatagcgtagtgtgtggtaatgagttctacaaagatcaggaaagctgtgagaatggaggctgaccacatggtcatggaggggagttcctttagatgggatagttggagatggcatttgagtagacatttaaatgaaggaaacacaggccatggcagtgtctaggggcagagcatttcaggcagtgagaacaagcggctcagtgggaacaagcctgacatgcctccagccctgcaggaaggccagctagctggagccggtgagtgcagaggacagtggctaaagtaaggttggaaaagtcaccaggcctgcctcttaatgttttcaaaaagatatagaaaataattcagggagactttttttctttctttctggactctccttttgctaagaagaatcgagaagtcacctgcagagaaaacagatcaggggccacctggtcctgagttggaccttccttctcacttctcagggctgcaacattcctgcagctgggaagctgccagctagtgattcaaggaaaaactgaaatatagtttgacattttcaaaatattcctgttacatgaatacgtttttacaaggtgttatgagagacccattggatggagtgacatccttcctggaggagccagcagacttagcactgaggcttgagtaatttataagaacccataaagccatcctggaatgtgtgtctgtatggtaaaaatgatgttatgaggatataaaccaaatgtaatgcttcatagaatgatgttttatggcattacaataatctgaaaatatggactttgagttgggtgtgttgcagttaacacaggtgcagaggtagggagctgtgccttggcccccctgccggcctggcctctgccatcccatcattgattactcttgcatgaattcgggttctccaggctccgcacgtctatctacgtggcataagaaaagcctgttttcttgttctcggctaaactaatggcttcgtttttgttttcttcctggctattctctacccaacacaggtcctggtgttcctatggtgacggtgcacaacacaacagataagaaaagtaagtgctcttttttttccttaaatcttcctgagactcaggagaaaggaagcaaaacactctatgagatcagctggcccacattctcctactcagagacagagggatgagtcatgtcctagcagttcagaataggccatgctgatcaccaatatcaacgaaatatgatgaaagtcaaagtccgcatacccctgccagagggccccacaccccttcacaagtgctgagcctggagggtcattccaggcctacccaggtcatagactgacatcctctgaacagccagctcaaaaggctttgtagcctcacatgagtccgtccccactgagaacctgccatgtggcaccaagacttgaggggcacatggaggctcatctgtctttgtgggtctgggagcttcacggcatggagggtctctgcatccatgctgcacaggatatcagagaaaaacttattctgccatttgtaaaatggtagggaaggctttttcaggactgttgtgaaaggggagggagattcaggctcaactttgaatacagcaagatcccgtgggggtttatagccagtgaccagagaaaggggtccgtggatggaaaactgctaagagaaggcatcagtgggaggcgatttttgctaagctgacctcacaagatccttgctgaaggcaggacaaggacttaggctcaaaggtggaggacgaggaacagttacggagggtgatcagatatcaggggtggagacctcttgctaaagctgggcaatgcaggccgaagacaggttaggatcaaggttgaagcctggtcaagaagaggactcagaggagcctcactcaagtttggtcaaggagagtctttgaaagacttcccagggtcactagaggtggcatgtgtttgcttggagggaccccacacaggttgccacgggcacatccgtgtttacgcgagggatgtgtgctgtgtgcagtgggaggcagaggcacagcacagctgagaagcaaagagaactcgccctcggtccctccctttccagccctccctctgtctaacccaaagcagcctgtgtcctccttcccccgaatccttcccactcccttccacattcaggaaccccttccctggcaggagggcaaacttcatggcccgggtccgcagttcccctaggtctggggacagaggtgactccgtgtctccagtgaccatcgagcatcagcggctccctgattcctatctctgtggtggtacttcaagctccaggagaactggaggcggcggcggtgaggcgcatgttggaaaggaggctccaaacgtgtgtttagacaccgtgaagtggtcaaactgttccaaagtgggcaaaatagattcgtttaaagagacagcacttagccaataatcccaaataatgatgatagtctgccaagctatcaaatcattattagaaatacaaaaccaaagcataagtaatcataaaaccagaaataaattaatagattttaaagcccccacaaaaagccataaagtggatgtcagaatggatatacaaaaacactcagaatggccgttggagggaccccgtgctgagaagaagcgggatggccttcctgtgctcctccccagaggaggggctggtttccccagcaaaaaggttcacctgctcccaggctgctttccagcctcacctgcgaggtttgggaatctgggccatttgagcaatgggggcggtatccccggaaggatgttgggcgcgattgcctgggtctctcacctccccactgcatccacccaccctctgcccactctaaggggcacgaggctgtgaagggccctccaggaggccgcagaggccaagctagaacttccaccaaggcctggggtcggtggagtctgacagacatactccggcatgacagtgaatgtttgaaacacctgtgctagacctctttaggtggaattttccctgaaaaaatgccgatgttgcatagagcctcaactgtgacatcttttttttccttaagcaaatgtatattttcattttgagtatttgataagatttagagtccatggacacctttctggtatttgtgaggttttccccttcttgaaaattgatggtctggtagaaattagataaggtgtccaatggagctcacagcattgcagcctcccgggttagctgttgcccgatggttctgtgagatgccaccactgaagacccggaagtggagacacaggactctatgcactatttgtgcaacttcctaggaatctataattatttcaaatttaaaagttttttctaatctgtggtctaataaaaaacacaaaagtatctttcagctttgaaaaatatgatatagcatatggctcttcttacaaaagtcattcccttaaatgctttttacttctttggaggaagctattattaatctattcaagttcaaaggttaatatagtccctacttttgggaaatgcattttgacttctaagccacttccagcctggatgtgatcagtccttggggctcctaaagcctcccacggtgctggatcaagtcaacacagtttccaaggctcatgtgtgagtgaaaatgaagccggcctgtatcttaggtgtgtgtgacactgttgagaaaatatttcatttattccatttataaaaataaggtaatctataggtgggctgaggtgcaattcttcggaagagagtcccagtaagaattgaccaaatgtcttccagcaagtgcaacatgctaatatgctcaaagatccaggaaattttgttaactctgctgggaaacaaaacaaccacttcttttcctctgtaggactggctactacattaaccaatcaatccaatcaatattgacagaccataggccctaggttgccatccatatccgttgcggagctgcataaatgggaattttttaggaagcatttcgccgtttgcagttgagctgtcactttggtgactgtgactccctgaagcaaagagatgggacccagcggcttaagaaataaaaagcactgtgcacacaggatggggctggcgttacatgcctgtactcccttcttctctgtgtgaaatttaacagtgaacctgaaggtgacaccattgcgcttgatctcagcaaagtgctgactaattggaaactggacggcgtttagaattattttggtcacatttattttacgagcctatttatatagcagtgtttgactctgggtttcctggagcctaattcaaactctaggaatatttcatcccgccctagcctgtttctgcatttctggctgtcaatgtagttcaagctctttcaggatggtaacttaagctgccattttaacttggaaaaaaaaatgattaaatgtggttgagttgattgtcgttcccatccccaggaggacagtaggggtcccatcttgctcagtgtctatgttacattcagacttcatgatttgaggggttccaggttcctgaacacccactttttccccatgcctggataaaagtgcctgaaatcccttccttgcacggccatccctgagggttggcacatcatagctgcacgaatggctttgagtccacctgggaaataagagtgagtgtggcagggcctggtaaagtgccaaacccagccctgagttccagcctccaggtgtttgccatgggaggcgtgtggggtttcttcagtgtgtttaccttttgatatgtctgatgtcctcttgcagcacttcacagcccatctccaacccagctgtgtcttccccaaacaaaatgcactgagttttcattttgtctgtcaaactggtgcatcttggatgagaaggcaggtgcctggtgcttccaggcccccagttccagcagcatcttgttcgtggtgtggttggaccacatcagagcctcctcgtggcctctgcagtggatgaagggtccacagcatgtggtttgcggggggatgtgcatatcaggcagccgacaaagccattgtcaggccagcacttcacacatcagcctttgggcctcaggtaagcttgagatcagttgtcctctttcacgattgaaaaggccgctgaagacttccaggagcaacacaaaggcaggcagtgagtcacccatccctgcagatgcctgtttcatccaaacactcagccagctagcggttctgcatcgtcaggattctgcaaaaccccacaccacttgtacttgttccatttgatgctccatcctgaacaactcagacaaccgtgttctgatcagggggccagagaaaggctggaggtcacagggagccatggtagtaacaatagtggccccaaccagcatttatcagcacttgctccggggcagggtgctgtggcaaatacttgacatattttaactcatttcatcctctcaacagcctgtgaggcaggaactgctattatccccacttgtcagctaaggaagctgaggcaccacagcttaggtgatcgggccacatgcatgcagcgaggaagcaaaagcagaggagttgcatctcggacgcaagcagtgcggctccaacagagcctgttcttccagacatgtggtcattgcatggcgctgctcagccgcctgccctcatgcggtctgaaggacaactgcaaatccagagcgatgcccggcctgcactcccattgagatgagtctggggaggcagaagcagtcacacctgcagctcgttctcagcaccttctccgcccatacaccacccccggggtccatccgagccagctctggggtgagcgtgcggcacggcaccttctcctgctctgagaagccttccacgtcacagggaagagatgctcctcaggccctggtggctgttaaacctgtgggagccccgtcgaattaagggctctgcttcctgcagcagctcagcctccatgtgcaggctggggtcatactccatgcactgtgagagctcagcccttgaacttcaccctctaatggcagccccttagcccccaggcagcagtctttggctagccatccattattctcttttgaatgtaatcgtagcagcagttctgggctctccacacagcaccaggccccttccttgtaccaaccctatgaggttcaacaattcatctgagatccacagcaaacttcagggcgaggcccggactcttgtcttatctgactaccaagcaggcgctcttgactgtgggctgggggctgataccagatgtctgacaaggggggaaaggcagccccagaccccaagacccaggatctcctggccttcacgtcgctgccatctgggaaatgtgctcacagcagcagcctctgtgaccactgagctgctggtcaaaaatcacccctggtttagatcagccctggtgaggccatgccagcacaggcatttgcacctcacgcctctgttgaacagtgtgcaaagcagcagcgcttccaacccgcgctgtggggctgagccaggaaagcggggcccatggcctacagctgggcagggcaagacaggaggcctcggggagccggctcctgagccgctgtgtgacgccatgactggcagctgaggtgtggcccacgttctgttacagggcagagcctcggcactgtgcgtcagctagcaaagggggctctggaaggctgggacccgtctttatcatactatcctctcccagccctgctgtgaaatttgaaattactgtttcagaattctttgtcctttcccctcctctcccccactgaccccaaaaccaccctgggaatatttgacttttttcctctttagaaaatcttatctacaaacagagcctgcggggtgttcacagatgtgactctgaattatttaaaagctgtttccttaagaaggtaattatggttgggaccaacctatactcatttggtgcctggatattcaaacaaacaacttaggtactgggataaaaaaaccaacaaaatcatagtgaatacattgcgggctttaatgtaaatatgaaaggcaggcccacttagagacgtggatgccaactcgacgtgtgggagtcgaaattgcggtgtggcttgcaatgcagccccacagccatgcagagaaagcgtgcgtgtggcggggttgaagctggctacactggctgacagcaccccacagcggcctgcaagcgcatgtgggagcttgggatcactaggcagcctggttcccactcctttatggcatcaaaagttaggtttctctacctcctactctcttcatttgggtctttgtaagaaagcaaaaacagcccctaccaccagtggtgcccaggtgggtccatgaagcaacgccagatgcagttggtttccagcctctgttcctgcaccagtgctgctgggcgcacccctgccccaccttctccctgaggcaccccctcctagactgtcaaggctgtgcccacagctccccttccatcaagcacagggcgcccacacatggagagacatcaggagcatggcattccagagggcccacatgtcactgtcacgctacacgccaaggagtttgcccgccatcctgcaggacccaggaggagcactgtcagacgtccctctcgaaaagcttctggtcgctgtgcagagaatggatggaaggaccccaggttgcagacaggagggctgctgggggccatggtggaaaggatgagagtctggaccagcaggggggcctccaatgaggggctgcctctgcaggccctgcagggagagatgcacctggaaaggggccgaagagctgccatctcaatccagtccagggaggtgtggcacttgctggggtggcgaagcatcatacagaatcctacagcctgtggccctcaaaacctgggtcttgtccagtcctaacaaagaaggaacagccccgctgcctccttgggtgcagcagcaggcgactgggtgggtgtctggagagtaggtcctcatgcctctcaccctgcaggccaactgggcaaagccctggctctcagaaacagtggccaggacacagcgggcagctgccccatcacagccgtggagccaccaccaaggttggggccgtccagcaaatgcacaaacccatttcagacctggagataaaagccagctctttcctgcagatcatatggggcagaaccaaaaagactaaaaatgtaaaaagatgatgaaggaaagtaaatgttaaaagaaaaaaaatttcgaaagcagcctggtgcctaacttcagccctaggtcttaacatggctgcatcaggcaagtttctacctaagacccacagctttcaaatattttaaggagcaatttggtggccaaagagagaaagtctcattataaagtggcctttatgtgaggggaccttgccaagtcatgccaagacagaggacactgggccatctgtcctcaagtagtttttgctcatgaatccctaagataatttttgaaaaatcatgtttcccctacacatttttaagttgtcacctaaagtttttctcattaattcaaagctgtacaaaataagtttttagcatatttattttaaaataaaagtattacataatcctatgatatctaagtattgtggcaatttgatacttaccactgcccagttaaacatttctggaacaagttcttcttagctttacatccttccttttcctcctcgagctgatatttacattccatttgtccgcccgtcaccccagaattctgtcctaacgtcatttaatcttggaaatattttaaaggtcttttctttttaacttccggtgaccataaggccataatcattacttgttggatggaattattatcataattatcacttgttcacatcaagcaattaggatacattacatactttgataattgttggacataaaaagttatgattgctctgagatgcatctcttagcgagctgggtgtggtggtttttcactcagttcatgagcacacctgactcatttccagagaagaccttgtcagaaacgtgtgcgctcctggtttttccctccttttggtggtcgcttctttttgtttctgtagaatgtctgaaaatgtgttcatgtaaataaatggagagagaggagtcttgttatagcagtgccattttcactgaacgcctgagctatatgccaaaacattgtggcccatccattctctgtcattaaggattattttcaatgatctattgatttttagctcagtgagattccccttccattttgttaaaatcaaaggatgacaagccgaccatgttactgggggctcttacccattactgggggagttctcttactgaactcagccttggtggtccctcatccttcatgtggagcccacctgtgtacaagatgccccagggacagatgagggggctccaaggccttccttgccctcgtgacgcctgtgtcaggccatgatgaaagaggcacaggaaaggagcagttccttggagcgaatcaggcatgtccattctcagcacatttgccagcaggctcctatggatgcagagagcctgggaaccagtctcctgaatcccacgtgtctgcactcgaaatcttctggacccacagggttgcacgcgtgagcagctgtcctggtgggtggagtgtctgcagatttgctgttggaacgtgttagacttcagtccagcatttgggtgggcaagctggcatttggctaacacagagtggaaagcaagccacgcatggagctgcacgccctgcaggatgtctgcaggtgcttcttcctctctactacctaatgcgggaggagagctgggcttcgctgccacccagcagctctcggtgcctcgaggagcacctgcaggctgggcactgtgccagccactgcacccgctcatccgtgggctggaggacacacacatgagtcccctcaatgcacaactcctctggcatcaaacacctgccatgggcccagcatgatgctagaaggaccaaaaataaatgccacctactgggaccctgccctcaagttgcttaaaatctggctggaggaaaaaagatatggcaaaaagaataatagttgcccaaactgtgtcagactgactctaacaactcaacattcggagttcagagaaaagaggctgggtgctgtggctcacacctgtaatcccacgaaggtgggaggacctctttttcttttttgacctcctgggctcaagcaatcctcccacctcagccccacaagtagctgggactacagacatgcatcaccatgactggctaatttttacatttttctttggagagatcaggtctccctatgttgcccaggctggtctcggactcctggactcaagtgatcctcctcccttggcctcccaaagcattgggattacagacgtgagccaccgcacccgaaccctttcctttgtcttttctattttgttcataaagcatgtctctgttgatcactgcatgtatatgtggagggaaggacaatatgattttaagaaatgtaatatttagcatcttggccccaagattctacaatcctttcataggatttttttttttttttgagatgggggtcttgctctgtcacctaggctcaaggggagtggtgcaatcacagctcaagctatcctcccactgcagcctcgacctccagagctcaagctgtcctcccacctcagcctcctgagtaactgggaccacaggtgtgtgccaccatgcctggatttttttatgtttatattttgtagagatggagttgggattacaggtgtgagccactgcacccagcaaggaagatctcttgagtccaggagtttgagactagcctgggaaacacaatgagaccctacctctgcaaaaattacaaaatttagccgggcatggtggtgtatgcctgtagtcccagctgctcaggaggctaaggtgggaggattgcttgagcccgggtgttcgaggctgcagtgagttatgatttcaccactgcactccaacctggctgcaagaccctgtctcaaaaaacaaaaatggagctcagagaaaagagatttccagttaaggtgagtaagtttaaacagtagtcatgcgggctctgggcctgaatctggtcttcgaatatgactaatggcctagccctggggtaagcggacggcagctgcaagagcacagggagggggcgaggtggggcagagaggggtcctactgatggccgcaggggaaggtgcacgtgaggagtgagcagaaatacagcaggagaggcctggactagaaaggcacagaaaacccaggcaggggaagtcaggccaaggcaacagggagatgccggagagacttctgcctaagcctctgcgtgcacacaccatcctgcagttttatttcttgtagaaatgtgagaaagggaagcggctgctctctcctcttttagatccgttgcctattggtgttcattggatctggtcaccaattttccaaaatttagcacagtggtgattccatcaatcccctgaacctgccgggccacttggaagcatgtcttgcaacagtgcacagctacaccacgacctgcccatgggacgcagcgagggaagcagcctcatgagcaggcctgagtctctgcggtctcactgtgtccagatctgataatagctaattccaccaaatattagagggggctcacatttaattaaagagtggccatttgtgtgctccagactggaggtccccactgccctgaagtcaaaagaaaagtccttcagggaatatgccaatcttttcttatttctctgctgagctcctgccctctttgaatgcaattatgggaacaaataaaatggcttaactcaagtcccctgtgggacagtcagctctctgctgataaaaccagttgtgtgggcaatcattaaatgagaaatctaatatttaactaaatttaatagtctgttgctttggtgctttcctgtgaagggtgggatttcaatagagaggaacgaggtattcacacgcagcctgtgtagtccatgagcgattagaacatggtgcgttcccacatgaaaccagaactctcagatccggaaactggtaacgggctgtttggtggccagcctgtgttccgttagctctaggcaagcttaactcagtaggcagcagagaacattgctccctgagtttaaccttctccttcatgaccagcatttgagatcgcacactgacggctgaaacatcaaattcacatgcatatatatggagacaagagcgtactttaaccagctgtaagagggtctgtccccattttctctcagtttgagatttggccatccagacaggctcttgccactagcagacccccccagctgaagccctttctgggacccagaagcagaagctaactgatagcaagaagcccatctctgttctcattggtagggtctttctacctttgctcctgccagttcccctgatcttcatcggttgtcacttccatcatttgacccacatttgcacaccccaagttcctcacctgttttgcacctgggatgatcatgtcagcaggcagaggagcagagaccacaggttctccaagggttacagctgaggcgtcgagatgacctcatgagatcgaggcactggtctcctacaataagctggagtttggagcgtgtggatgaactgcctcatagtcccagagtcgagtgaattaacttaggtgcatcattagtctcctaaacatcagaaaattttccatcaacttctaaacaccagaaacttttccatcaacttctaaacaccagaaacttttccatcaatttctaaacaccagaaacttttccatcaatttaatgcagtttgctttgggtcctcgggtctgagctgtgtgggaaacactggttgatagtctggcctcagtttttccaactcttaccgttcaagagatctgagccctgaagacctttgcagcttcctgagacactcaggaggacctctcctcggtcctgtttagtttcctggggccacatgggaacaaggagaaagacttgggtagaaacccagactcgttaccatctaaagatgcttaatttccaagatatgaatcgattttccacaaacccatctaccccgggtacccaaaactagtgcatttcgtctctgggataggactgaacactgataccttggcgaggggtagggagaaggatttgctgccaggaaaatgaccaaaactttcatttggtgttaagtgtatccagagagcttgacaggtgcctgagatagggtggtcaggtccctcttggaggaggtaacgcttgcgttgatggaggagaaggagctagcaaggaagatttcaaacacagggcagcacgtgcaaaggccctggggcagcaaagagcttgggaaatgctgttctcttcattaccaggcagcactccctgctagtcttcctttcctgtaactgtgaatagaacatgaatgatatgcagtcactgtctcataaaccaactcctctcacctgagtgtgtgcctggagcattgcattaaagggctgagggcatttggactcagcaccaatgagtgctgccgcccatccattaggaacatgggctgaggctgtgaagctggcgcaggggcatgcaggccccttggggtggagtgcacctcccctaactcacgtgcatgcctgtgagggagagtgcgccacctctgcagccaagtctctgggtctcagagttaaggtcaagtctacttggacttcccttggacttcaccactgcagacaccccttgcagacgtagctgtgtttcctgctgggacacgtgtcctgcaagggacacgtttctcgcatgctacgtggtgttcggaacctttcccagtggtggtctaacgtcagatttgttaaaactctacctgtttgaaaactagtgtcactatttctccccttattttttatcaaagctcaatattcaaatgtgtccagcaacttgcaagtcattttcattttatgtactcgtcacaagcgctgggagcttccatttccccctgttcctctacagaaggttgccaggccttctgggcagagttcttgaataaagccacagccccatgttctccacacaaagccacacgtccagattctcctagttatgggcggtcatttgacctccagctgccccggagaagcgcccacctgcagagcagctttttttttttttttcaagggagttatatgggaggatgactggacatccattctagcattgtttgtgatcatttgtttacgctttaaacaaatgcacaaattgcagctgcttccaagtgatttgacgagccaaaggcaaagttccttgcagaaaaattccctttcacaatgaaccacaagttatccccatgtgtaggcttagtgtgagaagggagaaaggaagttgggtggtttttatgacacgtcagatggtgaaatgaaacagaatggccatttcagtacatgaacggagagttcctcaggggacttctttgcatctgaagaaatagataacgaggacgtgtgtgtgctgtcgcggcagaggcacaaaggtccagcgcatccacaccacagggcagaactgaccttggtctctaccacggagggaggacagccagtcccactgcagtgtgaagcaaggctcacacgactccactgtccacaaatacagtcaccgaagttaaggtctctccagagaccagcttatcttctgttttgggagagagatcagaatccattttatttctgggaacatttaataaagatgataccctagtttctacccacctttccttttctggttattatggccacaatttttggaaaaccatttgtcctaacagatgtgtaatgtaggttttcttaaaaccagcagtcatgggaagaatcataccaaaacctgtgcgtgtgacgccacggagaacaaaaacctctggtgggggaaggagaaagcctaagacggtggggagaatctttaatccacccaaattccagatttgagtctaggcttttgagcgcataacttgagcgtgttttttaatgcccagtttctttttctgtacactagaaataataataatcacctctgaggctgatgaaagcagcagttacgcacatgaaaagccatggcccgcagaggtcctccatgagtgaccactgcatctcagtgtgtccctgtttcctctctttcagaaatgtttgacctagaaacaaatgaacatgtcaagaaggccataaatgaccgacagatgcctaaagtggaatacagggacattgagattgatgattacagtaagtactacgtttttcccctctaaaagaaaaagaaaaagaaaacgtgggctgtgacacagtgcagtcatcagcagcaggtgccctgcaaggaagactccccaagcacgggggtgtatctttgcccctcagctcctctggcatggagtgtcttgtgttcagaaccaagatgctcactctggtgacaaaaccaaaaaaagcagggcacaggatctctctccctgagaggctgacagttgcttcaaagcaagaccacagactccaacgctctccttctttggtgaccgtgtcaagacaccgtccagaaaaacctcttccctctggaaattccctttctgtgccatctgaagtccttcctgcctcatcagctggtggattatgggctgatgaggggcgtccttgcagccagggtttacgtgaggaggtttgagtgctgttactccctaggaaatgcttctcactctgcctttctctgcctgtgcccttctttccttgaactgtccctccagtcattcggtaagttctcctgggcactaactctgtgctaggcgttgctaagcactaaacaccccagagcattagctggacctggactcacagctctaggagggaggcagagcctcggagcctcaactcccacctccgcacagatggctcccaagtcacccggctggccccgtgtcctcactgcccaccaggtcgttactcttggaaacccaagtgtaaaatgcccacagcggatttcactgtcttcccccagaactctgtcccgctccagacttccccacctctatgcatagcagccttttggtggtaagttggtgtcgaataactgagacttcaaaccttgaagctgtctttgagtcattcatgcagacaccacttacccatcacctctgaggctgtaaacgggtttccctcctgtgcaaactccgactgactgatagtaactgcaggagctctttgttgaaagggaaggtttccagagctcggcggaaagcgtgttgaggctgataagtaacactgagctgaaagggcagggggaggagccacacaccttgcgtttgccatccctagaccgtctctggaacctctttgtctgcccttccctgacacgagacagcagcgtgtcgcctggagcctagggtattcgctggcagcccccttgtgctcagcagcttagaggagacacaatcacctaacagactcagctcccaagagcaggtaccaaggctcaccccacgaaacaaaaacaggtcccccaaacagtacgtgctgcaaagctgcattgcgtagagcagaaagtaaatagcacgagaattcagagaagagcatgagactgggctggggacatgtgggaatgctcacggaacgtgggacttgaacatggtccctagagtcagcatcaggtgggctcacaagaggagaccgtgcaatccagagaagagggcaacgtgaggggtcttaggcaagggcaagtgcagtgcagtgtggctgggtctggaggctgccctggagtcccagcctgcaggacagcccaggtgtgggccctgcacagggaccctcactcgcctgtgctcaccacgccctccctgcagcccaccacaggtccgggccaaaaacttctggccccgccatttggccacaggaagctatgctctatcacaacttttctggacattgcattcacctctgaaagtcagaacattctggaattttgatgcacttcagatccgctcccgcccccacccccacccccacccctgcccccaacacactcacatgtccaaaggctgtctctcttaaaataccctgaaggtgaccacgccagggaagggggcatgaacgaaatgagtagggaatggtctaggagaaaaagaataattttgtgtgtgtctgtgtgtgagacagagtctcactctgtcccccaggctagaatgcagtggtacgatcttgggttactgcagccttgacctcccgagctcaagtgatcctcccacctcagcctcctgagtagctgggaccacaggcaggccacatgcccaactaattcttttttttttttttttttcgtagagacagggtctcactatgttgcccaaactggtcttgaactacggggctcaagcaatcctgcctcagtcccccaaagtgccaggattataggtgtcagccatcatgcccagcctagaggaggaagaagagaaattcaagaaaaccataaacaagggctgggcatggtggcttatgcctggattcccattactttgggaagctgaggagggcagatcacttgaggtcaggagttcaagacaagcctggccaacatggtaaaaccccatctctacaaaaaaatacaaaaattagccaggcgtgatggcatgtgcctgtagtcccagttacttgggaggctgaggcacgagaatcacttgaacctagaaggcagaggttgcagtgagccaagatcgcaccactgcactccagccttggcaatagagtgagactttgtctcaaaaaacaaaaaacaaacaaacaaacaaaaaatggaggctgtgacaagctgctttggccaagaaatgtgtgtattggccagtcacggtggctcacgcctgtaatcccagcactttgggaggccgaggcatgcggatcacttgaggtcaggagttcaagaccagcctggccaacatggtgaaactctgtctctactaaaaatacaaaagttagctgggtgtggtggtgcacacttgtaatcccagctactggggtggctgaggcaggagaatcacttgaacccaggaggcggaagttgcagtgagctgagatcgcactactgtactccagcatgggtgacagaatgagactccatctcaaaaaaaaaaaaaaaaaaaaaaatgtgtgtgttatcccagcccaatggagaaaccattgccccggcatgtctctgaagctcctctgttctcagctcgaggctcctccgcagccttggcggccagactgtcaccctggcaagatccctttctgagctccttaggcctggcctcctcctcctccagcccactctacccactgctgtcccagtaacgcttcccaagcctgcagcactggtgtgtgactgtcatcccttcctcttaggaaatgcagaaaagacctttcaaagcacaaagccagctttcccacccttgccacacactctgtccagcagggggtttccttaaaaggtgggtgggtacagatgccaggagaggatgtggggcacctgtatgagcccagcatcaggaagacccccttagggatcgcaggaaatctgaaagatgtcagccctaccgacctgacttggttttgtttttttactttatgctaccagaggctaatgcttttctttattttattttattttgtattttttagaaaagtaggacatcttccagaagggctcccctgaaatgttttcagccagtcagaacatggtttccaaggtctgcccttgggcttatcagtggcagggagcagcccagaccatgttttatggaatttaaatgatgaagtccaaggcctgcctctccgccagtccctgggccattgagctaatttgcaagccattaacattcagcccgaatcagtaatgagacgccaggtcagagctggctgcccagccagccacccaagcctgcagtgtatctgtgtagtaattgtattgaaaagccgctaattccaatttaattgctgtgcctttggtaatctgggttgtagttaacatcaacaaataaattcaacttggatgggaagatttgttggaaggtagggggcacagaagaaattggtgaggcaggtttttgaggtttggttcctacccactctccctcacccactggatttcatgctgctgaggaccagatccagtgaccttggtagccacgggatccaatgggctgtaccatccttccctggcttcccctagctgtggctgcagcatagccatagagccacccagcacaaacctgccaacagcaagacccacagatccacctggctctgcacagaggcactgccatgggccggcaccctctcccctctaggcggccccctgtctcccctgaccctctatctcttcctctccctgcctccctgctcccaaatatccatccccagcatccccgatcagatgctgagagatgcctttgttgccgcaggcagccctcctgctctcagggcaccatatttccctgcctgaaattctgctgctagcgagtgcccgggccatcgagtcttccgtgcattcagtgcactcccatatgcaagactgaatggaagcttcagagaaatgaagcttcacacaggtcgggtgacttgcccaaggccgcgcagcaggccagagtcctcaggatgaaaaccctgggccagtctctgtctgtgggcttcccctcaggccccacccagagcaccctcacccccacggtcacccaagggcatgcccgataccccgtggccagcattgccccctaacccgtgctgtgctctgcttctccccagacctgcccatgcagatactgaagccagcaaccttcaccgacaccacccactaccctctgctcctggtggtgtaagtatcgtcacatctgtctttccctggtgctcgttctggggctccgtgacacccatgataaaggaatattgaactcttaagaaaagataagcaggagaaatgacattgttgcaaactgaaaacataacatcgtttagcccaatgtcaggttctttaggaatcttggagacacccagaggttaaaggaaagtgggtgctgtgtacccaccgcctctccccaggctgcctcaggttctgtgaccataaagtgaggctgctgggatcatcgtagtggcattttgcatgacaggctcaccggaggctggcaggggacaggtcccaagacacagagacacaagatggctggagcctgggacccgcaccctgagcccgtgggtctcactggctggcatttctggccactgccgtgaatgcccttttttcaccagcaaagaattttttcagctctttcttatattcattaataaagcctccggtttgggttttgagaacaactttttgtgctctgtaaatgccttgaaggtgttgggtctgattagggaactcagtgctaggagccggcccagtgccctgtgcataggttcaaatgttgcctgacagccctgagtctaggtgatgtccacgcgctgacaccgcacggggaggcagtgcagagggggccacctggaccgttgagcaaatgccccaatgcacctcctggtctgtactttcaagaccacggagcaggagaaactcctgcacccctcgtagcctgggagagccggctgaagcgaggcctatgctgggctgtgttaaggatgccagtgcaactaccccctgagtaaacgctggcacctgatggagctctgattaaccctggtgtcttgccctgctcccttcctgagggctgagtccctaaatagcaaaaaggttccattatagaaacgccccagggcacagattccaatagctgattccgttttgcaattaacccactttccttaatatctggactgctttcacactttcccagcagccatgcatgcacactcacccacatgcagacacacgcacccacacacaggcacacgcacatgcacacacacccacatgtgcacacatgcatccacacacacacatgcacacacgcatacataaacacacacatatgcatacccacatgcacacacacccacaggcacacacatgcacacacacgcacccacacacataggcacacacacatgcacacacccacatgtgcacacatgcacacacacacgcacctgcatacataagcacacacatgcatacccacatgcacacatacacacacatgcacacacatacgtgtgcatacgcatccacatgcagcacatatgcacatgtatgtgtatatacacatgcacacatgcacacatctatacacacccacacccacagacccacacaccccacacatgtgcacacacaccacacacgtttcctgcctcctttctcttactaaaccagattttccccactttctccaggatgctaacaacttccgaaccagctttcttcccctgcacactggtttcttcagtgatcttaaaggaaatccccaaaagcatttcagtttacaaaacaattctccttcccttcagaggtaaaagtggtcgtgcccggtggagacagctgagctctgctgagctcggacgggaccggccaggcaaccccaccccctgggtgcacactcactctggccttgctagcttgccttggaggctgtgtctttttgtttgtttctcactgtgacatcaaatgtgatagcaaggagatctggagtccctgagcccctgcttcagattaaaaaaatccaaaagaaaacaaaggcacactcgacatagagcagcaccatgactcaccaggaccctaagcatgcagcactcgagcgcgccgctcctggcccgctcctcctgcccccaccccactcctcagcccttggcagacagctgggagagtgcccgtggtcgaagcagtcacctggctggagccactctcagttggggcactgctccctgctgttccagggaggcaggctggacctggggctgactttctctcctgtccatctttttcccggcaagagggaaaatcacttaaaaacttccccacacccataagtatgctggtcaatgaggaacaaccagtcctgcatagaaaatggccctgttcccagcctgggcaacatagcaagaccccatctctacagattaacagatttttcttttaattagccaggcatggtggcacatgcctgtggtctcagctatttggaaggcaaaagtgggaggattgcttgagccccagaggtcaagcctgcagtgaaccaagattgtgccactgcactccagcctggccgacagagtgagaccctgtctcaaacaaaagaaaaaaaaagaagaaaagaaaagaaagagagagagagaaggaaagaaggaggggagggagggaggaagggagggaacagccctgtttgaggaaaaagaaaacagccctgtttgtggcactggtcgaatcccatggtccaaatgccccaccatggatgcctttcagccagcagtgctgggctcgcaaatgaagagctgggaggagagcacagtgggagccgccagcccaggtcggaggccacactgcccagagccaatggctccttgactcccgagcagagggagggagaaaggccacccatatggcgggtttgctgttacttccgacttaacaagagacagaccacgtcttcaagccagggatgtggctagagtcagcgcggccttgtcacttgtgatgggtactgagaggtacagcctgggacatctagaacccaggaaagagaaaccttcttgccgtgtagggaaggtccccgcagggagaaggtgggaggatttgtattgtttccctcaccaaatagatgctttttggtggccgtcccagacagcgccggtgtgtgtagggatggccctgggtgtcctaggctcttggaggtctcctcttcctcctcactttatggggtgtggataacacctggctcacctgcccggggcaacagaatctggggtatggagttgagcgtgtggcagccgggtcacgggtaaaatcccttacgggggtcatctgacgtggcagctgctagaccagccgccacccaccacgcagcaggcctgctgagcccgggattctctttccagggatggcaccccaggcagccagagtgtggctgagaagttcgaggtgagctgggagacggtgatggtgagcagccacggcgcggtggtggtaaagtgtgacggccgtggcagcggcttccaagggaccaagctcctgcacgaagtgaggcggcggctgggcttgctggaggagaaggaccagatggaggccgtgcggtgagcacccgcccaggaagcaggagaggccgggaggggacggggctcctcatgggggcagcaccgcagtcacagtgcgggaatgctttttctccacgcacacatttttcatgcaatttgctcttacctaaaatctcttggccattccaaagaagtttcaaaggaaacttaggaatcttctcctagggacatttataactagttttcccactgcagggtagattgttgagttgactaaaacaaggggatagaaattgccggttgggttggcttggcttttctgcgctgtggtcactgacccgggccagtgtccacgcatgtctttgccatttatcccaaggggaggagagaagagatcaggaaggaaggacagaaaaagggaaggaatatgaatggggctggatccgtggaaatgggtcaccctcgttactgagagcaggacctccatgcacatccaggtggggccagaatgcccttcccggctctgaggaagggcaggcttttgttctgtcattcctgtgcatccctatcactgactcagcaagagcaaccgacatcacagaaacaaaaggaggcttagcaccaaggggcagatgctccaaatgacttattgaatcttattgttgcactggaaataaaaagacatcaagacactgcgccaggctgcagctggccttcaggctcattttgtagaagcagttttcacagtctgatggcacagaggactgcagcacttactctaacttcaccccttagagatgctgcaggaacagctcaacggactgtggacttgggttctgagaatgacaagaaggcagggagaagcgcatctaccagggacccccgccgcgaccatgatcatcaccgttatgggcaggggagcgtgaggctgggcccgggcacacaaggagggtggagcacagagcccagctcagtacatgtttattgactggacctggcatctctgtacctattataccagggtgctttgtgcgtttggaaatttttactcaactgactttgaaaacatttctcctcattttgaaaaagattgacggccctggtatgtactcagcgaatggtctttcaatggaaaacaatgagcgtgtgaatgaatggttccggtcctcctccagggagctatgagctgggtgatggcagacaaagcaattgcttcagaaacccgtgttgcagctgggaaatacggagcgggagagctctcaggactcagatactcagggaaggagtgtctgccaggatgcctttgcctggaagtcaatgactacaacaacacatgtgtgcgtgcacacacacacacacacacacacacacctctcaaataaggaactatattggctacaaaagacacagggatgtcaggtctcaaggttgatgaatccagacaccaacaatgtcaccaacgacccaggctctctccgtctctccgcccagccagccatgatggtctcatcctaagccgagccctcagtcacggggtggccctcagtagcacctggctccatgcttcgtcatctacctccagcaggttggggaggaaaccacttttagaaacttccagaaaggaaaggaaagtctccccacaagcagacagcaaacctctccttccatctccctggccctcccctgcccattccagaacctgccaccagtgagacaggtgcaggcagcccccccagagaccaagtgggtccgtctgacaccagtgtggggccagcccctgagcagaggatgtggggtgacaagggaatgctggggttcagtgtggaaggaggatgggtgggtggctgctgggtcagcagcgggcagtgccagccacagaggactcccaggacacggaagccggcccaggctgcgctctggagtggagtgggcctggcttcctgggtgggggcacgagtgctctcctggcttcccagacctcctcctttgggtctttttcatttgtgtgtggcttcccctgccatctcctgctctttcctcaccccacctgctctatctcctcccagggagatttggaagcccggggcctccccgccatcaagggcaggcccaggggaaagtcgcagcaccctcaggctccccttcgacacttggctctgcctggcatcttccccaaagagcacaggaattagagggcaaaggtgtttcacacacacacacgtcgtgccctaaaaagaaggaatgggcccaaccatctgttccaaaacaaggcagaacctgttctggaaaaagtcaataatgccaactcctaaaccaccgaagctcaaagaatgggagcgtgtggacaacggcaaagcttagagccgttgccaaagcacagactttcttaggaagctgatgcccaatggcgccaagccatagaaagcctccctcagctctccctaggaacgaggtctgcattttcattcatcagaaagaaatagcccaatttgatcggaaacctaaaatcaggaggctgacacattagcctgactcctcccactcccacagttcccccgtccaccaccaccatatcctcaccgaggagcccacaggccagcctcccacgagcagctgagatgagctgtggaagggagctcgtcccacccctgtggaaggcagcgggcagctgtgtaaacccgactagggccggtgggctcctgtctcctagagacaggttgtctctgggctcaacttgggattttcttcacgattgtttcttttgggtcctacgtgctcatgtgtacacacacagacaccctgggtcatgtgctaaggagcagcagaaatgcctcatttttatttactcatttgttcacgtagctagtggaggaagccaaaatagttatccccaaaatattgagacctgctaagtgaaagatactgaaaacacagggactctctgcctctgcccctgtttgccagacgccaggacatccatccttccttcctggggacagcacctgctcatcagcccagagagggtcccagccgttgccagggtctctgggggcagattgcattgccttctcacaggttccctccttttaaaagactgggggctgggcatggtggctcacgcctgtaatcccagcactttgggaggcccaggtgggcggatcaccggagtccaggagttcaatcaagaccagctggccaacatggtgaaaccccgtctctattaaaaacacaaaaatcggccgggcgcggtggctcacgcctgtaatcccagcactttgggaggccgaggcgggcggatcacgaggtcaggagatcgagaccatcctggctaacacggtgaaaccccgtctctactaaaaaaaaaaaaaaatacaaaaaattagccgggcgaggtggcgggcacctgtagtcccagctactcgggaggctgaggcaggagaatggcgtgaaccccagggggcggagcctgcagtgagccgagattgtgccactgcactccagcctgggcgacagcgagactccgtctcaaaaaaaaaaaaaaaaaaaaaacacaaaaatcagccaggtgtaatcccagctactcaggaggttgaggcaggaggatcgcttgaacctgggaggcagaggttgcggtgagccacgatcacgccactgcactccagcctgggcaatgagccaaactccatctcaaaaagaaaaccgtaaataaataaaagactggagctgctctctcctttgcctggtcactatgctgagagttatggctctttgttaaaatactgtgtaaacagggcccctacaccactgccttaagaggcactggaactgaggcctccgccacgtggagggcacagcgcacgccaggaaatctcttccggttttcctcttgttcatctgactttcattttcaggacagtgacagtgtctcgaccaggaactcataagggttgagaaaagaaattatattttctcctctttactagaaaatgtctaaaaatatctctaactccacacttgacattatggcttggcttgaggtaaaatccagacagacaataatttccatctaacaagcaacaagcccacagcctgcaggcgtcctgctgctggttgaggtccagaaaccggaaggaccccagccacttcgtgggggaagcagaagaccacaatgcggggcaaggtcccagcaagggtgaggcagggacccaggcagcactggcccagagcactgaggcccagagcaccaagcggctgctgccaaggctgggccgtagcaggaagctcatgggaagaatccctctgtggccaaacaggtacaagacaggggcctcctcccaggaattgggaacagaaggctgtgcaggtgggatggggtctcactggcttgactctgagcccagaagcatagaaccagagctccacagattcctgccgacccctaaggctcatcccagagcccgcgtgcttggagtcacaggctctgggtgggggcccaatagcagcagatggaccccatgcaacaggggctgcgtctcccagaaggggctctgcggctgtggattaatggctcgcagtcgagaagcttctatacctggaagtgctacagagttattgcaagggtgctttgaggttttaacgtgaacatgctgacttggcactaaataaataaaagcaataaataattatattggaatgctaaggttgctttttatttgaagaggggttttcatccttgaaatggatggaaaacatggctctgggctacaggaagacaaagtggcagcaggatgtgcactgaaccctctttcccctcctcgacctcacaggacgatgctgaaggagcagtacattgacaggacgcgcgtggccgtgtttgggaaggtgagtctgcgccaccctggtctgaaaacccctcagttccagtgtggcctgcaccattacccacgtctaatcctgatttattgagaacgtctgtggtctgctggtgagcaagtaattttttaaaatcaagagcctgggtgcttagtgattccagccgtgggaggtttcatttgatcagctcattttcctaagtttctttttacattatctggaaggaaagagaagggaagccaagtccccgcaggagagctctaatacattcctaatgacttttctcccatccatctgctgtagctcttggcatggtagccaggaaagaagcaaagcaggaatctatttctggataactcgatgtggagtaacaacgttaattaccatgtctacttagacggaagcacaggtgtggggagggtcgcgcagtgaactctcaaaccagagccgctcccatctggtggcccttgtcagaaggctgtagcctgggacagctcagctgtagctgaggcccacggtttggagttaggtctctgcaccgccacctactatggccctggtacatggcccctcattctccttagcctagacctggggcctcttgatctcaagaaggccagcacacagatgggtcggtatagacccatcttccctctgggagtgaccctcagcacaggccctgcagaggaggccttgctgtgacacccccgcaggtgaaggcttggacaagtaatcagcacagtgcctcttacgtcatcgcctccaaaacctcagagcccagcatgcactggagacccggccctgccctgtgggctgctcccggaagcaggggatgcaggagccctcccacacctcctccttacctgccggaggtgaagtggtcaggaggagggccggcggcttctctccttgttcagagcccgggcacagagccctagaggtgcattccaggtgcctagatgtccactcactgcctgtgaggcccgaagccactgggtcattggtaggtgtaacttgggtgtcaatagccatcacctctccccaccctcatggaagtgacttcccagcagactggcagctgaaaggcagggagcctgggccgtggtcagtcttttccagtcgtcactctgccccaaatgcacatggatgccactcctgagggcttggcctccttcctgtgccttgcatatagtccatccactcagggcctttcatagttcacttctggacacagagaggctttctcaacaggcagttggtccagaagcacaggcagccgaggtgccaaagggaaaggggaccctgtgcacctgtcagagcacaactgatgcacccccacaccctgtacccccgcactcagctccgccgaggacatctgtctgagctccgtgctggggatctttcctttgccattctgcccagtggatcccgggcgtctttccagagcataagcatctctgttttgttttaacaagccttagatagaggtccgtagaccccacaatggtatttctcctctgaagaataaagcgtcaatccttttagtggcttggcatgttgcggcctgtccattctgtttcctcctcgcatgtgccccagtgatctggctgcagcctttgtcaggcatcgcaggacctgggacacagagcccaggggagcagcagccaccctgcacccagaggtgacctggagagcaagggggcacctgtgcgttatgttctgcagtttcccccccgacaccgaaaatcccccctgcagaagattgcctgtctctcatttaaaccagagcaggccgcgtggccctgcaggaaaatgagatttaaagaaaacgaagaatgacaagtaaggacgtgtggagttcactgacaataaatattatttgtcagaaaatgaaaatcttctttcattgtcattagacaaggtgcccctgccctattaaaggaacacaccggaacgatcgtgcaggtcataaatggttgatcttggagtttggcatgacctgcgcttcacggtctcagtcaggtacctgggttctctacactccatgctcccaacacgcatgctcacagactcacatacacatggatgctcacccatacacatgctcacacacacatgctcacacattcacacacatgctcacccatacacctgctcacccatacacatgctctcacatacatgtgctcacacatacacacacatgctcacccatacacatgctcacacattcacacacatacacaaatgctcacatacacgctcacacatacacacacatgctcacccacacaatgctcacacattcacacacgctcacccatacacctgctctcacacacatgctcacacatacacacacatgctcacccatacacctgctcacacatacacatggtgtcacacacacgctcatacacacacatgctcacacacacgattacatacacctgctcacacacacacacatgctcacccatacacatgctcacacacacgctcacattcacacacatgctcacccatacacttgttcacacatacacatgctctcacacatgctcagacacatgctcacccatacacatgctcacacacgctcacacattcacacacacctgctcacacatacacatacatgctcacccatacacctgctcacacacacatgctcacccataaacatgctcacacacacacatgctcatacacgtttacccatacacatgctcacacgattacatacacctgctcacacacacacgtgctcacaaattacatacacatgctcacacatacatgctcacaaacacgactacatacacctactcacacacacatgctcacacaattacatacaccgactcacgcacacatgctcacacaattacatacacctgctcacccatacacacatgctcacatgattacacatgctcccacatacatacatgctcacacacattacatacacatgctcacacacgctcacacatacacacgagtacatacacgctgacacatgctcacacacacgattacatacacatgctcacacatacacatgctcacccacacacacgctcacacatacactcacacacacctgctcacacatacccatacatgctcacccatacacatgctcacacacacatgctcacccatacacatgctcacacacatgctcacccatacacatgctcacacacacatgctcatacacgtttacccatacacatgctcacacacgattacatacacctcccacatacacgattacatgcacctgctcacacacacacatgctcacaaattacatacacatgctcacacatacacatacatgctcacaaacatgattacatacacctactcacacacacatgctcacacaattacatacgcctactcacacacacatgctcacacaaattacatacacctgctcatacacacacacatgctcacacgattacatacacatgctcccacatgctcacctatacacatgctcacatacacacgagtacatacacatgctgacacatgctcacacacacgattacatacacatgctcacacacattcacattcacatgttcacgcacacatgctcacatgctcacccatacatacacacgattacatacacatgctcatacatacacgattacatacacatgctcacacaggctcatacacatgctcttacccatacatgctcacacacacacatgctcacacacaagcacacatgatcacacaggcacacatgatcacacatacacaggcttgcacaagtttacacacatactcatacatgctcacacaggcatacacacatgctcacatatgcacacactctcacatgtataggcacacacaggattacacatgctcacacatgtgcttatacacatacacccatgcacatgttcacacgtttatacacacatatcacacacacacacccccatatactcacacacacgctgccacatgctctgtctctcacacatacctgacagttccgtgctgtcccgtttccctcggggtcttcccttcggaggctgcagctcgtctgagcatccagccttgaaggcactgagcaggcaaggaggtagggcttttctctggggaggcctgcgttgcagtacggcttcctcatccccaccaagggcagggaagggcaggagtctaggacttacctgaatacagaacacctgggagcgtctgtctcgtgtcggccttgtgctgagcatgtgcagaccaggacttgcgccctaagccacttgttggcccctccctcagaatcatgtgcagtggcttggcctcacccacagacaagggaggcggtaagaaatgccataaagagacgctgagcctgaaggacagcaccttacacctgtgcagtccacacttgcctttccaattcgccgttgcatttcatcctcacgtcccttgacaccaaggcccagaagcggagaaggcgcacgtcgcataatgctgagttggaagggagtttgcttttcatctcttgttactgccccgtgaacaactttccaagtgacacattttgtaaaaggagagaacctgcatggaactggctgctctggggctgtctccctgcccgaggctgcttcatgctgagttactgccaggactcctaactgtcttctctctgcgctttctccaggattacggtggctacctgagcacctacatcctcccagcaaagggagaaaatcaaggccagacattcacctgcggctctgctctctctccaataacagacttcaaactctatggtaaatagccctgcaggaccaagcgacgggctctgctcccgccccgccccgccccctgcctgcgtggccccacagccctcccttcagcaccaccgtcccgctaaccacaggtgcctccaggccacagtcaccaccttgggctgatggaagaacccggggaaggagagggaagggtctcaggtaatatgttttgaatgaaagtggtcaatccccagatgcctacaaatcacatcccaatgaagaccacgagttggaaacagctagtactccgctggcagcagtgggggcgaggaagccagggtgcgcaggaggggagcaggtgccacaggccctgccgggccgccctccttctctgctcccagaagaatccgagcagggccctgccctgagttctatgcctgggcatgggtatttggtgcacaggtgttaccagataaggaagggatggttgggagggaattgctaccatagagcaattcaacgaggtccacgtggctcagctctgccttcccatctccctggccatgcaaatggcacctggtcagcacctgtcctcagagagtatggctctccatgagcacaaggcagagatggggtcaggctgtcagggtgacctgctgtggggatcagatggagatgagcccacccaggtgtgggaaccagacctctgtccaggcacagaagggctttgctgtgtttgggggttccaggctcctgcattctcctccttatggtcacccaaccctttttctctgaacctgagctctgtgacctgaacccatttcttagaatatacagagaggtcttttctgtggctccgagaacttgaattcaggtcagggctccgtggcagccaggctgttccctccagctgtccccaccctaagcagcgctggcaagtgaggtggaaatggagggggcttcctgctgctggtccaccgcagtcctgccagagcctgacattccctgcaggttggaggaacgagtccagcccccattgccacacctagccctagccctgctgtgctggccgagccctgtagacaccgcccagcaaggcagggaccacggtgggcccagcagcctcctggctggtgcagccaagtctcccaacaccttcacagcgggctcactccagtgcaaattttaactcgtacaggaactctcctggtccaaaatgtgaatcatgtaagaggaatcttccctcaggaatgcgggtgccaccttcaaattgagtgagactttcttaattctttcatcatgctgtttcagatttgtctgattcaaatgcacataaatctgaatcagattgtctgattcaaatgcacacaaaagctgccatcatgtcttgatgggtcactgtgcccaaaaccagccagtcctcttcattgtctcctgggcgccctcaggcttaccctgcaggccaggggcactgtgcagagccctttcggccctcagccctgggagaagcccctgacactcttctgtcacccagctgaccgcagggcctcaggcagaaccaagagcagggatgtgcctggactttttaaaaaataagtaaatcttgatggaaatgtgctctcttaccacccatgcccttcctaagtgttgaaggaggaggttatcctacttatttaggaatcagattaactgggttttgcttaattaaggttctgcgatgctgatgaaaattgcaacaccggcactcacacacattaaggttcccgttgtaccgcctgatgccccttgtaaagacccaaatgatttaggtggtgtttttaaaaaaccaacaatctgccacacaagtggcaagtgggaatgagcctgagtcctcaccccgcacccggtccagggccctccctagagtttgggggctgcgctcacagggcctcgaagccagaggtaacctccctccctttgcttccgtgcagcctctgcgttttccgagaggtacttgggcctccatggacttgacaacagagcatacgaggtgtgtatgggcacaactagagaatgtgatgagaccagtcagcctctgccacagtctcccagcctgccctggctgtatggcccactctgccttccccagccccatgcttctccctcaccagcaccaaagcccactcagaaacctccgaaggatcattccaccagagagtggattgaggttaacatggcctctctgggttccgcctgatttcccattataggacttgagggatgaggaagaaagtaagaggatatttgatggcggagtcagtcccagcgtccatggatacctgatgtgcacaggactcctggctctccctacagccagagctgtgctgctgggggagagtgagctttttttttttttttttttgagatggagtcttgctccattgcccagtctagagtgtagcagcatgatctcggctcactgcaacctctgcctcccaggttcaagcaattctcctgtctcagcctcccaagtagcttggattacaggcacacgctgccacgcccagctaatttttgtattttcagtagagacggggtttcaccgtgttggtcaggctggtctccaacccctgacctcaggtgatccacctgcctcagcctcccaaagtgctgggattacaggtatgagccaccacccctggtccgagagtgagctcttgactgaggagcagaaggcctctctgatgcgacctcctgagtcagacctgttgatttggtgcagctgtcagacacggcatttctccagctgtgcgcagggagggaggccagagctcctggccgaggcagcactgcattttcagagtggaaacttggacaaaggaactgagtccaaccagggagtcagctccctgaggctccaggtgaaatgatggccctctaaggctacctggagttggaggaaactcttcctttttcccttcttctcttccaccccctcctcttccaaaaagggagttaatgtgggggaaagctgggtgtggtatattagtccgttttcatgctgctgataaagacatacctgagactgggcaatttacaaaggaaataggtttagtggagaacttacagttccacatggctggggaagcctcacaatcatgctgaaggcaaggaggagctggtcacatcttacacagatggcagcaggcaaagagaaagcatgtgcagggaaactctgccttataaagtcatcagctctcgtgagatttattcattatcatgagaacagcagcacaggaaagacccacccccatgattcattcatctcccactgggtccctcccacaactcgtgggaattatgggagctacaagatgagatttgggtggggacacagagtcaaaccataccactgggcttctgacatctgccctgcatttctttgcagatataaggcatcccggttctccgggaacttagtgttttcaatacacttcacctaccttctcagtcaggtttccaagcagaacacctggctccctgcagtgcagccccctaactctgtccccttgcccccgcatgtgcagatgaccaaggtagcccatcgagtctccgcgctggaagaacagcagttcctgatcattcatcccactgccgatggtaaggactgaaaacatgaattcactgtgtatctagtaagagcctcctccttgatggcaccatgggttttaacaaatgtcttcctctcttttttttttttttttttgcacagaaaaaattcatttccagcacacagcagaactcattacacaactaattaggggaaaggctaattacagcttacaggtacagtacgcatgttactctgttttgaacctggagcaagacattcctttcatggagaaagacctgacgggtgttcagggccttctactgcagcagacacgcctgtgctgtggtggtcggtgatgagcaaggtcccagcaggttggaaaatcagcacatgctcaacgttttcttataattaatgatagctccgctctgtacttcagcccggtttaaatccctttaggacaaccatctccccgtactcccaccccagccctgctcccctcctccgggcagtgagaagaaccaagccagcacccaccctgcccagcagtgtggctggggctatcccgctgcggagagtgggactgttgttctgggttggtgagagtggtgctggtgggccctgagccttgccccactgcttccctctgaccaacaccacatgttactacgcactagcaggatgtcctggggccatctgtagctaggcagtagtgaaagaggggtacccttcccagaactgaactcactttcccacaaccaacccgtggcccgtccacaacagcatcaagtgctgacccagcagcctcaaacctgggctcttcccagtaatgcacagggatgtctctggaaacttctgccatttccttcctgccttctgctcctttggtggaacaggtatgacccaatggtctcttcaggtccaacatgaatgaatgggagagctccttggggacagatgacaggcaggcaccctgcctccctcagagagctcttgccctgggctgatcactgccttggcctccagcatccctgcctgtgggagggagggaccacctgtgggcttgatcaggcagggagagctccagccagaagggagttggaccccagtgtggatgaagaggggcagaaggacggggttacaccacacttgagttcccttgtgaaagacgttcagatttcagactttttcaaagtaagtgtggcagttgcatggcagtgttaagcacactgaccatggacgctccaaaggtccatgtgtatgtgttcatgtgggcaactccccaagatatggggcgagctgaaccccccaggtacagagcagcctgcatcgctgcaggctccatgggtatcagggagcaggacccacccagggacacacatgtgggcacagcaaaggccttcacagacaccccatgcatctggagccaggcccagccccaggtaagagcacgggagacgggggcctgaggcaggaggagaaagcttcctgcccatatcctcttgtactacttgatgttttaatgacatatcatagcctaatgacagcattaataaatacttcaaaataaagatgaatttcaccctccaaaaacatacaaagaaggcaggaagaggcagtctagtgtcatagaaagatgtaggttttgggccagatgcagtggctcacacctgtagtccctgcactttgggaggctgaggtgcggggattgccttgagctcaggagtttgagaccagcctaggcaacagagcaagaccccatctctacaaaaagtttttagaaaatagccggacgtagtcatgtgtacctgtggtcccagctacacaggaggctgaagtgggagaatcacttgagcccaggaggttgaggctgcagtgagctatggtaacaccatggcattccagcctgggcgacagagtgagaccctgtctgaaaaagaaaagaaaaaaataagatgcaggctttgaatccctgcacgtgcacagatggttcacggtgctcctaggagatggtggcatcaccgcattggcagtagaataattagccatcatcctattggcatctgggaccgaatgagcccacattccaggcctcattctaagcacggcacggctataagattgtttaattctcacaaagtgtcatgagctggagtctgtgattatcctccccacccgacacacctggaatccgaggctcaggcaagttaacctccacagtcacacagggagtagccaggacgcaaaatctgtggggtgggcccgtgggcacccaggacagcacgcagcccttccacgggagtttcccacactcagagtgtaactgagagagcataggagtgtaatggcgcgatctcggctcacagcaacctccgcctcctgggttcaagtgattctcctacctcagcctcccgagtagctgggattacaggcacgccccaccatgcccagctaatttttgtatttttagtagagacacggttttaccgtgttggccaggctggtctcgaactcctgacctcaagtgatcctcccgcctcggcctgccaaagcactgggattacaggcatgaaattctatttcttttcagagcctgacaccctgaaaacttgggctgcggctctgtagtccctaagcttgtatccatgttgcaaattcaagcaagcagatccggactgtagagtgttgaatgaagagcttcccaatgttttcacccagttcccactgagcatttgctgtgcctggagagggccaggcaccgggggcgtggtggtgtttgaaggctggttggcttcacgaatgggtggtgcatgtccacgctaggggaggcgcccctctgactgggacagccaggcagatctcccaggaggaagaggcacttccatcaggagtggcatggttagcaaacccacttcatcaactacaatccagccccggacggggcccaggtttcactaaactccacaccttctgtgcgttcccgtcccctggggagcgtatacctgggagagtaatttctccgtgccttccttgcagatttacccggacgaaagccattactttaccagctccagcctcaaacagcatctgtaccggtccatcatcaacttcttcgtggaatgcttcaggatccaggacaaactgctgacagtcacagcgaaagaggacgaggaggaggactaagctcaggtcgctctaagcacaaacgtggctctttctacaaccagatgcaaccgagggatttccctgccctccctcttccctcggaggggcggggcggggcggggccgggtgttccatagcatgtgtgtctcggatgcggaaggcagttttgcttgggaaacaagctccttccccggggtcatcactcacggcctccatggcaccagggacaacgctgtccccgcagcagcgcctcctcccggcgcccgagagaccggcacgccacggcccctcccccaaggaacagagcaaaggatggtggccgcaggccccacgcgagcccacaggacaccggcccctagattccagccaccaagcggaagcatgagacccgcccacactagcctctgtgttcccgttagggacatcacaccctgtctcacgtcgcagtgccatggacgcagcagttacagcaccattgttttagcagtgcgtgttcatatatgggcttgctacttcctgtaatgaggacgttcaacatggtgaggggctacaagaaaacgcttttctgtacagagtcttactgtagctacgctaatggttaacctgatagaattaactcgtatttttctatggttttaacctgatgctccactgtctccgtcatggggttgttttgctgtttggggttgggccttgtttccctttcctttctccagtccacgtgtagactttgcgcttgatgaagaagcagatcggaagtaactgctccctcctcaaggttgtcttcagacgtcttggggacgttcctaaacactgagggggaagacagccaatagcacccattaaaagaaatacctaaataaaacctctctcccactcagctatgctagggcttggctgtaggtgtgcactgtctatttacatccgtccttacaaccatccttgtcctccttggtaccgtatcaagctctttcccatgacatttggtttaaaaaaaaaaaaaaaaaaaaaaaaaaaacagaaaaaagacaaagcgtcaactccacccacaggcccgctgtgtgtgctcgggccacgggagtcctgagggttctgtgggcctgcgcgcatccctctcccatcgtgggggtggctccgtgaccttcctgccacgagcaggaggttgatgatgtgctacgttagccttgtaagatacacccccaccaaatgtgcagccggtgttcccagtgtatatttcattctcttgtatataaaggaagcaatgtgtgtcaggcctctgtgcagtcaacccagcctcctcccgccagtgctaaccccgtgttgagcctgcatgctgacactgtggccgatctggactctagaagtgctagtttgaaatatatccattactgtcatttccttttgagcttgtggacaagctgaatgtcaggactgacttcgccagctcccagccctgcgggggtgtccttggcatcccatcagcagaggagatgcgtccctgttgcattttggcgtttggggctttgggtttatccacatgagctctgaacgtccgttatagttagggtgattggaaggtctccatcactgggtgttttaaaggtgattcaccaccatttgtgaaaggaccaacgtgctgataaacaggaccgatccgagtgctacatgactgtgcgtttgctatttcaatgggcctgaacgactacaaagccagctaggtctggaaggggaagccagctctggccacgacatctggtcggagggaagtggggatgtggcatggtagcgtctgttcatccatggaataaaacattattttaccactcggattgttcctttcttgctcatcctcccccatcgcaccttagaaagtgtgctaggcttcaggagactttcagagaacccactgggcccctccaagacggatgcatggccacaagagcctgttgtgtgccaaatgaaggttgcatccatggtcgcagcagtctgggtagtagagaaggacgcaaccagtcgaatatatcaaagccccaaatcagtccaagaaaacaaatttgaattttgtcttgggagtcttagggtggagacgcagagctattccctaaccctgagagtgaaattgattctcagtggaagccatagcattgcccactagaaaactttaatttttttttctttttttttgtagagatggggttttgccatgttgcccaggctggtcttgaacccctggcctcaagtgatcctcctgcctcggcctcccaaagtgctgggattataggcgtgagccaccatgcctggcctagaaaactgtagaaaaatgtctccatctgttggaaatgtatccactcatttgctgttatcaatgtcgatgtaaacatggcccagcctgaaagccaagggattgatttaattaattaattaatacttcccgaccatggagcagctgctgcctcagagatgggggatcagtcccatcagccccgctgaattagctgattcttgtcaccctctggatcaagaatcatggaaagaatggggtgggtggagaggaggagttaaaaaggaaaaagaaagaatcaaatgtgaaaggagatttttaaaaaccagacacagcagaggccatctaagtctaacatactcattccccccaaacagtatctctgtgagccaccctggccctctccctggtctcgccccagaaggaggccagtgcccccatcccagctttccatccctgagtccttcccccggaccagggcttgatttgtggataggagttgacggtttgctcaagaaggtgcattttcccactttggaaaacactgagtgtggaatgacgagctaggcctggccctgagaacaagtgttggccgcaaccagcagggaccactccggttcccacttggagaagctttggtctttccccagctctagaatggctttgggaagacgccggcgtggcctcaccaggccgccgcggctgtggttgctgtgcctgcctggctcaaatcccccactgcagccttctctgtgttttcaaactgcacgtgcgtggcacagtagagtgctacttttatttccgttttaaattaggtttttgtttttttttttttttgagatggtatgtcgctctgtcaccaggctggagtgcagtggcgcaatctcagctcactgcaacttctgactccctggttcaagtgactctcctgcctcagcctcccgagtagctgggattacaggcaagcgccaccacacccagctaattttttgcatttttagtagagacggagtttcaccatgttagctaggatggtcttgat

SEQ ID NO: 169 - DNA, 141227 bp, Homo sapiens
  source 1..141227: mol_type = genomic DNA
tataatatattatatattatatataatatattatattatatataatatattacatattatatattatatattatattatatattatatattatattatatattatatattatatattatattatatattatattatatattatatattatatattatatattatattatatattatatatatataatacacttttttcttttaatataatggaaatagggaagtctgaataatgtattttcttacaaaaataatgatagtgctgtttttttttaagacctgccttttgagttgcttttctaacagaaagtagagattttgttgatccatccacaaatctttgcataaccaatagcacacatttataagatggccaggatcaaggtatgatctatgaccatgtcctaaaaccagtgactcaccttgactgtcctggggagcttgtaaaaaatgtgttgatgtttgagccccacccaagacagaccaaataaattagaatgtcaggatagcactaaaacaggctatacacacacaaaacagacaacacacctgttttacaagtgaggaaactaaagctcagaggggttaagtaatcttttctggatgtcgtcactgtaagtggagagctgtgaccaaagccaagtttcccgataccaaacacagcactaccacccagctgtgttgtccatgagaagtttactaatattttcttgtgataactctttttgcagcctttttggtaaaatactgatagtttaaactcaaactttttttacagccatccatttcaaggccaatactcagtatcagacatgaagttaaggttctcacagtaagtacttagagaaaatactgggaaaattcttaagtctgaatttatgccatgtgtttcattgctaattgggaattgtttttctctacttgatagacttatgcttcaaatagtaaccaaatatgtgcataacattctttagctcagcagtgtgtatgtttcaaagtgagaacaccactgtttcatacaggatggtgtgaactaataacaggatttaccatttttattttggtgaagtgcttttagcaagccgtggctgtcggagagatgcagccatacatacatccttatgtcctcaccactttttggttcatctgtatgttcttctcgtgtattctgaaaatgcacatgcttaaaaggttaataaattaattcataacaaataataatttagcttcttttctcagtaattctaattttggatggttacagagtgactattgtgtgtgtgtctatatgtgtctgtgtgcgtgtgtgagatttttttaaaattgtacctaacacttcttttatcttatcttttacccagttctgttcagaatagtgaacgtggcaaaaaaattggaaacgtcatggtcacaactagccggaatgttgtacaaacaggaaaagctgttggtaagacatgcctttagccaggaacaaattggaatcacaacacatccattttctatctttaatatgtaattgataaaacaaacataaagttgtaaagatctgtgttatcacatagtaatacaagagttttttaaatttttgtcatattcatttgaaaaattccaaattccaaatggtcaaactccattatctaatagagagtgacaaaattttctgatgaagtcactgttttgctaccaagattcaagctgcaccagagttttcttcccccattccctgtgctgtccacagttctttataaatggcagagactcataataaaagtaggtattaggaactgctatcctctaaggtagtattacacaataaagaaaatgaagccaacagttggtttttcaaaaagatcaacaatatttataaaatctggtaaagataaaaagaaagaaggtacaaattaccaacgttagggatgaaagagggacattactgtagctcttacagaaattaaaagaacagaaaataggggaatattgtgaacaactttatgctaaccagtttaacaacataaatgaaatatacaaatttttttaaagattcgcattaccaacacagttgcaaaaagaaaatatgaatagccctattatctattaaagaaattgggccgaatgcagtggctcatacctgtaatcccagcactttgggaggctgaggtgagaggattgcttgagtccaggagttcaagaccagcctgggcaacatagtgagaccccatctctaaaaaaaaatttaaaaagtcagtaggcatggtggtgtgtgcctgcagtcccagctacttgaaaggctgaagtgggaggattgcttgagcccaggaagtcaaggctgcagtgagcagtccagcctgggtgacagggcaagagtcttaaagaaagaaagaaattaattgaatttaacgtgaaaagccttgccataaggtttttaatttaaaccaggctgcccaggtggcttcagtttgaactctgtcaaatgtttaaggaagaaatactagttttacacaaaatctttaaataaggtaatactccccaactcattggatgaggccaatattagtatcaaagtcagacaaatggtagcatgctcttctgcacctagctgttttcgcttaaaatattttgaatattgttccacatcagttctaaaatttttcattccttttctatatttttaactttttattttgatgtagtttcaaacctgaacattgcaacagtgcaagaaactcccaattatcttctgattcaccaattatttacattttgccccatctgctttgtcatacaatgtgttgtaaaaatagggcattactacttccctagcttctgaaagaggttgactaaccgttactgaacacaattcaaaagccccagaactaagtaatctttgtgtaggtgtccttatatccctagttttctgaatacctagagagagacagaaaactctacagactcatttgtaaagacaacacacagcgctaccactagattagttttattgcaaaggaatggaatttagcacacaaacatttatttccaaacaatatgcctttggcttattttgaatttttattttttaatagaaaaactatgctatattatagattattatagatacatcattatacgttattattttttagtgatgctgctactgatagttaaattctaaagccaaatctcttctatactcttctgtccaagaatagtgggagtgtattagtcaacttaaataatttcacttagcatcacctttttttcctgagacagggtctcactctgttgcccaagctgaagtgcaatatggtgcgatcttggctcactgcaatccctgcaacccctggcaggatcctccttcctcagcctaccaagtagctgggactacaggcatgtgccatcatgcctggctaatttttctattttttgtagaaagagggtttcgccatgtttcccaggctgtctcgaattcttggactcaagctaaccacccgtctcggcttcccaaagtgctgggattacaggtgtgagccaccatgcctggcctaacatcaacttttgagatactgttctataaaacacaatagacctggggcagatagagctctatacatctttgtgtaacataacttcattttagatgacaaaagcacatttccctacaacagtctaaccactcttccctgtttagatggttattgattatcaagttggtattgaagatacacaaagcagtttgactttttaagctctctaataattctgatacatagccagtgttgctagcactgagggtattaaagaaacagtttgatgaatactttcagaatgctgaggcaagtaggtgcctacgctaaaaaatcatctatttttccttaagacattcccatggaaagggattgttttgaaactaaaaatttaaatgatattttggctactattaacatattgatgtgttctagtgaattaacatttattggctgggcacagtggctcacacctgtgatcccaacactttgggaggctgaggcaggaggatcagttgagccaagtgtttaagaccagaccctgtctctacaaaaaatcaaaaaattacccaggtgtggtcacacaggcctgtggtcctagctacttgggaagctgaggtgggaggatcacttgagcctaggatgtcaaggctgcagggagccgtgaccactgcactgcactccagcctgggcgacagagtaagacgctgtctcaaaaaacatttttttaaatttttaattaaaaatgtattaattatgttggtctttcactgtctcgtaacaaaagttaagacatttttccttttgtttttctcctctccatccaggccagtcagttggaggagctttttccagtgcaaagacagctatgtcttcatggctttccactttcaccacttccacctcccaaagtctcactgagccaccagatgagaagccttgagcaaggcgtcagaggctgctattgctttctgaggtttaagtgtcccctgtctgtctgctgctcccaggctgttactagccacagatccacagcaggggaccatatgtcgaactgtttacatggatgttgctctaagtgaatgtttcgggatgccgaaatgatgaaatcacagccatagcagggatggctttccaggttggggtttcaattgactacttttatttcagtctgagcctgattaaaacatacagtgaaccttctaatgaattttgagttctgatattgtacattggtttactttagaagagtttttacttatgtaaattttgttctgttttggtgtttgaatatctagatggtcactgtaatttatacttgctaaaattaatttatattaccattttctctaaagttggccttaaaacgtgcttataaagtgaaggggtcatacagttgggccttcattattttgctgaattatgtgatgatttttttgctttctacccacaaaacatttattaattcacttcctcccagaaacatgaaagttagaggtggtagttctgaggattgggtgttttgttttacgtttttagtttgttctttccacatccttaaaaacttggtttcagacatcaaggagtatcactgtgctttcctcctctttataactgtgcaggtgggtgtgcagagaaatagcagagtgatggttcgatgatactgaagcagtttaacatgaatgtgtctgtagggcaatactttcaaagaagacctatgtgtttatttttcaaccgcagtcatgttgcagtcttacaagcactttttttttattccagagtttgtgccatctgtttctctttttttttttggggggggggggggggcggggtctcactctatcgcccaggctggagtgcagtggtgccatctcggctcactgcaacctccatctcccgggttcaagcaattcttgtacctcagcctcccaagtagctgggattatggacatgcgccaccatgcccagctaattattgtatttttagtagagacggggttttgccatgttggccaggctggtcttgatctcctggcctcaagtgatctgcccgcctcagcctctcaaagtgctgggactacaggcatgagccactgcgcctggcctgtttcttttttaaacagttttctattgggtgtttgcagacctacagcttttctcgtagtcttattcataaagcttttcaaagcacttagtcttctacttccctaactgaaagtcctcctataatcaatccctacccccttctagaagtatcttaaaagaaaagcaaggtgattgtaagtattaaatagaaatctcatcttagtttatattcagcaaagtaagaggcaagagaagaaaactgcagccttgacatctgtcatctgagaaaggatatctggtttcatgttaggcacatacatgcatgtgtgtgccatctactgatgatttgtacacagctggacctcgtgtgtttgccatgctcagctctcatttgcttttcaaggatacctgggatggctgttctcagagagtacttacggggaacagactgccttttagtaacaagggatacttgggaaatacattgtgagtatgatctatcccagattgctggggaaataaaggagggccctgattatatttggtttattcctcactaaatgtttaagaagtaaatgctcccaaggcatttgaaatgaacatagaaacataatctaaatgtctctaaattttccactttgtgttttctaaacacaaattgtattactcatttgagcataactcaagaattcagcgatgataaattgaagggctgaatgtgagaactccattaattccacttcttccaagaaagttaacctcaggaaatgctgtttgaagagaagaaagtagtaccaaacaaaaaccttaaacagtacttgaatcttttttgcgctgagactataaagaattcattctaacatcttgtttcataagggccacatcattcgttggagcatgatagtgtgatttgtgtacaattgttacctctcagctgctgaagttcacacttcaaggatctaggagctctgtgaggggtcgtccagcaagatgctgatttgtctttcagttggtatggtttctgtgatcggggtaaactcccgtctcccactattcaaaagcagcccaactcatgctttggaatccactgaaataaaaatagttacatgaagtttaactttgctttaatatcacttgttcctcattgaatatacactttgatcggactttctattaacatttctagctaagagtttgactcttagtggtcactttactgactttccaacataaaacaagtatctcagaagatacaactttcatcatagaaatggtcaaaagaccatagctatatttccttcaggttctgggaggtggagtttttcaaggaacactggctgttgtattgttggcaggggccccaaggcagctcgcacaatcaaaggcaggaagcctcacccctggtcctgtgaccccccccccccacacacacacatacttcaggcttggattctaggctccaagtggccagcatagaagcagcagcctctctccaaaccctggctctgtgagccataggaaccagcactaggtcatcttctgacatagccctggtgaaggtgtgtgtgtgttggtggccacacttgctaaggcttttgtgtctaagaattgagtatttgtacctaggtgtgagggaaccagggtcagccagcctttttcagatggcgccaggcacacacactacatcaatggcttgctggtggcttcaccactatccaggtgacttaaaagagtgtttggaaaatgtccctggtatacttcaattcctactagacattgtaatgacaatggtgtaggtaaggaagagagagttaaaactaccagttgtggaatagaaatagttgcatgtccaaagaaggcttagaatgattgtgcatatgcagttggctcacataaccagcatgaacagtctctccccaaatccattagtgattcactaccccccgccaagcacagccctaaaacaattctcgtccactttcctgttaagaaacacagcagcaatatactttggcagcaaaccagagcatatgatgtaacttgctcaaccttatcttcctttccaaattctatactaagcatctgatgttttttagaataatttcctttggaaagccaacgagaaaacaaattaggaagagagagaagtgagaaattgttgcatggctgaggaacaagatgcttaaaatctgaatggaagtattttgagagcagtatttcatgtgctaagggttataagaattcttttagaaagggattagaattttactctgctagttacaagttttaaagtcacgctacggcattatcaccctggcaggtaggttttgttattgttttacattttgtgaaaaaaagttttgtagaagttacagctagtggtcttttccctccagagccagtgatgagtgtgggagcacttcagctctgtaaggggccagcgttctgacctttaaccacatgaactaacctgcgtcagcagttgcagaaagtagcctgttaggacagcagctgctaagcgttgcctggtattttagtggggagaaggctgggactcttcatggcatcaacacttgcatgctctgaatctttgatcagagatgaggtgccatttttggcatttccaccccgtctcgtggtagcctttaaaagtggtagaagatgctgccctaattccccgaggatgattgtcattccatgcagcataatgtgccgtgaggagttttctcattccagttctttggacttcgtaacattggaattgtttttccataatttccggcattccataaatatttgtcaaggacaaagaaaaggaatgtggatgtttattcttttcatatgaatgactttgtacacatgacttcctgctttcattatgaaggaggggaaactagttcccttgtatggtaactccaaagttaaaaaattgtgcatgtctgaggggttgaatatattttgtaaaactctaaatacatttgtatttctgtgctgttctaaagtttacctttttacttatatgaaagataactatatatttaaatcatgtaagtggaacacagtgtagggggtttttccaatcttatttttcatcaggttctcacacccacgtagtatgctgctcaaattttttcgtgtgtgcaaatgtgaacatttgaacatttcagttaggtactgagccagaaaaggtaattgaagttttcagaaagcttctgtgcttagaaaatattttgttgttttcttaaaatattagtattttgtagctggaagaataagatcaaggcttacatgtttcaggccacttggtcactggttcctgaatttagaaaacattggattaatgagttggtgaaggcatttagtggttacaaaaacagtttaaatatttatgattaaaggcttttcacaaacctttttaaagaaaatttagctgagaaaacttaaaaagttttctaaggaagtttaactgtggcacatgttttgatcagaaaggtagttctctttgctctggtagttttaaagtttgtactagttctttatttctgttgtttttttaaattgttaaaattataaatcacgtctaatcatactgaattgtaaaacttgaattgtatctttattttaagcataaatgagaataaaatgatcctgttcaccctgcctacagttggacttgacctgtcctagaagtaccctgtgtgttgtccatgtggtttctggcctccttcacagttaaacggcagcttcatttattaagaaaccacacagaatgaactaaagactcatgactcatttactctcattttgacatcgctttgacagtggtgcccagctttcaaggcagtgacctctgcaggaagaggcccttagcttctgtggaatgctaagtgcagagagctgcaaaaagtatcaagcagagcctggtcacaagataatgtctcattaggatattgtcccaagcaacccattttgcacctggactgataagtgtcaaaatagcccttgatattgccactgaagactcctgccacattttcatgtatatgttcatgtactgggttcccttacaactgttctacaaaacaggctttaggatgtgcttcacagaagaagtgacaaacttccttgccccctgggaatgtgtgcttccttgagtgctggtgcagggttaagctggagttaccagtgttctttgatgtggaccgtgagagccctggagctgatgggataacttgaggacagtggagcttcctctactcagggaaaggaaggcatctccttccctttccagatgtccccctcagactgagctctcctgtggggatgtgatgggtccctatcacccaccaaggaagagctgcctacccttcattctgataggacaggagttgcagttattgaatctggtaacatctggaaggagtgtgattagggagcctgttctttccaaggaaagttctttccatccttcatgaagggcttctctctgcctgaggtaatgtacacagggttggggaagccactgcagcaggactgacctgtccaacttcaccatcaacagatcctcacatggcacgcatagacactttgtatgatcatgaagatcagaatggtcgtgttctgtgttcttgatcccatgaaccacctgcttttggaaccactgacatcccaacataacataattaagactcaaatgtttttaaacatttcactggactgggctgcactcctggagcacatagatgtaggctaggcccagaaaaattatgaaagccacttactgaaatgctgatcattgctgagggcaagtgatgggtacataagggcttcttagactattctgtttgtgtatgttggagaatttccataacgaagagttagaaactacttgctagccattaaacaacgtcgttacccatgaaaaggcactagttcctgtgcggcggaccctgagggcctgacttaggaactggcttaacttcgtagcttctccatggatgccctggcctccacaagccctctcaccaactgaaaccttggctgctgctgttgccttcccatccctctagttgttggaggagcactattgagagaacccgtagtacacagtaatcaaagacccagcccaacctctcttcctcctgaaagtcttccccaggctactctgagtcctttctaatacctggattctcaggggccagtggctcacacctgtaatcctgaatattttgggaggctgaggcaggaagactgcttgggcccaggagttcgagaccagcctgggccacatagggatacctcgtatctacaaaaaatttaaaaattagctgaaggccaggtgcggtggctcacacctgtaatcccagcactttgggaagccaaggtgggtagatcacctggggtcaggagttcgagaccagcctgacaaacatggaggaaccccgtctccactaaaaatacaaaattagctgggcgtggtggtgcatgcctgtaatcccaactacttgggaggctgaggcaggagaatcgcttgaacccgggaggcagagattgcagtgagccaagattgagccattgcactccagcctgggcgacaagagcaaaactccatctcaaaaaaaaaaaaaaaaattaactgggcatggttgcatcttcctctagtcccagctacgggagatgagggggtgggctcgggtgagaggatcactgaaaccaggaggtcaaggctgccatgagccatgactgtgccactgcccttcagcttgggcaacagaatgagactctgtctcaaaaaaataaaataataaaatacctggattcagtacttactgaggactatgtaaagcggtgcttcccagtcttggagacttgccatacagtgccacacatagtccctgacacgttcagttcctactccgtggaccttgctgttcagcaggtgcgggtgggcggtcactgtagaggggagagagtgctgggtggtgagggagcacgagtggcgccaacacaccacagggggtaactgctttttcacagggaccaataaatatctcttcccctgagtctaagttgaggcctgagggagttttccaggtgaggtgggagtgaggggagagaccatgagacgtaaagggctctgtggcctggcagagcagcacaaagactggaagcagcgcggcttgaggggatgttttttggagtggccgaaaccgaaatggcaaggacgacaggctagagatgaggtcaggaaataaggccatatctggaggagagccctgtcagcccgcggacaggggaaagccttcaagggtttcccacaggcaggtggcaggttggctgggtgttgcctgtggaaagttctttcggtcgtgggcaccactgcttctgctttgccctttgctgtaaagttagtgatgttcctcagctgacctctgaactcaaccaccgcccctttcccttcctcactggccttcacagttttccactgactttaaatcacatttgccccaaacataataaagccaagaacaaaagtctatggcatggccctcagtcaaaaaccagttactgtgagaacactgttttcccgatttccccaggcattaggtccgtggaagttgttgatgaaaagaacctgtcaagtgatggtgtccctgccaggaagccaagagcacagagggcacttgagcatctgtttccattactctctctggctaagtggagacccaggagacatgtggcaccaccgctgtggtgatgtgtttaaacttggagaaaacccgctgtttcttcatgtcatttacaagcacaaagggagtcatttatacattcaaaaagcccatctgccgctaacatctagactttcaattatattcaattcatagaattattttttctgataaaatttaaccacattcatgctctcaggaatgccaaggttaaaagtggggcaatggagaatttctaaagtagcctgtccacctgcctcctcaagctctgccctagaaaaccatcactgagcagcacttcctagaaaccacggagactgaagcaaaattaccccgtccttggctctcacatcctgaattggttctttgtacaggatcatccatctagaaaccaaagctactgtggccttgataaaccactcactctcgctaaatactttccaaatggaaattccaaggtaaagttttaacagatgaagatgaatgagtattttttgtgtcacccattttatggtcatcaaaaccacaaggtcagcaggactagaatttttaaatcttatatattttatgacctttaaagtgtgttttttcattagtgacatatccctcactttgggactcaaagtggaaatcatttttgagtgtggttaattccattcctttgagcatctgggcttaatccttaaaattttcttttgggaccttattggaaatgaaggattaactagtcaccactcctccggttggaaaacgtgtcttttgtttccttttttgcttttttttttttttaatttttgatctttaaatagagacacagtgtcactatgttgctcaggctggtcttgaactcctgggctcaagcaatcctcctgcctcagcctcccaaagtgctgggattacaggcatgagctaccatgccccgcttgtttccttttaaattgtcaagttaaccctgtgaccaccctcccttgaaggacaggctattgtgtttccaaagcttctaatgtaattcatagggaactcaaaatggatttcccatatggacagtgttgtttatgggagctatgtctcagctcaaaaaaggcagctcaccagacagccagagtagataccaaaatacagtcacacgtcactaacaacattctgcaaaatgcgtcactggataatttcactgttgtgtgaacatcatcgagtgtacttacaatatcctagatggcagagcctactacatagttaggtcatatggtatggcctattgctcctaggctacaaacctatacagcatggtactgttctgaatcccgcaggcagtgttcacacaatggtaaggatttgtgtttctaaacatagaaaaggtacagtaaaaagacagcattgtacaaaattagctgggtggtggggcatacctgtaatcctagctactcgggaggctgaggcaggagaatcgcttgaacctgggagaggaaggttgcggtgagccaagatcacaccattgcactccagcctgggcaacaagagtgaaactccatctcaaaaaaaaaaaaaagacaagtattataatcttaagggaccaccatcgtatatgctgtctgtcactgaccaaaggttcgctatgtggcacatgactgtgtggtataaaggtactagagaactgtgcaacagatggaaacgtgttaagtgacaacctggcagctgaaaccgtaacttccattcgccgcagccccagcagagtaagttaagcttcactcagtcttgtcttaacacaaaaccacttgctatgggtgagggctgtctgggtccagaagataacagattagatctgtacagatacatgatataaagaaagtgatggggctgggtgcagtggctcacacctataatcccaacacttagggatgctgaggcacgaggactgcttgagcccaggagtttgagaccagcttgggtgatatagcgagaccccttctctactaaaaataaattagctggacatggtggcaagcgcctgtagtcccagctactctgaggtgggaagattgcttgagcccaggagatcaaggctgcagtgagctatgatggtgccactgcactgaagcctgggtgacaaagcaagaccctatctcaaaaaaaaaaaaaagaaagatgagtgtgttgagaagtccagtaaagtgccatcatggcaatcttttcgctgggacagtgagagaaagcttccttgaggaagtgtcatttgagctgctgaagtgaggatgaggcagtgaagatgagagcagattttctgtcctccggccttggggatggggccaggggtggcatggcctgagatgcaggggaggagcaggtcagggggagtgaagctctaggaaggggaaaagagtgatgagagaggagaactgaagaagaatacagcctgcagggttgctaaagccagaaggaatctgagaaatacagaaaccagctcctcctgctctgcccctgggagtctgtttctcttgatgaggctacagggactaagggaaagagtgtgaggagggggaaaacccctcttggcaaacacaggaaaaaagagaagagcctgtgaggagcggtctgtgctgaggacatgtgtgtgatgatgtggctgcctttccaggggcaagcatgggaagtaccttccaccaaggaagctggaagggttgggaaagtgcaactacctttatatcaatatcacaaaccaaaatgttttgaaaataaacatcagtttttcttggggaccaaaagatgttttatccacttggaagctgcgacagatttcaaggctaagcagatgttaattaaaatcaactatttcatcttatttaggtggttacataagtatacacataaagtcaagctgtacatgtaagatgtattttaatgttcctaatcattaaaaaaaaatacccaatcatttcaaaatgtaatttacttctcagggaagtatgatcagtggaaggaatatagcttccacttttcagacacatctttgaagaaaactacaaatccaagaggctggtgtttctgacaagtaaaaattccgcataaaattgcctgcatttcatttcactcaattttggcaacaattagcatcactctttgcatttgttcagggctttataataaagtcgggatgccataaataggtcaacaggcctgggtgggaacaccagcacccacacttgcttgttacttgacatctctgaaccacacattctccttcagtacagtgggtttaaatgagatgatgatgcatgtgttgaggctgcacttgtgtatcttcacattcgtctattgttcatcatcctctatggcaagtgaacagggcttttttcctgttttatttatcttcagagcctagaacagtgcctggtgcagagtaagcacttagtggacactggatgaatagaccgatagacaattctgatttgtaaatggagaagaagggagatgttttcttactgggagaagaagcagaacaaaggaaaatgaaaagaatggcgtgagttcctgtggttagaagagaggtcatcagaaaggaatgacataattggatatgaaaaggaagtgtgaacttatacatactcaaactggcattatgtctaatatatggttgactctgaatacatatgcgctattactatttttttttttttgagagagagtctcgctctgtcacccaggctggagtgcaggtggtgcagtctcagctcactgcaacctccgcttcccaggttcaagcaattctcctggatcagcctcctgagtagctgagactataggtgcacaacaccaaacatagctaattcttgtatttttagtagagacaggggtttcaccatgttggccaggctggtctcgaactcctgatgtcaggtgatccacccacctcagcctcccaaagtgccaggattacaggagtgagccactcacccggcctgctattactattatttttaattctttatttaattttttttttcttacagacagtgtctcactctgtggcccaggctggagttcagtggtgcaatcatagcttactgcagtcttaaactcctgggctcaagcgatcctcccacttcaccttcctaagtagctggcactacaggctcatgccaccagacctagctaatgttttttattttattttattttttttttgagacaagagtctcgctctgttgcccaggctggagtgcagtggtgcaatcttggctcactgcaacctccaccttccaggttcaagtggttctcctgcttcagcctcttgagtagctgggactataggcgtgtgccaccatgcccagctgatttttttgtatttttagtagagatgggatttcactgtgttagccaggatggtcttgatctcctgacctcgtgatccgcccacctcggcctcccaaagtgctgggattacaggtgtgagccaccgcacccagcccttttaaatttttttgtagagaaatgaccttggtatgttgcctcagatggtcttcaactcctggactcaagcgatcctcccacctcagcctcctaaagtgctggggttatgagtgtgagataccacaatggcctatttttgattctttatattaataactgaagagacccaaaagaatttttatcaatgtgtatgatataaaaaataataaaatgaacaatccaccacccagctctaagagtgtgtctctcatccctcattttgcttaaaaatttgtccaggcattgtggctcacgactgtaatcccagcactttgggaggccgaggcagctggatcacttgagcccaggagtttgagaccaacctgtgcaacatggcacaaccctatctctatgaaaaatacaaaaaaaaattagccaggcatggtggcacatgcctgtggtaccagctactcataaggctgtggcaggagatcacctgagccaggggaatcaaggctgcagtgagctgtgattgtgccactgcactccagcctgggcaacagagactctgtctcaaaggaaaaaaaaattatgatatatttcccttctcaacaacagattgtttagtgtgtcagatttttgaactttatacaagttgaatcatacatacatattaccctgtgacttgctttttcttgcatattaagtttctgagcgtcatgtcgctttgtctatctgtagatcattttcactgccaggaagtattctattgtgtgaaaatactgcagttcatttccacactcaattgttcatgagttcatgaacaatttttttggtcttcccctccccaatcgatgtttgctattatagtaggcccccctcgagcatcatgtgcctggaatttaaaaaaaaaaaaaaaaagaaagaaagaaagaaaaagaaacaaaaaatacagtagtcccaccatacctttgaaggttacgttctaagacccctactacacacatgaaaccacagatagtactgaactctatatattactatgtttttttccaatacgtacctatgacaaagtttataaattaagcacagtaagagattaacaataactaacaataaaaatagaggctggacacagtggctcacacctgtaatcccagcactttgggaggccgaggccagcggatccatgaggtcaggagatcaagaccatcctggctaacacagtgaaaccctgtctctactaaaaacacacaaaaaaattagccgggtatggtgatgggcgcctgtagtcccagctactcgggaggctgaagcaggagaatggcgtgaacccaggaggcagagcttgcagcgagccgagatcgcgccactgcactccagcctgagctacagagtgagactgtctcaaaaaaaaaaaagaacaattataacaatatgctataataaaagtgatgccaatatgatctctccctcaaaatatcttatttgtactgcattcacccttcctgtgatgatgtgagatgataaaatgcctacatgattaggtgaatgacacaggcattgtgactagcgtcaggctactattgaccttctgatgatatgtcaaaagaaggaccatctgcttcaggtgatcctggatcattgagccataatgatgttgatggttgtgtgtcaggaggaaaccaaattgatgactaccaaccaggtcaacagtgtagatctcaaggatgcactggacaaagagatggaatgtcctgagtgggacagagaaggacaacctgagatttcatcacactactcagaacgccaagcaatttaaaacttacaagttgtcctcagcaaatgcaaaagaactgaaatcataaaagtctctcagaccacagtgcaattaaattagaactcagggattaataaattcattcaaaaccacacaactacatggaaactgaacagcctgctcctgaatgactcctgggtaaataatgaaattaaggcagaaatcaagaagttctttgaaaccaatgaaaacaaagagacaatgtaccagaatctctgggacacagctaaagcagtattaagagggaaatttatagcactaaatacccacatcagaaagctagaaagctctcaaattgacaccctaacatcacaattaaaagaactagagaagcaagagaaaacaaatccaaaagctggcagaagacaagaagtaactaagatcagagcagaactgaaggagatggagacatgaaaaacccttcaaaaaaaaaatcaatgaatccaggagctgatttttttttaaaactaacaaaatagatagaccactagctagagtaacaaagaagaagggagagaagaatcaaatagacacagtaaaaaatgataaaggggatatcaccactgaccccacagagatacaaactaccatcagagaatactataaacacctttacacaaacaaactagaaaatctagaagaaatggataaattcctggacacgtacaccctcccaagactaaaccaggaagaagttgaatccctgaattgaccaataacaagttcttaaagtgttattggtttaagttttttaaacccaggaccagatggattcacaggtgaattctaccagaggtacaaaaaagagctggtacattccttctgaagcattccaaacaattgaagaggagggactcgttcctaactcattttatgaggccagcatcatcctgataccaaaacctggcagagatacaacaagaacaaaaacttcaggccaatattcctgatgaacattgatgtgaaaatcctcaataaaatactggcaaactgaatccagcagcacatcaaaaagcttatccactatgatcaagtccacttcatctctgtgatgcaaggctggttcagcatatacaaattaataaacctaatccatcacataaacagaaccaatgaccaaaaccacatgatcatctcaatagtgcagaaaaggtctttgataaaatttaacatcccttcatgtaaaagctctcaataaactaggtattgatggaacagatctcaaaaaaataagagctatttatgacaaacccatagccaatatcatactgaatgggcaaaagctggaagcattctctttgaaaaccagcacaagacaaggatgccctctctcaccactcctatgcaacatagtattggaagttttggccagggcaatcaggcaagagaaagaaataaggggtgttcaaatgggaagagaggaagtcaaattgtctttgtttgcagacaaaatgattctatatttagaaaaccccatcatctcagcccaaaaactccttaaactgataagcaacttcagcaaagtctcaggatacaaaatcaatgtgcagaaatcacatactttcctttacaccaacaataggcaagtagagagccaaatcataatgaactcccattcacaaattgctacaaagagaataaaatacctaggaatgcagctaacaagggatgtgaaggacctcttcaaggagaactacaaaccactgctcaaggaaataagagaagacgcaaacaaataaaaaaaattccatcttcatggataggaagaatcaatattgtgaaaatggccatactgaccaaagtaacttatagattcaatgctattcccattaaactaccatagacattcttcaaagaattataaaaaactactttaaatttcatacggaaccaaaaaagagcccatatatccaagacaattgtaagcaaaaagaacaaagctggaggcatcacgctacctgacttcaaactatactaccagactacagtaaccaaaaaagcatggtaccaaaacagatatatagaccaaaggaacagaacagagacctcagaaataacaccacacatctacagccatctgctctttgacaagcctgacaaaaacaagcaatggggaaaggattccctatttaataagtggtgctgggaaaactggctagccatgtgcaggaaactgaaactagaccccttccttataccttatacaaaaaataactcaagatagattaaagacttaaatgtaaaactgaaaatcataaaaaccctagaagaaaacctaggcaataccattcaggacataggtatgaacaaagatttcatgatgaaaatgccaaaagcaatttcaacaaaagcccaaattgacaaatgggatctaattaaactaaagaacttctgcacaacaaaagaaactatcatcagagtgaacaggcaacctacagtatgggagaaaatttttgcaatctacccatccgacaaaggtctaatatccagaatctacaaggaacttaaacaaatgtacaagaaaaaaacaaccccatcaaaaagggcaaagaatatgaacagccactcctctaaagaagacatctaggccgggcgcggtggctcacacctgtaatcccagcactttgggaggccgaggcgggcggatcacgaggtcaggagatcgagaccatcccagctaaaacggtgaaaccccgtctctactaaaaaaatacaaaaaattagccgggcgtagtggcgggcgcctgtagtcccagctacttgggaggctgaggcaggagaatggcgtgaacccgggaggcggagcttgcagtgagccgagatcccgccactgcactccagcctgggcgacagagcgagactccgtctcaaaaaaaaaaaaaaagaagacatctatgtggccaacaaacatatgaaaaaaagctcaacatcactgatcattagagaaatgcaaatcaaaaccataagataccatcacacaccaatcagaatggcgattattaaaaagccaagaaacaacagatgctggtgaggctgtggaaaaataggaacacttttatactgttgggggaaatgtaaattagttcaaacattgtggaagacggggtggcaatttctcaaggatctagaatcagaaataccatttgacccagcaatctcattactggatacatagccaaaggaatataaatcactctactataaagacacacgtacacgtatgtttagtgcagcattgtttacagtagcaaagacatggaaccaacaaaaatgctcaatgataaactggataaagaaaatgtggtacatatacaccatggaatactacacagccataaaaaggaatgagaacatgtcctttgcagggacatagatgaagctggaagccctcatcctcagcaaattaacacagaaacagaaaaccaaacactgcatgttctcactcagtaggagctgaataatgaaaacacatggacacagggaggggaacaacacacactggggcctgtcggagggtgggaggcgaagggagggagaacatcaggacaaacagttaatgcatgcatgttggacttaaaacctagatgacgggttgataagtgtagcaaaccaccatggtacatgtatacctatctagcaaacctacatgttctgcacatgtatcccggaacttaaagtaaaataaataaataaaaaagaaacatatatttaaaaaaaaaacacccttatgagttgttaatttctggaattttccatttaatattttcagactgcagttgactgcagggaattaaaaccatgaaaccttggataaggagggactactgtacaagcaggttgctaagatcagtctagtgtacatttcctgataggtgtgtatgagagtttctctagggtgcacacctaggaatggaattgctaagccatagtgtatgtatcttcagtttgttaggtttctattatctattactgtataaaacaacccttcccaaaacttggggtctcacagtgaatcataatagggtggtagtgggctcacacctataatcccagcacttgggaggccaaggtgggaagatcacatgagcacggagtttgagaccagtctaggtaacaaagcgagaccttgtctctacccaaaaaaaagcagggcatggtggcaagtgcctgtagacccagctgctcaggaggctgaggtaggaggatcacttgagcctaggaggtcaaggctgcagtgagctatgatcatgtcacttgcactccaggctgagtggcagagagaccctatctctaaaatgaaaaaaaaaaaaaaaagttttaaaactgtggtaatggttgcacaacttttaaaacgtactaaagatcacccaagtgtacacttatatggttgaattctatggtatgtaagttataacataaagttattttttaaaaattacatagcttaaaaaacaataaaagtcatttattttgctcaagggtctggtatttgggcagagattagcaggtatgtttcatctgctcccaggatgaactgtcaattggaggatccaacttccaggatcctcacatgactacaagttggtactggctggcaagggagcctctctctgggactgtgtgggcttcctgacagcatggtggctaggctccaagaacaagtgttccaagagacctaaacagacagaaactgcaggcttcttctgacctagcatttgatgtcccagagtgttacttctgctgcatttttttttttttttttctgagacggagtcttgctccatcacccggtctggagtgcagtggtgtgatctcagctcaccgcagcctccgcctcccgggttcaagcgattatcctgcctcagcctcccaagtatctgggactacaggcatgtgccacaacacccggacaatttttttatgtttagtagagacggggtttcaccatgttggccaggctggtctcgaactcctgacctcgtgatccacctgcctcagcctcccaaagtgctgggattacaagcatgagccactgcacccggctacttctgctgcattctattggccaagaagtccctaagaccagcccacatttaaggagaagggactcaacctctcaatgggaacagcatcagaaaatgtggccatcttcaatgtatcatactgttgtacctgagcgagttagagagaacgccacactttgagacaaattaagagtcctttattagccttagccggcgaccgagagacggctaacgctcaaaattctctcggccccgaggaaggggcttgattaacttttataccttggtttaggaagatgaggggggggtctacttagaacaattttccagaagttaagtagtcaaaaagttaaaaggataaatggttataggaacgtaaacagttccaggtgcaggggctttaagactattacaaggtgatagactaggggctttgggcgttgtcaatcagatgaattcttggggactgtggatatagcttgccacagtatcttatcagttaattgcattcttggatgtgctgggagtcagcttgcacaagttaagtccttgaggaaggggctgccagtgaaagagccaaaatggagtttgtctggttctcttagctaagggagaaacaaggctaggtgaataaaggaagaaacaaggttgggcattacattacaaggtaattccaaatggttttccaagtggtagtaccaatgacattcccactcgcaagacatgctctttgacctcaccaacacatgatagacttaaatttttgctgttcaagtattgggggaaattcagcccccgatatttcacgtgggttattttctattttccctaagtgcccgccagtctgagaaataaaggggaagagtacaaaagagagaaaatttaaagctgggtgtctgggggagacatcacatgtcggcaggttccgtgatgccccctgagccataaaaccagcaagtttttattagcaattttcaaaggggagggagtgcacgaatagggtgtgggtcacagagatcacatgcttcaagggcaacaaaagatcacaaggcaaaaggtcagggtgaaaccagaatcactaatgaacttccatgtcctgctgtgcacgcattgtcaaggttcaagaacagagaaccggtctgactagaatttgccaggctggaatttcctaatcctagcaagcctgggggcgctgcaggagactagggcgcatttcatccctatctacatctgcataaggcagatactcccagggtggccattttagaggcccggccctgggaatgcattcttttcccagggctgttaattattaatattccttactgaggaaagaattcagcgatatttctcttacccatttttggtaataagagaaatatggctctgtcccgcacggcccacaggcagccagactttaaggttatctaacccttgttccctgaaaatcgcttttatcctgttcttaaggtgcccagatttcatattgttcaaacacacatgctctacaaacaatttgtgcagttaacgcaatcatcacagggtcctgaggcgacatacatcctagcttacaaagatgacgggattaagagattaaagacaggcataggaaatcacaagagtattgactggggaagtgataaatgtccattaaatcttcacaatttatgttcagagactgcagtaaagacaggcataagaaattataaaagtattaatttggggaactaataaatgtccatgaaatcttcacaatttatgttcttctgccatggcttcagccagtccctcagtttggggttcctgacttccacaacacaagtgagtataaaagtgttgtggacttattttgtatttcctaatttctaagaaatttgagcaccttttcaaatgtttattggttgttcatatctcatctgtgaaatgtttgctcaagttttttattcactgtattatagagtgctctttttcttatttatttgtaggaaatctttctatattctcaatactagttgtcttagtttgttttctgatgctataacaataccacagattgactaatgtataaacactagaagttttttaggcttatagttctgaaggctgtgaagtccaaaagcatggcacaggatctggcacatgagggccttcatgctgtctcatcccatggtggaaggtgcaagaacaagaacagatgggagctgaacttcacccttatatcacaaacccactcccatgataactaacccactcccccagtaatgtcattaatacatttatgaggacagatcactcattaactaattgcctcttaaaggttccacctcttaatactaccacaatgcaattaaatttcaacgtgaaggccaggtgtggtggctcatgcctgcaatcccagcactctgggagaacaaggcagaaggactgcttgaggccaggagttcaagactagcctgggcaacacagtgagactccatcactacagaaaataaaaaattagccaggcatggtggcacatggctttggtcccagctactcaggaggttgagccaggaggatcacttgaacccagaagttcaaggttttagtgagctttgattgcaccactgcactccagcctgggcaacacagcaagactctgactctaatactactactactaataataataaaacaaaaataaataatttccccaagtgttttgcagaggactttcaaaccacagcactagtccattgtcagttatgtggatgcagatatcttctttcagtttgcgggttggccttctgctttctttacaatatctttggatgaaaagatatacatgtgagtctttttcttccagacaaggtctcactctgacattcaggctggagtagcgtggtgtgatcatgactcactgtagcctcaacctcctgggctcaagtgatcctcccacctcagcctcctgattagctgggactacaggcatgtcccaccatgcccagctaagttttctgagtttttgtagagacaaggttttgccacactgcccaggctggtctcctcctcctgggctcaagtgatcctcctgccttggcctcccaaaatgctgagattacaggcgtgagctaccacaagtagcctgggtccttttcaagatatttcctcccattcctttggtcaatttgactatctctgcattaaagccattctgtctttgttgttgctttataattcaataatttataattttataatgggggagagtttctacaaaatcatatcatctgtgctggtcagaatagcatatctcattgtggaaaaggcaagaataggtcacgtcccagttttataaataaggaaataaggtcaaactcaggactcctgacttttaattgagttttcacttcatctccctaaaaacttcctatcactacataaattaaaagtgttgtttgaggaaaatgaggggctggctttgctgcatgtattcaatcatttctgctcaacaaatattaattccttctttttagcagttatcagatacacaggcatgtagacactctttgtaaagtgctaggtatgtgtaagctattactattattatcattgtggtacaagagatatatgtggggccaggcgcagtggctcacgcctgtaatcccaacactttgggaggccaaggtgggcgggtcacgaggtcaggagatcgagaccatcctaacacggtgaaaccccgtctctactaaaaatccaaaaaattagcggggcatggtggcatgtgcctgtagtcccagctactcaggaggctgagtcaggagaatcgtttgaacccaggaggcagaggttgcagtgagccgagctcacaccattgcactccagcctgggctacacaatgagactctgtccaaaaaaaacaaaagaaaagaaagagatatatctggatcctagcactttgggtgggtggatcacttgaggtcagaagttcgagaccaggctggccaacatgacagaaccctgtctcttctaaaaatacaaaaattagccaggcgtagtagcgggtgcctgtaatctcagctacttgggaggctgagacaggaagaatcacttgaacccaagaggcagaggttgcactgagctgagatcgtactactgcactccagtctgggtgacagagcaagactctatctcaagaaaaaaaaaatcggcaaaagacatgaacagacacttctcaaaagaagacacacatgtggccaacaagcatatgaaaaaatgctctagatcactaatcattagagaaatgcaaatcaaaacaatgagataacatctcacactagtcagatggctaatcctaaaaagtcagaaaataaccaatgttagtgaggttgcaaagaaaagggaatgcttatacgctgttggtgggaatgtaaactagtttggccactgtggaaagcagtttggagatttctaaaagaacttaaaaaaaactaccattcaatttagcaatcccattaatgggtatatacccaaaggaatataaatcattctaccaaaaacacacatgcacatatatgtccactgcagcactgttcacaatagcaaagacatggaatcaacctagatgcccatcagtggtagactggataaagaaaacgtggtccatatacaccatggcatactatgcagccaaaaaaagaatgaaatcatgttctttgcagcaacatggacagagctggaggccattatcctaagcaaattaacacaggaacaaaaaaccaaataccacgtgttctgttttttgttttcttttttttttgagacagggtcttactctgtcacccaggctggagtgcagtgatgagatctgggctcactgcaacctccatctcccaggttcaagcgattctcctgactcagcctcttgagtagctgggattacaggcatgcgccaccacacccagctaatttttgttttagtagagacggggtttcaccatgttggtctggctggtctcgaactcctgacctcgtaatccacctgcctcggcctcccaaagtgctgggactacaggcgtgagccaccaccatggccaccacacgttcttatttatctcactttataaatgaagtccccatggacacagaggggaataacagacaccgggcctacttgagggtggaggctgggaggagagtgagcatcaacaaacttcgtatcaggtagtatgctcactaccccggtaacgaaaccatttgtacatcaaaccccagtgacacgcactttacccatgttacaaacctgcgcatgtacctcctgagctgaaaataaaagttgaaaaacaaaaaaaaaaagaaaaaagaaagctctctttggggaaaaactcacaaatctgccccctccggtgatggctgaccgatataattcaaacagcttcccgccatctttaaggaagcaaatggctttcccattccccttctttctcgtagtgctgcccttctcctggccccaggctgctggagaaaccgaggaaagcagacagggtcctaccttccagaagccttaggaacaccacggccatgggcgtgggaaggatacccttgggattctcgcgaaacattctcgtgaagggcaaagtcgagtgagaccaggatgggagctccaggtagagggacaacagagaggaaggaacagagggtgaaatccctgtgccaggaggcttcctgcagggggaggtgtgaggggctagtggaggtgaggaggagctgtgtggccaggacgctgtaggtgcctggtgagcagtggaggcagtgaagggctgtcaccaggagagcgacataggagatgtgctgttttgtttatttatttatttatttatttttgagacagagctttgctctgtcgcccaggctggagtgcagaggggcgatctctgctcactgcaacctccgcctcccaggttcaagtgattcttgtgcctcagcctcccaagtagctgggattacaggcacgcgacaccatgcctggccaatttttttttttttttttttttttttttgtatttttagtagagacagggtttcaccatgtttgtcaggctggtctcaaactcctgacctcaggtgatccgcccaccttggcctcccaaagtggtgggattacaggcatgagccaccatgcctggcctcgagatgtgctgttttagaaagatctgtcctcacagacgtgtggaagaagctaggaatgaggaagagaagaaatgaggagaaacaggcctgactcctccctggtgaacctcctcccttggcctcccaggccctcactccttccgttcccctcatttactaggagaggaattctgtgtccagagcaccccaaaacctgaaggcagaatgcagtcctggattgttgtggatcttggctgcatttaaaaagagaccttgctgagcctatgtcctgaataaaataaaggaaatgggctcctggtttccaaatatttctttagatgggagactctttgatcaaacgaagtcctgccctgataaaatgaggagtatggcagcaagggggcactcccccagcacgtggcggtccaggctccctcattgagggctctgtgactcagggtttctagcactgtagctggctctcctgcttcaaccgagttcttttatgagtgtatctgaatattaaactaacacttgtttcattgctttgaacaaggtgtgcttttgagaagcatggtcaatacagcaggattgaatgtttttatgcccctgtagcttaataaggagatcataattcatttaaaatggattgactcccatcctaagcctgaccagcattccattcttatattaaagaaataatccaaaaggaaaaagaaaagttataagcatgaagttctctgtcacagcattttacataatagtgaaaactgggaaccaacagagaactgagttacacactgaagcataatactaagtgtgatactcagtgtgatgttggacaactaataaaacaagcaatgtgaggctgggtgcaggggctcacacctgtaattccagcactttgggaggccgaggtgggtggatctacctgaggtcaggagtttgagaacagcctggccaacatggtgaaaccctgtctctcctaaaaacataaaaattagccaggcgtggttgtggccgcctgtaatcccagctactcaggaggctgaggcaggagaattgcttgaaccagagaggcagaggttgcagtgagcttagatggcaccactgcactccagcctgggggacagagtgagactatctcgctcacacctgtaatctcagcactctggggggccatggcaggtgaatcactggagcccaggagtttgagaccagcctgagactccatctctattcaaaaaaaaaaaaaaaaaaaaggccgatgtggtggctggccgggtgtggtggctcacgcctgtaatcccagcactttgggaggccgagtcaggtggatcacctaaggtcaggagttcgagaccagcctgaccaacatggtgaaaccccaactctactagatacaaaaagttaactgggcgtggtggcgcatgcctgtaatcccagctagaggcaggagaatcgcttgaaccaggaggtggaggttgcagtgagccaagattgcagtattgcaccccagcctgggcagcaagagcgaaacagtctcaataaataaataaataaataaataaataaataaataaaaattaaaaacaaaccaatcattgtgaacgctgggggaaggtggaaaagaggaaaatgcagaatacaaaattaggcaaagggacgaggcacccaggagaataggagtcgaactcgcttccatcttcatttcttctctcttcttcctgtattttttctccattttttccacaagaactgtgagaacacgggaaatgagttgatttattagggtgatttactacagtgattttcttctgcttttaagttgttactctttgggagggcgggagcttagaatccaagtgcaataaaaggtagagaagatgctgtgtgtgggtaaaagcagcgcggagcttcctgggccatctcagctagaccagtgcctttttttttcccactgggccctgaatatatctccatcaccttcctgaatgcactggggtaaccatctggttttgtaacaagctgagaggagcctggcatgtagtgggcactcgatgaatatggtgagaataacaaagcattcctttgcaatgcagggctcagttgttatggctttcaaagaaggcaatgtaactgacatactgagatcattaaacagcacaggaactaagaaggcaaaagaaagcagtgctttcaactattcctgttttacagagtacttgttgaaactgtaaaaagatatttagaaccacaaaaactaggccaagggtaagaaaaactcttcatacccaagagaattcagctgaccaaattaagtctgatccagaataaacagcactcatctggaaatctagcagttccagaaagtactgtccaaggggaaaaagacccacaacgttgatctgcataattatataaccctttaacaaagagacaagaagcgctatcgtgctggagtgcatggggaaaatcaaatgtgagcatgagcaaagctgggctcacttgagaaaataacaggtctcagccctcaaagaagaggactttgttactgaagagaatctgggctcatgtgccctttctcatgaacttgaccaacctcagtgtgttttctctgtgttcacccaacatccaaaaccaaaaacaaggtttctattatcaactccctccagcagaaattacttacaaatagtcatgtgaggagcattgcacatgaaggaacacattggaaactaaactgaagcttggctattacaaacaggtcaagactattcatgttggtattttaccaagaaaagcataatcactatccccttaaaagccaattaaaacatcaaataaaaacgaaatctggccaggtgtggtggctcatgcctgtaatcccagcactttggtaggcctagacgggcggatcacctgaggtcaggagttcaagaccagcctggccaacatggcgaaaccccgtctctactaaaatataaaaattagctggctgtagtggcgtgcgcctgtagtcccaggtactcgggaggctgaggcagaaaaattgtttgaacccgggaggcagaggttgcagtgagccgagatcatgccactgtactccagcctgggtgacacagcaagactgtctcaaaaaacaaacaaacaaaaaacccctaaatgctagatgggaagaggaacttaaaacataactttctttctccaacatatgtaaaaatccaggcttgaaattgaaagcgggggcttgaagagagatctgtacacccacgttcacagaagcattttccatagaagccaaaggatggaaataacctaagcagccattgacaaatgaatggataaacacgatgtggtgtatccatatgagagggaaattctgacccatgctacaacatcaatgaagcttgaagacgtatttcatgaaataagcaagtcacaaaaagacaaacactattatatctgattctgatgtagagcaggtgagccccaaaattggggcttgccccaggactaaggttcttggctttgcccaagagagaattcaagggtgagctggcggtgtcagcaacttttattgaagtggcagtgcacagcagcagtagcagaggcactgctccttgtggggcggggctacccccataggctgtgtgcccagagtaacagctcagaggcaggtctgcagtcatattcatacccacttttaattatacgcaaattaaggggcagattatgcagaaatttctagaaatagattaacttctgggtcattggctcatgccatggaaatgggtggtaacttccaggtgttttcatggcaatggtaagctgacaatgggtctgtcttatggaaaggtgctttcgcctcttccctgtttcagctagtcttcaatctggtctggagcatgagccctgtctctggagtcgagtcctgcctcctacctcaattccactcctatgtggcaaccagagtagtcaaattctcagagacagaaaatagaatgctggttaccaggaggtagagggagccagaatgggaagttagtgtttaatgggtacagaatttccagctgggaagataaaaaagttctggaaatggatcgtggtgatggttacacaacactgtggaggtactaatatcaacaaatcgtacgctttaaaatggttaagattgtaaattttatgttatgtgtattttaccacaattttttcttttttgagacaaggtctcactctgttgcctaggctgaagtgcagcagtgtgatcatggctcactgcagccttgacctctggggctcaagcagtcctcttgcctcagcctccccagtagatgggaccacaggccggcacctccatactttttttttttttttttttggagagatgaggtgtcactgtgttgcccaggctggtcttgaactcctgggttcaaatgatcctcccacctcagcctcccaaagtgctaagattataggcaccagccattgtgcccggcctaccacaattttttcttaaaaaattcaggtttgattccacagagcctttgtttaacaatgggaaaggttctaattttatgtcttctacttttcctgtggatattatatgttattctctacatgtgttaatttctggtaaaaaaatgactctgttacattctgcttacaacagagaaatgtcttctacttttcctgggatattatatgttattctctgtatgtgttaatttctggtaaaaaaatgactctgttacattctgtttaaaaaagagaaatataggccaggcgcggtggctcatgcctgtaatcccagcactttgggaggccgaggcgggcagaaaacgaggtcaagagatcgagaccatcctggctaacacggtgaaaccccgtctctactaaaaacacaaaaaaattagctgggtgtggtggcagatgcctgtagtcccagctactcaggaggctgaggcaggagaatggtgtgaacccgggaggcggagcttgcagtgagccaagatcgcgccactgcactccagcctgggcaacagagtgagactccgtctcaaaaaaaaaaagagagaaatatatattactcaatacataggagtccacccaaaaaattataaagaggttgttctttccgtacccccctctgtgaacctcttgtaacacctcatgacaataatgagagtagttatgcaggtcaaattccttaccgataatgctccatcttctaaccatcagtgaaaattaatctttttgtttcattcactcatccaataataagttattactaacatatattgaacaattactatactatgtgccaggaaatgtgctaaccactgggcacagtggtgtaagcctgtagtcccagctattcaaaaggcctccaaggcaggagggctgcttgaggtcaggagttcaaagccagcctgggcaacatagcaagaccttgtctcaaaaaaaaaaaaaaataggatcatacctaacatacataattcatcacactcaaatggccatagagctttagagctgggaaatacaattagcgatcttcaaattcagatgccctcattattgtttaccttcttctattatgaaaaatttcaaatatattcaatagtagtcaaagagcataataaacttctttttatactacagtaaaccactcagtgtcaataattatcaatgtatggccgatcttgtttcatatttacccacacttattttcttccatctcatataactttttttgctgtattttttttaactttttatttggaaataatttcaaatttacaaataagttgcaaagatggaaataataaaaagaacacccattaccatttacccagattcacctgttaacatttgtactgcttatttgtacacgctatctccccctgcacaaacacacactcacacacactttttttctgaactatttgaggctacattataaacatcatcatcttttactcctaaatacttaatgtgtatttcccaagaaaatgacattctcttatgtaccatggtacagttatcaaattcagtaaatgtaaactaattcaatcattttattttctctaccatttgtattccaattttgtgacttgacccaataattttttttttctatagagatggggttttgccatgttgcccaggctggtcttgaactcttggactcaagcaatccatccaccttggcctctcaaagtgctgggatcacagatgggagccactgtgcccgaccccaataatgttcttgacagtatttcttttccctccattagaggatccagttttaggtcaggtattgcattcaattgtcagattttattatttttttatttattttatttatttttattttattttattttatttttgagacagagtctcactctgttgcccaggctggagtgcagtggcgtgatcttggctcactgcaacctccacctcccaggtcaagcaattcttctgcctcagcctcccaagtagctgggattacaggtgcgtgccaccatgcccagctaatttttgtatttttttgtagagacagggtttcgccatgttggccaggctggtcttgaactcctgactttaggtggtccaccagcctcggcctccaaaagtgctagaattacaggcatgagccactgcacccagcctgtcagtctcttttaattaagaaaatttcggcctggcacagtggctcatgcctgtaatcccagcactttgggaggccgagacgggcagataacgaggtcaggagatcaagaccatcctggctaacatggtgaaaccccgtctctactaaaaacacaaaaaaattagctgggtgtggtggcgggtgcctgtagtcccagctactcaggaggctgagggaggagaatggcgtgaacccgggaggcggaggttgcagtgagccgagattgcaccactgcactccagcctgggcgacacagtgagactctgtctcaaaaaacaaaaacaaaaacaaaaacaaaaaaaaaaaaaaagaaaatttccagaacctttgtcctttatgacatagactttttggaaaaataaattcctctttcttcttttaagatgttccttgtgtggaggctgtctgctgtttccttatgattagattcaagatgtgcacatcttgacaaggtgactctagtcagtatactgactaggtgatattgtgtccttttcagggtatcacatctggaggcatatgatggccagtgtcaatactgatcaccagttaaggttgttgcctgattcatccctgtacaattactgtttttttccttcttagagataattaacagtctgtgggacaacactttgagatcaagaaatatcctgcttatcatcaaaatttcccctagattcagcatctgtaattagttacccactgctattatgccaaatcttagtagcctaaaacaacagatacttatgaactcagacagttcctatgggtcaggaatttggcagtggcttggctgggtggttctggctcagggtctctaatgaggttgcatttaagcgccagccagaagctgcagtcatctgaaggcttgcccagggctggagaatctacttccaagatgattcattcacatgcctggcaagttagtgctagaactgagaaggcctcagttccttatcacatggaactttccatagggctacttgactgtcatcatgacatgacagctggcttctcctagagaaagagatctcagagagaaagcaaggagaaagcagtgcctcctgtgacctactcttggaagtcatacactgtcatttccaccatattcattctatttgcccacttgattcaaggggaaaattaagcattaacttttttttttttttttgagacacagtctcactctgtcgcccagaaaataactagaaattgctttaaaaattattttgattagaaattaaatatcataaaacttaacctttaaaaaaatcacaaatagacaatttgtaagatacattaaaaagtactatatacttctaagaaaaatttagctttaaaagcattgatcagaaaataagagaggtgaaaacaacagagctaagcatttcccttgggtatcagaagagaggaaacaaaaagaagtgagaataaggacaggaattggtgacaaagagaaacacaataaaaccaaagaggactaaaaaaaggtataactttaaaaatattaaaacaatagacctctagagcaagtctaatgaaggaaataaaagatgcaaacaaaaagcaaatgaaaaagggagaaataactatggactcaacataattaaaataagaagagtaggctacacaatttgctaataaattgtaaaacctaggtaaaatggatacatttctggaaaatcataaaacaccaaaactggcacaaaaagaaatagaaaacttgaatagaacaaaaagcattcaaatatctgaaatagaaatcaagtattttccctcccaaaaagccctagaatgagatggttaacatggatgagttattaaacttttaaaaaaatcttttccaagttgccaggaagtaggaaaaataaaaaaaaaaagaacaccaaaaacaaacagacacaacagctcttaataggagaccaatattaattccaaatccaaataaggagacgtcaaccaaagaacaaaagatcacttcgcaaatacgcatatacacaaaaattccagtaagaattttaactgactaaattcaaaaggcattatccatttgatgacatatataaaatgggcaaaattcctctaaggacataaactaccaaagttcactccagatgaactggagagcttcctaatgaaattgaatttgtaataaaaaacctacccacaaagaaagctccaggccgtgagggcttcactgccaaattctaccaaacacttaaggaagagataataccaattctacacaaaaatctctctgaaaacaggagacagaacacttgcaaataattttaggagatgacattaccctgaaaccaaaaccagacaaaatcattacgagaaaagaaaactacaacaaatattcctcatgaataatagacgaaaatccttaaaaatattagccaaccaaatacagcaatatagaaaagaaatactacatttgagcaggtgaggtttatcccaggatacaagctagatcaacactcatatatcaaaaaatgtgtcgacttccaaatatggccgagttaagaaactggtatctcccattctccaaaacaactttaaagttggacaaaattatttaaaaaaacactcatatagggttctagaaattaaccaaaaggaagcaacaacgtgggaagcattgattcataaaaaactgagaaactctgggtaaaaacagtgggagtctgtggcatttttacctagtttgctcccatccacctcggcaccacccccatctcccccatactgttagtgaaatagttcttttgaagggggcaggatggagtatgactagtcataaaaataacctttactactggagcaggctgacctgatttggggcagacagctaaaaacctacactcagaggcactatcagtaaaagtagagaactcagtaggaaatgaaaggctgggtagccttgccactctcttcctttaaccaatgtcaaaattaagaatttatgagccaatgcccttgatcaaagttacgtatttctaaaaatactaaagttacaactaagttatttctaatttgcaaataacatagcttatagcattttttggccctggcataattttaggctatgacagaaaatgacaataatcgctttaacctgaattaataccttaactggttcatgttccccagtgaataaaacagattccataaatgcaggactagggttatttcacttgtcttcctgctcgcactctgcatactggctgactcacccacctttcagctctcatcctcagagctgacttccaggatccttccctgatgctcctcctgtgtattcctgcagcactctgtacttcattttttatcatagcctttattacactgtattataactgctaagaattgtttctattttccgaattttccgctagaccataccttaatcagttttctatctctaggatactttctactatcagacacacaggacgtactgaatgaatgaatgaatgaatacattttcaactatagttttaaagttttaaaaatctttccacagattgtagaccacccatttaatggtccatgtgttttcaatcttttaagcaaaaacaacccttgttcttattaaaacctatatgaaagagattaaggttaaactgccctgggtaaaagagaggctaggagacaggggagtagacagccctcagggaagagtcctgggaagtcgtaggacttcacataacccagtttcaaaaccatagcattaatctagtacagaaagaagaaaatcaccaataaaaataaattataggaaaaaaggtagtttattttttccatgttggttcttgtgctgcttttttaaattaaatctttgatagcctcctgacttaggatgtgctgattaaaacaccaaaataaaataggcaaagcaattatggacagggagaatccttaaaattataagacagacttctccattttatcttcccttctactctaataccaaaaacaaaaatcttctttaaataagactaacttagattaaataatctataaaggcttataaaagccttttacaagtaatgacttgaaaactggggagaaaaaagaatgagactataatacgatctccagttaaggctctaaagatggtgtctttaccagttacaaagaagctagagaaaaacgactgtatagaccttaaaattcgatctttaatctctagagttttcctgctttaaaattttaaaattttagtgatatagaaggaccaataaaataagagattgttttaagaaactaattttggagaacaaaaatctatatacaattacatttactttctattatattaaatacataaaataataggtgaacagacttcatcctagaatttcatttaatagtgatacttgaataactcaatttattcttagcttattagattcttttcaagtctttcaagtttaagcaaaaaatgcacttacgtcatctgcaataccaaaaattttagatgtcaagtatttaagtatgacagttccaaataaccaaaaacatccttgaataacctaaaaaaagaaaacaaaaataactttgatgcttcatattccacagacataggctaggaagaaaaaaataaatgctttaatcatacatgaaatacatattactatctacaagagaaaatgctagaaaatgcatctcaatttaaaatcaagcatgttgctcaaaatcaagggacagtaactaaaaataaaaatataatcatacaatcttatcaaaattaatatattttatagaagatttacacaaccactgcagttaaattccctttaacagtttcttatacatgcactgtttctcagatgaaacatgagtaataaataaaactggaatttttaaactacatacccaggattaactttaacttgtttcataaaaagggcaatttggtacattaaaactgagccctaaaatactataaaactgttggatcccctgagttacatagatcattttcttaaaagtaaaacataaaaccaatgatatattttagagaagaaaaaacataagcattaaaatagattgattctcacccataaactaagttcagatacatttattttcaggaaatgtggtttcattgccagaataccctgagtagagaaaaataacatagtatacacagttaatacttacagacataaattcaagtaccaaaaaattcttctaaatgataagattctcaagtatctaaaattgagcaaacagtcaactttccacataccatccacatgctcatgtctatagtcagtgacttcaaggtatagccctattatccaaagtcaattaggtgaaagcgtgactttttaaagttgaaaaaggaatcaccatatgtaaatgtctatcactgatttgacatatctgatttatctctgagccatgaggtatataacattttcagaattgcatacaggcataagattttcctttagctaaaaattactgactcttagggtaaacaacaaatgaaatgttaatggatcaactaaatacttctcttgtcaaatcttaagtattttcaggtagtaacgctcccaaactgtattacccttggggagctaaaactacttcaaacatcgcaaaaatatgattagagatcacaacataaatacttgaaaccaaattaaatctttttggaagtttctgaataactgagaatacaaaatgtgatacaattcaggtttcaaagtgattaattataaatatatgcaaatatgtttatagttaaatatgcacaaacatgctgtactccctgttatcatttatttttatacaccaaaatatatggaatatacataaatatgcttaattcatatctaagacgcacctcagtgtgaagcatctggcagcatacctgacatacagaactgaagagaaatttcctacaaaaggcacttaaattagattttatttatatgtaatatttgattcagtggtttccttgtccatagtaccaagattcatgtactttatcctgggtgatagcagtacatgacaaagtacatatgtaatatatacaactgagtactttgtcactttgacacagaactgaagaactacacttattaatcccgaagttatgatttttcttgttgttgttgctgaaaaatacagcatcatgctaattgctaatttctgtagctaagtatacccaaggtacaacctgaaaagggtggtggcccagactgggaagaggcatatttttaagaaatgcgtttttaaataaatattatttgtaaaataataaaaatggaggtttcaaatgtaatggcttctagaaattaagaaaccccaaatgatctgagtaacttaattactcaagaagtagaatacattccaattacgacagtgcaatgtgcttttaaagtcatcgggaaactaaagcacatgcactttaaacataaggaataacaagtttgcaaaacattttaatggaaacccaccaaaaaaaaaggcagtctttaaatttcagaagacttttagacttacaaagtcatcctgccagctgggcgcagtggctcacacctgtaatcccagcactttgggaggccaaggtaggcagatcacctgaggccgcgagttcgagaccagcctgaccaacatggaaaaaccccgtctctactaataatacaaaattagccgggcatggtggcatatgcttgtaatcccagctactcagaaggctgaggcaggagagtcacttgaacctgggaggcagagtgagccgagattgcgccattgcactccagtgtaggcaatgagagcgaaactccatctttaaaaaaaaaaaaaaaaaacacaacaacaacaacaacaaaaaaaagtcatcctgccaaatgtagcagaaggaattagatgaccttccatcaatttgttctaattctgtaaaataatctctccataagctaaagctgttcttggtagtgatttagcaatataaaattgaatcatcaccttacttaaaccttctgaataagtccatacaagtagacaaggggcaaaaaacaaaacaaaacaaaacaaaacaaaaaccctaagtaaccaaggccttgatcttctgatcactgtggaatgaagaggggaggctgttgtaagactgcagtttgaggaaaggggttcaaaaagtggagcaggagtaggataaaaatggaaaggaggaagggagaagaaagcatataaatctttctgaaatgatactaatttttcattgttttttttttcctgttttaaaagtgagtacttaaacaccatcacatctagaatattaagtaagacacttaagatggttcctacagaaaaccctcatgaatcctaagccagtgaagaagaaattgttaaaccattaatttcaaaaacagccaaataagtaaggaatatttacccaaataattaccaaagaagcagcataataataacattgagttcccaaacatcacaacaaaacaaagtgcaagagaaatctggaaaaaatccaagaaaaaaatataagtaatgcacataaaacaaaaaacctttgttttttattgtgaaaattgtacatgcccataataaacagaattcaaactgttcaaaagggactataagattaaaacagcccattatccatcccacacttcaagctcccagagataaccatcaacagtttcctgtgcatccttccagacaacatgtataaattctagtttatatattttgttaaaacacaaacggacacttaccccacaagctatactatttcttgcttttattcgtaatatgtttcaaagagctttccatatgcatgcaagccaatctaatacattctgcttaagaactggaaaaagtattctattccacagatgtaccctaatttaactagtcctccgaatactgcaaaacacttaagagctttccacttctattttgttttgtttggatcttcctaataaaaacactgctatgatagacatccttatgtgtataccttatgtacatgtcagtacatttatgaataaattactagaagtgaaactgatggatcaaggatatccacatttttaaattcaatacaaatattgacaaattggcctacaaaaagattgtgccaattccctttcccaccaactgggcaggagagttcctatggatatatattctggcaacactgtattattcttttaaatatctgccaatccagtggggaaaaaatgttacctcattgtttcacttttccattcttttaatagtagatgagacacagcaccttttattctatttgctggttatgttgtcttgtgtgtatgtgtgaactgcttattccaactgcccatctgtctattgggctttcattattttccttaacagctctcttcatatattacagaacatagccccaatatccagaatatacaagggacttaaacaaatttacaagaaaaaaacaaacaaccccatcaaaaagtgggcgaaggatacgaacagacacttctcaaaagaagacatttatgtggccaacaaacatatgaaaaaaaaagctcattatcactggtcattagagaaatgcaaatcaaaaccacaatgagataccatctcacaccagttagaatggtgatcattaaaaagtcaggaaacaacagatgctggagaggatgtggagaaacaggaacacttttatactattggtgagagtgtaaattagttcaactattgtggaagataatgtgacgattcctcaaggatctggaaccagtaataccatttgacccagcaatcccattgctgggtatatactcaaaggattataaatcattctactataaagatacatgcacacatatgtttattgcagcactattcacgatagcaaagacttggaacaaacccaaatgcccatcaatgatagaccagataaagaaaatgtggcacatatacattatggaatactatgcagctataaaaaaaggatgagttcatgtcctttgcagggacatggatgaagctggaaaccatcattgtcagcaaagtaacacaggaacagaaaaccaaacactgtatgtcctcactcataagtgtcagttgaacaatgagaacacatggacacagggaggggaacatcacacactggggcctgttgggggtggggggctaggggagggatagcattaggagaaatacctaatgtagatgacaggttgatgggtgcagcaaaccaccatggcacatgtatacctatgtaacaaacctccacttgctgcacatgtaccccagaacttaaagtatatgtgtgtgtgtgtatatatatatatatatatatatatacacacacacacaaacacacacatatataaagaacatagctccttatcaagtaaacatattgtaaatatttttctcagttcatttttgacctttgtggtattttttgtattatggttattttctaaatatttatgttagcaaatgtatctttcatttcctttaggtctttggatttatctgtcatttaaaaaggcactaaaaataaaataatccatattttcttctagaagttttatttttgatccatatatatcaatttcaatgtgaatttcagaatcagcttgtttcaaaaactaaaatttttattaaaattgctttattcaataacgtatgttatttacagttatatctgttcaagattgaatctttagatcccaaagcaatacatgttccttccatttctttaaatcttcttttacatgcattagcaagtacggttttctttatatagatcctgcatattttcttgagtttattctaaagcatattatttttgctgctgttgtatcaagaatcttcatattttctgtttgcatatagaaaaattatattaaatatgcatcaatgaatatgatttcattgtttctagtagtttatttggatttctcaagtattcaaaatgatatcaactacaaacaatgatatttttacattttcctttgaattatttttcagtcaattgtattagctgacatttctgcaacaatgttaagtaatgagagaggcagtaggcatatttaccatgcttctggcattaatggaaataggaaattgttctatggcttcatcattgtatgtgatactagtttttgttttgaggtgtgggtatcttaaatttcaatgaaatatccgtctatttttacttgattatggtcttttttttttttttttttttttgagacggagtctcgctctgtcgcccaggctggagtgcagtggcgcgatctcggctcactgcaagctccgcctcccaggttcacgccattctcctgcctcagcctcccgagtagctgggactacaggcgcccgctaccacacccggctaattttttgtatttctagtagagacagggtttcaccgtgttagccaggatggtctcgatctcctgacctcgtgatccacccacctgggcctcccaaagtgctgggattacaggcgtgagccaccgtgcccagcctattatggattttttcaaacttctcaatgtgataaatcatattaatagaatttctaatatcaacacattcctgaattcctggaatgaggcacttagatacaaatttaactatgtaaaaaatctatctgagcaaaactacaaaacttcaatgaaagtaatcaaagaactttataaatacatgaagttattccacatataggaaggttccatattgtcaagatgccagttcttcccaacttgatctacagattcagcacaatcccaatcatgagcctagcaagttaccaataaagtgattctgaagtttatatggagatataaacaacccagtatagagccaactcaatactgaagagcaaagtcagaggactgacactaccccacttcaagacttactataaagttactgtaatcaagacagtgtggtatttgtgaaagaagacacgaacagatcaagggaacaaaacacagagcccagaaatagactcacatatatagtcaactgatatttgacaaaggagcaaaggcaatacagtggagcaaaaattgtcctttcaacaaacggtgctggaacaactagagatccacatacaaaaaaataaatctagacatagactttacacccttcatgaaaactaactcaaaacagacaacagatctacatgcacattgcaaaactataaagctcctagaagataacattggaggaaacctagatgaccttaggtacgatgatgacttcttagataaaacaaaaaggtacaattcatgaaagaaatgattgataagctgaacttcactaaaattaaaaacttctgctctttgaaagacaggacaatgattgagaaaagatatctgcaaaagacacatctgataagggattgttatcaaaaacatacaaagaattcttaaaactcgacaataagaaaatgaaccacccaaggaaaaataagcaaaagatctgaatagacactgcaccaaaaaagatacacagatggcaaaaaaaaagcataataaaagatgttgaaccaaattaaaacaatgagataccattacacatctattaaaatggccataatccaccatgacaccaccaaatgctgacaaggatatggagcagcaggaactctcatttattgctggtggtaatgcaaaatggtatggccactttggaagacagtttggcaatttcctaaaaactaagcatactctcaccataccatccaaatatcactttccttggtattcactcaaatgaactgaaacatccatgtaaaaacctgcatacagatgtttatggcagctttactcataattgcccaaacttggagttaaccaacagttattcaataggcgaataaataaacagtggtacatccatataatgttaataaaatgttaataataatcaagattgaaatgagctatcaagccatgaaaagacttggaggaaacttatttgctttttactaagtgaaagaagccaatatgaaaaggctacatactgtatggttccaaacacatgacactatacaaaaggcaaaactatggaaacagtaaaaagatcagcggctgccacgggttagggggaaggagggatgaataggtggagcacagaagagctttatggctgtgaaactgttctacaagatactacatggttgacacatgtcattatacatctgtcaaaatccaggccgattgcggtggttcacatctgcaatcctagcactttgggaggccaaggcagaaggatcccttaagcccaggaggtcaaggctgtggtgagccatgtttacaccactgaactccagcctgggcaacacggcaagaccctgtctcaaaaaacaaaacaaaacacaacaaccacccatagaaaagtgaggcctaacgtaaactacggattttgggtgattctgatgtgtgatgtaggtttatcaactgtaacaaatgtaccactctggtgcgggatgtcaatagaggggtaggttgtgcatggttgggggcagggggtatgtgggaactctgtactttctgcttaattttgctataaacctggctgggtgcagtggctcatgcctgtaatcccagcactttgggaggccgaggtgggcagatcacatgaggtcaggagttcaagaccagcctggccaacatggtgaaatcccatctctattaaaaattcaaaaattagctgagtgtggtggcacgtgcctctaatcccagctactcggaaggctgaggcaggagaatcacttgaacctgggaggcagaggttccagtgagccaagatcgtgccactgcaccccagcatgggtgacagagcgagatccatctcaaaaaaaaaaaaataattttgctgtaaacctaaaacttctctgaaaaataaagatttttaattaagaaacaaaaaccacagtgaggtatcaccttataactattaggatggctaccatcacaaaagcagaaaataaatgttggtgattacatggagaaaatagaacctcatgcactgtttataggaatgtaaaacgtacagctactatggaaaagtttggcagttccttcaaaaatagatttaccatatgatcaatccagcaattccacttttgggtacatactcaaaataattgaaaacaagatctcaaaaaatatttgttcatagcagcattatttactatagctgaaacatcgaagtaactcaagtatctgtggacagactgaatagataagcaaaatcgtgtgtgtgtgtgtgtgtgtgtgtgtgtgtacacacaatggaatccaagtatccatggacaggctgaatggataagcaaaatctagtgtgtgtgtgtatgtgtgtgtacacacaatggaatccaagtatccatggacagattgaatggataagcaaaatcgtgtgtgtgtgtgtgtgtgtgtgtgtgtgtacacacaatggactattatttagctttaaaaggaaggaaattctgacatgcttcaacatagaagaaacttggggacagtaggctaattgaaataggccagtaacaaaaagacaaatactgtatgatttcacttacatgacatacataaagtagtcaaaatcacaaagacagaaagtagatggtggtttccaggggctgggaagatggaagaatatggactttaatgggtatagagtttcagttttgcaagatgaaaaatgttctggaaatagatggtggtgatggttgtaaaacaatgtgaatgtacttaatatcactgaactgtataattaaaaatgcttaaggtggtaaattttaagttacatgtattttaccacaataaaaaatggaaaaataatttttttggaataattctatatattttttctttttataactataagaatttagaaatttataaaacgataatggaagaagatagaaaatagtaagtcatataataaagtatgtatcatttacccaaggtaggttttacggctaactacgctgtgtaattttataattttataactaaaactttgagtcaaggccctcagccatagttgtctatgtgaccagccaactctgaaggcttaacatttaatctgatttatactacaaaataaaaaactattttaaatagtttgggaaaaaataagccgcatctaaaaaatacataattactgtctaacacattcatgaacaaggatgtaaaaatcctatcaaaatgacagcaaactgaatccagcgacatgcaaaaattgtgtttagcccagaaaagcaagtttatttaacggtagaaaattaattaatgttaattcattacagtaacagattaaagagggggaaatacatagaatcatgtaaacagatgtacgaaagcatttcatgaaacttaacatttattaatttctttttaaaagtgctcaaagcatgatgaggacatgttaaaaggaaagagaagtcagcttgaatagttggacaagtgtggaacaattggagcatcaacataaataacaaaaataatggattacactgcactgactaaaatagatgtcattttcttttggacacaagacaaactggtaaaagatttgaataggaatttacaacagtggaaacatgaagggcgtacaaacaaaccaaaagatgctcagcttcattatgaatcagagaaaatgcaaattaaggttataagataccattttacatgaaccagattaataaaataaaaaaggatgtagaataacataagctgctatatattgctgttggaagtagtccaatcattttagaaaaacaatttggtatttataaagttgaacatgtacataatttaccacccaacaagtttactactaggtaaacaccctagagaaactctcaacataggtgccctaggagatatgtgaagaatgtacagcattatttataactaaaataagaagttggggagagaggagagaacctaaatgtccttcaacaagaaaatgaataaatgaattacgctttatttatatgatggaaaatataaagcagtgaaaatatttgaattctagttacatataagtagcagaaatctgagtgaaaaaatagtacttataaaatgccatttgtataaaccttacaaagaatgtgaacatttaataataaaaatttatactatttagtaatccacatatggtaaagttataaagaaaagcaaattgattacgattcaaaaagtcagaatagcggttacctctaggaacagtgaggggatgagctcagggcatacaggacttaaaagtaacaataaggttctattttccatttggagagtaggctcccggttgtttattttatgactgtgtttataacttccttgcacattataaatgttcttttatatgtataaattgttaagaaaatgaaaatgggatattatgacagttgtaaaattatcaggaaaagaaaacatcaatataaaaactaatgagagagaagacaaatgtttgtttttaaaggataaccattcaagaacatcaaccaatcggctttagggtctttattctagctgttccaccaacctaggtatcagtttctttgatatctacttggctaactcgttctccttcttccaatctttgttctactcccccttttcaagaagacctgccctgaccacctcatttgatttttccatctcctaccccctgatcttggtgctcctgatctgccttacccttaccttttctttcttctaaaatctctttttgtaattttttatagagatgggggtctcacccaggctggtcttaaactcctgggctcaaatgtcctcttgtctcagcctccccaggccaccatgcctggcctaaaatccttatcaccttctaacaccctacaaaatttacccatttactatgtttattatttatcttctgtcttccctccttcccccactctgttagaatgtagtaatatgaatgctggtgtattccacatgcctggatagttgacactcagtaaatgaactttttttcttttttgtagagacatggtcttgctatgttgcccaggctggagtgcagtggcatgatcatagctcagtgcagtctcaacctcccgggctaatgcgatcctcccacatcagcttcctaaatagctagtactacaggcatgcgtcaccgtgctaggataattttattttattttagtagagatgagatctggctctgttgcccaggctggtttcaaacttctggcctcaagtgaactccaccttggcctctcaaaagtgttgggattacaggcataagccaccatgttaggcccttctacttcattttaacagacagctcctggataatatatcagtcccatgtttccgtttcataaattatttcttttactgataatgcataagttgggaacaacttcaatcagataatatgacccaaattaaatttttgtgagtggtctatcaaaacaaggtctgttgattatatcacaatgtttgaacaacatttgttttagttatgaaattgttacaactagtttcaaccatgaacaaatcaaatattaatcaggagtttaagggcaaactaaatggaaaagaacaataaaaaaattattaccatgtgtatataaatgatcttccataatttacatatatcaatgtacccgacaacatacactgcaaataatgatgcaatctgaaatttaaaaagaaaatagaagtaaaaaagataaaatgaatagctacaagaatgaagaatatatttattgttgtttcaactgatttatatctacacacagagtgagttcttttgttttccttttatctgccaatttattattaaatatagtcaatatattagtatagaaaatattggttgatttttctctctgacacacagctctctcaatcatgtgaattgtctactttgttgattgtccaaaacaatactcattttaatttcaggtcaaccctactgtcaacacgtacaattaaaaagtaccttgtccaatcaaaaaagatgaaaacgtaattataacatgacaactaatacataattggggaaggtacatttaactgaaaaataattatgcaatgcatgtgtgcataaaaatacgttaatttctgcttgctagtcactctttacaagtatctccattagcgttcttccattaatacaaatattcaagagttagttataatcaaatttatcaatttcaaattaagagtactttcgctgcaaaggtatttttaactttcttttccatttggaagaaaattatatgttatatatcaataattctaagagtactggaattatttagatgaattgattaaatgatgatacagtatctcttacatggaggtaatatgtcagacaatgcctctacacccttcctcatagagaaagcaattcaaattaaattcttcctgtcctactacaaaagcatagcataaacagattgcaaaatagctgaatacttaaactataacttgtttcattcatcaagtttttttatctctaaagcaatctacaacaaattttttcattagtgagaaaaacaactaagtttccctttattcagagttacccatggagaacactgcatttcttagggtgcctgatatgacataacaactgtggggaagtgtgtgttattattcaatgtaagccccacagggaggcaaaatacctcccctgaccctcacctccacaaaaaagcaggcagtctccactatcaggaagcaatgagaatgctcccttttcaccccaagggctaagcaacacacagtacatttacagggtagaattttcaagagacaatctcagagacaattttaaaccagaaactgattgaaaatgtcatcgaactaagttagacaaaggagtctacaagacaagatcaaagtaaaaagtaagtacaaatagagcctattttaaaaaataatgataaaaccaactaaccttactgacacctactaagtaccaggtactgtgttaagaatcatatacattacttcatctggtcctatccgcaacccaataaagtaggttcttttattatctctatttcagaaatgagaaaacctaaactaagaaaagttaactactttatccaagttaagaggctactgaatagaattaggactcaaatccaagtctaacttcatttctcaagcaagacgttctaaaaaatattaaaaagctgccaggcgccgtggctcacgcctgtaatcccagcactttgggaggctgaagcaggcggatcacgaggtcaggagatcgagaccatcctagctaacaaggtgaaaccccatctctactaaaaatacaaataattagccaggcatggtggcatgcgcctgtagtcccagctacctgggaggctgaggcaggagaatcgcttgaacccgagaggtgggggttgcagtgagccgagactgcaccactgcactcaagcctgggcaacagagcaagactccatctcagaaaaaaaaaaaaaaaagcaactcttcaactgctttatacaaatataccagtacaataaaaaaaatagtaggcagggaaaaaaatgagtatataactcatttttttttttgagagtatgtaaccctctctcaacaaactacctccatttatagtgggcatgagtacatggaaaggcaatagataaatttccagactggtagagagaattttataagagatgaactggttagctatttatcctgtaatcctatgtgtctgtattttacatgcaagaatgtacacaactattcataaaagaaacattttacgtaagagaaatactattgttaacttaagagaaatacttaaagttatagcactagtcctcttttaaggacattaacaatactgaataacaaagataagcattcttacaaatttgagttcaataaatgcattatgttaggaagtaaataattaacaatcatttataaataatcctacatatttctctaccctgaactttcttttgttcaacattcctaaaaaatgttttagaaaaacattttttctgttcctgttttagaaaaacatttttcctagaaaatgctttagaaaaacatttttcctagaaaatgctttagaaaaacatttttcctagaaaatgctttagaaaaacatttttcctagaaaatgctttagaaaaacatttttcctagaaaatgctttagaaaaacatttttcctagaaaatgttttaggacttagaatcatagaacatctcagttataattttatgcaaataagttcatagtcaaacatgctaagcttaaaacagcttaaaatataatcacctcacctgagtaagaagtacaaactgagcaaactgccaaggaagcatgaaaaataaattggaaatgcagagtgcaatcaaacttcctctataaagttttgtagcccttgaaaagataaaataagtgttagtaagtttaaacacgaaatagtctagcatggctccaaactgctgcaaattagaatctcgaaatatatatgatctggttataacacaaacctaaacataaaatgaaccaatgggttagaaattatacctcctgatactcaattacaacaattttctttgaaaggtaaatacccattattgctaacaataacacagagagaaggagggtggctgggtcagtatatccacgaacatttttttcaaattatattttggtgaatccatgactgaatatttaaaaatactgattcaacagattcattagttagaaaggcagaagatgcctatgaaaagataatagcagcatattctaagtgctaagtattatgcagacaactactgcaagaatgcagaataagagctaagcggctgagattttataagcatgtgagataaaaagttgggtctggcacaggcaggataacacagaaaagttaagtggaggaaaagatatgggggccactctgaagcaatctttagagatctcattttggtactgacttgtaatttaggagatttttaggagggtaagatgattttatcctctaaatctgcgagccaacgcaaagcccccacacatgtccatcttcacagaagtggagtgtgcatgttaatatactgaggtgatgaagtataggcagctcggatacagtaaagacatcctggttagataaacctacctggagcatagagcaccattatgaaatgcctttcttcacttccccaagtatcccttctccaaaggacatccctctctgctattttaatccaacaaaagtacttttaaactccagataaccttttaatgagttatgaaatcaacttatggaataaaattcagcatttaaaaatggagatcagcagagtgaaacagaatatatatgactatatcctatttacgaggggttctattctgtaaaacttttgtttcagttgtgtgcatccatgtatgtgtatacaaagccacagtgtaaaacatatttcttatttcttatagatcatagtccaaaagtttgaaagccgctgtctaaaataaagtacttctctactgcttttgaatactaaatatgattttcattttatgggtaacgagagacattaagatttctgagcagaatttaataccaatctggcagttgggtaaagaatgcactatggggagataggaatgaacagaaaacaaagaaaattcaattggtgatcaaaatagctctgacccaagaaaacagaaacagaaacataaatattgccaagaataattaaaaaaagctaagaacaatcaagaaaaagctaagctgtgctagtattaggtgactatataaactgaatttctaaaaatgcttaaaattcaaaactggacaaaaccaatttgttaaaatataccactaaccttatttataaatgattcctagcattaaggaatagtctcttttccggttttataacagtatcctcagcactgcagcctgcatcaacactgctcagcttcttcttggctcccccaagccatcaccacccaccacctccctctaatgtcataatatgtcaactacaggtagaactcaagaactaaaggaaatggctgctcttccaaaggagacaatgtcagtaataaggatgaaatatcagaagatgaagatggccaatagagagaaggttactatccttcagaaaaaagacaagatgtctgccaaagcttcaagaaaggaagtttagcaggttttccctccaaaaaagactgcagtgtccaagaaagcaaaatgaaagcccacacttccaagcaaccagtcatagccacagcaggcaagcagggagccatgacaactaaggggcatagccaggaaagccgtcgcaatcagaactgataagctgccaatgaagatggcgaggaagatcaagacgagatggatctgaaccaggagtggtgaaaacaacagctgattcagcttcagatgaccaggaatatgagaaaggaaatgtcaactagaatatgaacagagacaatgaaaaaggctctaaagaaaggaaagttctctaaaacttttcagcaaaaagtaaagacaggtatgaacaggtgggtaaggctgaaaatgacaatgataagaggctaaagaagacacaaaaagcttgccacagaagcacctggagccaaaaacagagaaggacccaatagaaggcagcccttgaaggcaggaaacagcaactggagaggccccatcctggtaggcagaataatggcctccaaaaacatgtgtcctaatccctggaacctgtgaacatgtcatgtcacttttatgtaccaccacaggatacataaaagtggaagagaggctgaagagaaggttggagtaaactgacaaagaaggacccaatccagcattgctggttttgaagatgaaggagccacaagccaagaaatgcaggcagtctcccaagaaatgcaggcagcctcccaagaaatgcaggcagcctcccaagaaatgcaggcagcctcccaagaaatgcaggcagcctctagaagctagaaaaggcaagaaaattgattctctcccctcccactctgtgccttcaggaagagtgtagcacctccagtaccttgattttaaaactaaggagctagaaaacttcaaggtagtagatcccagtttgtggtgactggtacacagcaacaggaaagtaacactaccttctatggtacagacggactaaaggaagcagcactcagtcaccggagcagcatccccatgcccacttagggacagatcagatcagtgagtgaaagaagaatcaaaggtttgccttcgctggatttaagacaggagcagaggtagaaaagcaggaaggaactagagactgatgggcagtctgctgtctgcactatactggagaaaaaagccacggtcaagaatgtgaatgtggaaaaacagcatctgtagtggtgaatcaaagactcctacagcacaacacttcttacagagatgtttgagaagggaccgttgctcaaggtgcctcagaaccaacaaggcagagctaaaggttacgaattcatagaggttcaccttatttgaaggtgctaaagaagctttaaatcctataaaagagtttaggggacagcaataaagctggagctacacagactttaaaaagctaatgcaaaaacattacccatcccatgttctatgaagggtctgtctaaagacactactacataggagactaaaagccatgtgatggttctatacttgctgtaacaatcagagggaaatagattgcccaaagagtttggcataacagacttcaacaaagttcttccaaattcggaggatcactgaaaagagttatcagtctgagtcatcttcagatttttatcatgctttgttccatttttccatagcccccattttgtttcatttttaccctctggagcaaggcagctgtattcaatatttgtcagcagaaagggagagaagtgtgaattctgtgaattacactttgccccaaaggattgcatcttacaggatacactatagcataaccagccttcaccttctttctactcattttcaggaagttatagtggtaacagaagaagacttgagaaagtggaaatgacagaagtgaaagcaatttgttccttctcaagcagtcactgtggaccaccaagaaaaaggaagaggaacagaaggctgatggaggaaatgtttttggtactatttttaagttatactcttaaaatatttttactaataatggcatcatactggtaaattattttattatgttgactttattatggaagcttaagaaattctagtttaaattatttaatgcaaaaagaaataaggttaagtcaaagttacctgagaatatgagtcacaagcaacatctgaagaacaagaaatggatatgagaagctttcgcggagaggtggtgtccacattacacaggtacactgaaaaaaaaattcgtagtatagtatacttgctaaatttactaagacagacattccaagtaaaaattgctatttataaataaaataaaattatttttaacaaataatttaaatggtatgttgtaaaacaaactactggactttatcccataaacagcaaaactagcatgtgagaaatattactgacagagacacatgtggcttaagatcatgtaaagcattaatatgaattgtcaacaagaaaataccaaaaaagatgcaactacatcttaaaaggaaagggaggaaagtaccagcaaaaaaacgttctgtcaaatttcagaatattttgaattgattatttatctattgtttgtcttctttcccatgaatttcagcaaaactatccataaccagcacttgagaattcttgtagtcatcaattttagtattttcattcacagtgctgctacaaaggaatattccatttttggttttacttctttgcctaagctaccctgggttgcaaaatatttaaaagtaggtggcggaatcaaattaagtaacaaaagtcctaaaattgtgaagtataaacctttctgaaaagctcactttggacataattaagcaatgtactatcgcagttgtaataatgtcatttttctgtatatatactaaatacattagtaagttcatccttccatcgacagaaaaccgcatagaattaaatgcaagcaatctgatattattaagtcacactaaaataaattatgtctttcagtgcaagcaggggtacctaaaagactccacagaatgacaaagaccatgtcagaaataagtgtttcctatattttagctctacctcagactactgaatatttctagtactgctatagaaagactgagtcaatttactcctcttttctaccgagcccaccatcctctatgaaactgacatacatatctatttatgaatgaactactcacacaagggaatgctgaaaagatctgatggatactcttgttactcaatattactgaatgtctgttgataatgtatactgttgttaccagaatgcaatttttaaaagctgttagtttattagattaactggagagttcagtaggattgacagtaagatacatgggcaaaccacgtttcattgccctttaccatgcttcacagataaggtctgtcacaaactgaaggtttgtggcaaccctgcatcaagcaagtctatcagtgccatttttccaatagcatgtggtcacttcatgtctctgtgtcacgttttggtaattttcataatatttcaaccttttctttttttttttctttttgagacagagccttgctctgtcacccaggctggagtgcagtggcacgatctcggctcaccgcaagctccacctcccaggtttacgccattctcctgcctcagcctcctgagtagctgggactacaggtgcctgccccacgcccggctaatttttttttttttttttttttttggattttttttagtagagacagggtttcactgtgttagccaggatggtctcgatctcctgacctcgtgatccgcccgcctcagcctctcaaagtgccgggattacaggcgtgagccactgtgcctggcctatttcaacctttttcattattactatatctgctatggtgatctgtgatcagtaatctctgatattactattgtaattgctttaggtgccttgaaccatgcccaataagatggcaaacttaatggataaatgtgtgtgttctaactgctccaccgatcagccactctcccatctctctccctcccatcaggcctccaaattccctgagacacaacaatattaaaattaggaaaattaataagcttacaagggcctctaagtgttcaattaatagaaagagttgttcatctctcactttaagtcaaaggctagaaatgattaaacttagtgaagaagacatgtcaaaagccgagagaggccaaaagctaggcctcttatgcctaacagtcagaaatgcaaaagaaaaattattgaaggaaattaaaagtgaaacaaccttattgctgatatgcagacagttttaatattctggatggaagatcaaaccagccacatttccttaagtcaaagcctaatccagaacaaaatcctaactctcttcaattctacgaaggctgagagaggtaaggaagttgcagaaaagtttgaactagcaaaggttggttcatgaggtttaaggaaagaagccatctccgtaagataaaagtacaaggtaaaacagcaatgccgatgtagaagttgcaagttatccagaagatctagctaacataactgaggcaggtggctgcactaaacaacagattttcagtgcagatgaaaaagccttctactggaagaagatgtcatctaggactttcccagttagagagaagtcaatggctggcttcaaaacatcaaaggacaggatgactctcttgttaggacctaatgcaaccagtgactaacttgaagccaatattcattgaccatcctaaaaatcctaggacccttaagaattacactaaatctactctgcacatgatctacaaatggagcaacaaagcctaggtaagagcaaatctgttttagcatgattcactggatattttcagcccattcttgagacctactgctcagaaaaaaagattcatttcaaaatattattgctcattgacagtgcacttggttacaaaagtgctcgggtggagatggatgaggtgattaatgttgccttcatgcctgctaacacagcatctattctgcagcccatgaagcaaggagtcatttcaactttcaagtcttattatttaagagatatctttcataaggctctagctgccatagtgattcctctgatgagtctggacaaatgaaatttaaatcttctggaatggattaactatttcagataccattaaaatcattctgattcatgagaggaggtcaaaatgtcatcattaataggactttggaagaagtttatttcaactctcatgggagacttagatgggctcaagacttccgtggaggaagtaactgcagatgtgatggaaatggcaagataactagaaatggagactgaagatgtgactgaactgctgtaatctcatgataaaacttaaaggataaggagttgcttcttaaatgagcaaagggaatggtttcttgaaacgggatctactactggtgaagatactgtaaacactgttgaaatgacaacaaagaatttagaacatgacataaacttagttgctaaagcagtggcagggtttgagaggactgactccaattttgaaagctctactgtgggtaaaatgctatcaaacagcatcacatgctacaggggaatctttcatgaaagaaaaaatcaatcgatgcagcaaatttcatcgttaccttaagaaattgccacagctatcccaatcttcagcaacccctctgtcagcagttgtcaacatcaaggcaagaccctccatctgaacaacttgctgaaggttcagatgatcgttggcagtttgtttgtttgtttattttgagacggagtttcattctgccacccaggctggagtgcagctgtgcaatttcggctcactgcagcctctgcctcctgggttcaagcgattctcctgccacaacctcccaagtagctaggactataggcacccgccaccacacttggctaattttttttgtatttttaatagagaaagcgtttcaccatgttgaccaggctggtctcaaactcctgacctcaggcgatccgcctgcctcagcctcccaaaatgctgggattagcaacttatttttaaattaaggtatgtacattgttttttagacataatgctatttcacacttaatagactatagtacagtgtaaacataactttgatatgcactggaaaaccaaaaaatttgttatgacttgatttattacgatattcactttacaatatctctgaagtatgcctgtatgatcaaaatttgcaaagtcatcagtctgtacaaaaacaagtattcaaacaagcaagtattcaaactatgcaatgtacaatttgagaattttcttcatatggacggttcccccacatttgttacccacattcaatgacgttatcattcctccgaaattcgttgcatttaatagctgaagtcactcagttcaacaaaactgaattacatcctctgaaagtagggacaagaaaacccaattacaggactgtaatgaagggcaaggtcttctccctccaaagttctgagtatatgaattcaaatgtccatgaaagtgctttctattgtttctccaataacacaatgtgttttactagatctggtacaaacataattgccattccagataatctcatataatctgaaaatagtgaagagatttggtttagtcatgccttacgtttcaacaaataaatattttttctttatctctaattttaaatgcaaaataaaaagtgtgacagtttaaaatgccaatgctttttaaaggcattattttgaaatttgagaattaaaggaaatatacatgtgaactgcttcaaaaaaggcttatacaaatgtatgttgtctctaagtacaagaaatccatttattgtgaaaataaattcaataaaaatctcatgtttcaaactgctaacacctagtatataatttttatcacacatttcataacactgattatattgcaacataatactgtgtagatattaacaagaggcttttcttttctgcttaataatttttaatcaatcactcaagaatcaataactaaggaatctcaaaaatagcttaattttccaatctctattttcaaactattaacttataatattggaaatacagcatgatctaattgatttatcttcataacttcaaaataaatagaacacctgactagtgagttataaattgtggttaatattagtatcaaacagatcatgtttaagatttattccaagagtttttactagagttgctatttgctggatcaatcctaacttgttactataatgtttaggtttaaaacaaattacccacctctgactgctgcttttctatattgattacactattgctccatattgcttaatattaactataataaggctttaaacactatatttatgagtgcttccttaaaagactgctggcaccatgaaggttatgctacctctcttcagagaatgttacaggtgttaagaatcctgctatccacatagtaaccataagaatgctaggtttaagagacatggcttgaatatctcctgtttgatgctacttagggcagtcccattatttaggaagacccttagtttggagtaggctttgtgcatctcagggcactgtatcttgataacaggtaagcctggttgctttcttggagttttggtctatttttgtaccatacacaggttgagtatttctcatccaaaatgctgggactagaagtgttttagatttcagagtttttcaaattttggaatatttgcattttacttactaactgagcatctctagtccaaaaaaccaaaatctgaaatgctccagtgagaatttcctttgagagtcacgttggcgttcaaaaagttttggacttttcaagtatttcagacttcagattttcagattacagatgcacagcccgtactgataagctgctcaattaaccagttacatatttcaatctgaacttataatacaattttggctcacacagggtttaatgtgtcagtgatacgtaaatgctattttaaactttactatctttataaagaatttcagctggttgtatgacagaaaacattgatctttttgtctctgaaaatctaagatatcagtatatcctatcctaaatttacaaaaaacctctgtgaaagcagtcaactttgttgaaaaagcggtgagtacacctccatgtttccatccattgttgcaatgactcgaacttgaccattgcttattcatctaaaatagaaaatatatctggcaagatgttatcagtatcaactctaccacctttatcatgtggttataaactacactgctcaaggttatcaacataaccaaaattctgactataaaatgaaagcattagccaagatataaaggcaatataaatagaaacagaaacaaatgattcaaattgcactatcaaaatgataatacaatgtggagaaataaaaacaattcaggttgcttctaaattgtttaacttttatattctgactatacctccttagtagaatatactcttaggagaaaaataagtagagaaatactgaaccatactttgtaggattgttattggtaatgacattagtgtagtaactctgaaactattttgtgtgtattacagaataatttgtttctggaacctttttgtgtttgaaaggaagtgtttgtctgaacacaatgagatatatcaaaagggcagaaaagagtgccaaaatcataaaatatctagagattaataaaatatgtgcaaaacataaaacattgctaagagaaattaaaggagacgaatataaatctatgtttatggattggaagatttagtatgttcaggaatgtccattctaaattaacctagagatctaatacacaaccagcaggttgtgtatgtgttgaaagagatgggagtagtgacaagctgattctaaaatttatatggaaacacaaaggacctggaacagctatggcaatactgacgaaaaacaaggttagagatcttcattatcagatatcgaacttataaactacaatatttaaggcagtgtggtactggcttgaagataaacggacaaatagaacataatggagagtgtagaaataaatccaaaaatatatagtcactttatttatgacacaaggcccactacaattcagcggggaaagaattttctttttaacaaatggtactgggttaactggacatcctatttggggtggggtaggggaggaagaaatctggaacttatttcatactgtatacaagattctagacagattataaaccaaaatgtgaaagctacaccaagattttcccttatattttcttcaagcttctaaaagaaaatacgagaaaatctttatgacctacagtaggcaaagactttttaatcagacacaaaaaagactacacataagagattgctaaatggaacttcatgaaaattaagaacttcatcaaaaaacctcaaaaagatctgtgtacaaaaagatacaatcacaaaatccaaaaagatgaaaaggcaggtcataagtggtgagaaggtacttgtagaacatatattctacaaacaactccatggaattgacaaagagttcccatatatgaataaaataactcaaatatttgttaatgggtgaagactcagataggtattaaagaaaagagaatatctaaatcagataagccatattaagaggtactcaatatcattactcatcaggaaaatgcaaactaaacccataataaggtaccatttcactcatcagaatgactataattaagaggactgccaatgccaagcactgacaaggatatactgatagaagaaactggaattctcatacattgccaatgggagtgaaaactggtacaagcactttggaaaacaatgtggatatatatcacagacatatgttgagagaaagacatcggacataagaaaatatgattccactatatgaaaccaccaaataggcaaaactaatcaatagtgatagagatagaagagtggctacctcttttgaaggatggagaaggatacagattggacaggaacagaggtgagcctgcttgggggctggaaatagtctatacattgatctagttcctggatacaagactgtatacatatgtaaagatccactgaacagttaaaatatgcaaatcttaatgtatgaaaattatatataattaaaatgtggggagactactaccggctaaatgtgtgacaatgagaacatcaaaaagatttgcaacagattataaaacattgaataaattttaaaaaaacctatgcatatatagtaaaagaaaatggcgggacaggggatttgtctttacagaacaccattaaatgtagattaaatggcagaattagaaaattaccatttgcaatggctaatgtaataactaattcaggcaagtatcatcaatggatgcataatcagttggtaaatgttatagaggaagagggtattggtgtctcaaagtatcatcccacatttcacttattaaaaggaaaaagggcatttttataatagagaaatatgacaccaccacttaactgtgtgatttaatttagtaaattcgattatgggacaaattggttttatgtgcctccagatgtaatgcaaagaaaaggacacaacatcatatgtgccatattcttcattaaaatgtccaatctggctggacataatggcttaagcctataatcccaacactttgggaggccgaggcaggcagattatttgaggccaggagttcaagaccagcctggccaacatggtgaaaccctgtctctaatgaaagtataaaaattagctgggtgtggtggcacatgcctgtaatcccagctactcgggaggctgaggcacaagaatcgcttgaaccagggagggagaggctacagtgagccaaaactgtgccactgcactccagcctgagcaacagagtgagaccctacctcaaaataaaataaaataaaatggtctaatccgaatctattaatgaagaaacgatcaggcaagtccaaaatgtcagacctctacaaaataattagttcagactcctcaaaaatgttaatgccatgaaaaaaaaagagactgagataaacttttctaaataaaatgacaactaaatgcaatgtacaatccttaatcagattctggatccaaaataaaagcatcaaagaatttataggactaaactatgtaaataagaatatgggctgtattaagatattattatataattattagtgtgaaatttctcaagtatgataacagtattgtgattatgtaggagaatgtcttgcttttaggcaatatatactgaagtatttaggggtgagatctcatcatatctgtagctcattttcaaacggattagaaaaatgtctgtgtcggtgtttgtataagagagacagcaaatgtgtcaaaatattaaaactagtaaatgaaactgaatctagagcatttctgtaagtttcaatttgctcaaaataaaaagccggagaaaaaacagtagagaaaaatgtacttttcttgtactgcctttttagtacaagatttacaggggaactagacatagcccaggtgaagataataaaacagttgttggctctaccttcacacctgagaacaactgcgtaatttatgtaaggatctgccacaggcagagagtctttgctggaaccaaacagcttctaacaatataaacaagaatctgaaaaagctacaaacacaaaaatgaatattttttgtgacagccacccctcccccaacctgggacacacataaacatacacacacatgaatctggcagataaagaggagtaggggaaagtcagaactctgtgagatcacaatctcacacagcgcttaggttccagggtcttgccacggctgaatctggagatggattaaaattaactaaaaagctgaaaactaaccccttcccagtttaaagagtggtaagatcaaaggaatcccaagttgagcatctggaaagttggggactgagacaaagaaaaaagagatcactgtagttcatttgaaactggaagtaaactaaaacaaattaaaactatactactgccctgcttggcagggcttcatgtgggatccaaattctcagtctctcttcctaggtgcttgacataaaagaagatgttccctttctagggaaattgaggcaaaaatgattatctagttcaatctttattattcttttacagaagttgtcttgcataaaataaaaagctatgagacatgcaaagtagcaggaaaacatgatccacaatcgagagaaaaaaacagtcaatggagttaaattcccagataatgtaggtgttggcattagaagacagactttaaaataactatgataattagattttaaaatgtatagaaaaatattagtgagatgaatgaagagataggaaatttcaacagaaaaatggaggctctaggaaaaaaatggaaattctaagaagtaacgaaggaagaaagggaaagagagagggagagagggagggagggaaggagggaagaaagaaaggcaagaagggaggaaggcagagagggagggagggaatttaccagagagtgataatagcagactgcatgcatcagaataaagcatccatcaactcctagacatggcaagagaaaatactcaaagcgaggaatagagagaaaaaaaatggggaaaaaaaaaaaaacagtgtcaaaaatctgtgatagtatttttaaaaagttgaacatacatgtaattaggatccccaaagaagaagagagaaagaatggggaaaataaagtatttaaaaagaagatcttggctagaaattttccaaaactgattaaaaataaaaactaacccacaaaacaaaagcgttcaatgaacaaagcacatctaggttcaccaccatcaaccaataaaaaacaaatatataatgaaaattctcaaacaacagagaaaagacacattacattcagaggaacaacaacaaaaattatagctgacttcttataaaacggtagaaaccagaagataatggaatggcatctttaaagtgctgaaaggtaaagctatcaacctataattcttatgcagcaaacatatacttcaaaaatgaaggcaagataacatttttagacagacaaaaactaagggacttattgggatatctttatcacaatgctaaataaaattcttaaaactaaagagaaattatgtcagatggaaatccagatctgcaggaagaaattaagaacaccattgagatgcaaactgaaatgctcagttgtgaaggataaccgggagttaattaggcagaggtcaagatgaggggcacagaggcatatacaaagcataggaaacagcatgtgcaaaggccctgaggaaggaaaaggaatagtcctttccaggaactggagaaagaagggccaatagggctgaagcaaaacaataaaaaacagcctgaagagtgatgtgagacaaaaccagaaatccagctgggcaaggtcataaaagatgttgtaggctacttttctattgtagactgcttttcaaatttacatcagcagatatgctgctaagattaacacattctatttttattgaacttttgcagttactgtaagtttaatataataagttcacaaatccatagacataccagtgaatagccttcataaaactatacatcttgtacttacactgtttcccaaattcatgtaaaacataatttaaatcatgtcactctactagtcatcatcctctagtggcattccatccactccaaatggaccctataatgacctacagaaatctgctcccactctatcctacctccaattattaactgtctgaccttatctgctatcactctctgctcctccttgctactgcccaaataagccagttattctcctgctttaaggcagaagataatcccacattcacatgattgtccacaaggataggagtctttgttttacttatacatctcaagcatcaaaaagtacctggagtacagcaggccaaaaccttaccaacactggaaagaaaggaagaaagaatgaaagaaaaacgaagaggtccacaaattggtaagaaaaggtctctgcacctttcatttataaacgataaattatagtgatgtcttctttgaaatgctactcccttaactaagagtttcgtgtttggagagattaatgggagaatcaggaaacttgtaatcctctctctgcaaaaagatccacaatattgatctgggcaatgatttcttggataagactgcaaaagcacaggcaaggaaagcaaaaatagccaaataggattgtgtcaaactaaaatgcttctgcacaacaaaggaaataattaacagtatagagtcaacccgaggattgggagaaaatatctgcaaaccatacctctgataaggccccaatattcaaaatatataaggtactcaaataactcaatagcaacaaaacaactcaatttttaaaatgggcaaagaatctgaagtcatttctcaaaaggaaagatacaaatggccaacagatgtatgaaaaaaaaaatgctcagcttctcaaatcataggggaaattcaaattaaaaccacaatgagatatcaatgtacacctgttagaatggctattatcaaaacagacaaatgataagtgttggagaggatgtggagaaaagggaactcttgcacactgttggtgggaacgtaaattcatacagtcattctagaaagccatgtaagtttcctcaaaaacactataaatagaactcgcaatcccacttcagagtatatatacaaaggaactgaaatcagtacatcagagatgtctgcactcccatgttcatttcagcattattcacaatagccaagatacggaagcaaccctaagtgtccataaagagattaataaggaaaatgtgctatacatacccaatggaatatgacacagccttaaaaaaagaaggaaattatgtcatttgagacactatgaatggaactgaaagatacaacactaagtgaaataagccaagcacaggaaggcaaatactgtatgatctcaattacatgtggaatctaagagtcattctcataaaaacagagaacagaaaggtagttaccagaggctcaggggagagatgggtaatggggagatgatccaaggatatcaagtttcagttgggcaggaggaataagttttaatgatctattgctccgcttggcgactacagttaataataatgtactgcgtatttcgaaattgctaaaagaatagatttttagcattctcaccacaaaaaatgctaagttggtgaaggaatagatacgttaatttgcttgattgactccttctacaatgtatacataaatcaaaacatcacattgtagcccattaatatctacaattattatttgtaagttaaaataaataatttttaaaaaatataaataaataaaatcatctccctgctgagtaaccttgagccaatctcttaatgttttagtgcttccatttttatgatattgggatatttactacgtatctaccatataagaatattataagaatgagattgatttcaaagtgttctaagaattcttttccaaatcttatataaatggcataactttgtcaataagtaattaggaacatgtatgtttatagtttaatctcagttcagtgcaaaaatagttaagaaatatgggtcagaaatatgttgtgggtcataaaaatgggttaattagatatgaaccccaaggcaatcctttcatttactttgaattacttttttaaaaagtatttatttctaaaaaacacaaagtaaggaatttcctcttcatatgtgcacatctttatatatgcgattatgttttacataaaacagaatcaatcatgcttggtaatagttttttttttaatcttaccatgaaaaagctaaacaatcttatttcacaaaaaaagaatttctaacaatcaaaaaattggagaaaaatactgtattcaggtttttcttaatacacattcatgtgcttttctatcagcatgccaaaaccctgcaccatcaacacatgttgtgtgcatcttgtaaaagaaaacattttaaaggcaaaacaaaattgctagcttttgcctttgcaaaaattctcagttgtgacagaatgaaatttactaaagaagcttgatcaatgaaaacatctgcatagtttttattatagaatgtataacctcaacattactgatcattattataaacccttttattgcatttcacaagtttcggatttgaaggttttaaatgtgttttaaataatttatttaataatcgattaagctattcatgctacacattttataactattttgttcgggcaaaattttcccttgtaaaaccatatgaggaaaaagaaaatttgaaaaaagtaaacctatgctatcttagcatctagtgcagagcaaactaaataatggaaatagaacttaaatgcaagtaacaattcagaactattctttgcaacataaaccaatcactcatgtgatcaaagtaactctcctaagaaagtaaggtaccaattagtaacccactagcatttccagtgagcagtgctctacaaaagctcactaaatacataaataggtactaccagagtgaatatttctgtccatagaaaaagtatacacttaaaaatctgaaaaacatagggtctgaaaatctcattaactaaaaccaaaatatgttgagttctcaccaatattttacccaaaactgcagtttatgctctcaattttaatgccattacctgtattttcacatgtaattttacatgtaagtaaaattatctacttgactatttcagcaaaactgaaattctaattctaatgatattcggtttaccttttcctaaaaaagtaatgtctaagcatgcttttcagctacaccaagtagctgaaaagtgtcaaaaagacaattcatcagcctgaaaagccaactgaatagtctgaattccattgttaaaatttaagaaaactttgtaaggaatgatgttcatgccacatgagtatcaaacttataagaaaacttaagaccaagaattaaaaaccatagtatacactgagggtagcacgatagacctttgcgctttacaaacagtggtcttcctggtggtctaggttccaaaattttgaataacctctttcctctgacaccttattgttaacacacgatgcttctttcttccattattaaatggttatttccctatttcttaggtcattcccacagaatctgtggctcaaagtgcttcatggtccacattatcacaatgtgcaggatccacagtcaggaaaagccaaatctttttttttttttttttaaacacatactataccaattaactgatgtcatgttgcaaccagttgtcaactactctagctttatatttctgtgattctaaatactaagaacatattagctaagtatccattagtaactcgctgactaaaaagaagtccagcattgactctgcattatgtttggagatgattactgttatagcacatgttaaaacatgtgcatattcaaatacagcaggcactgagtgtataaaatgcatggaaggacaaagtcacttcacacaaagcaagctgacctttattcttttctccctcatacaaaatttatcatgaaagaaatctagacagaggtgtattagaaattcatttacaactatgattaatctagaaacactgaaactctgaatttacattagaatttaaaccaagttaattagtcaataacagtaataacacaagctaacaattacatagcagctaccaagtgccaaacactgttctaggcatttacacatatgaattcacttagtctctgcaataatcctatgaggtgggtaacatcattatgcccatttacaaagaggaaactaaggcaaagagagattaaatgacttgctcagatcacagagccactaaatagcagtcaggatttgaacccaggcaacctggatccagggtctgtattttttacaatactgttgtctttagaaagcccttgaacactcaaatattttgcaaaaagtacttaaaagaatatcaaatgttaatacattaaaataagaatacactgtgtagctcctacaacaaaaagttatccctacaaaagaaagttatatcgattactgcctacttctattataactaaaatatgagtttcacagttttaaaattatacaaacaattgatacttgagggcaggcgtgatggcttacacctgtaatcccaacactttgggagaccaaggcaggaggattgcttgaggccaggaattcgagaccagcctgggcaacatagaaagattccatgtctataaaaaatttaaaaaattagctgactgtggtgatgaatgcctgtagtcccagctactctggaagctgattctgaggcaggaggatcacctgaccccaggagtttgaggctgcagtgagctacgacctaccactgcactccagactgggcaacaaaaagagacactgcctcaaaaaaaaaaaaaaaaaaaaaaaagaattgatacagttgatacagacccactatttcatcaaattactaagcctaagccttatatcacataagaagtataacggtcatgaaaagttaacttaaatgaatgctagtgtttaaattttgaatcaaaataataagattaaacatttaaagaatgccattatagattaaatttaaagaagaaaactgcatttccaggagtaattctgagaatagtttttgattacctacctctccatgactgaaaaagaagcacaacactgtaaccaggcctcctaatcggctgccactggaaaagaagaaaacataaataacaaaaatccaggtcaatcctaagaaaaatgttaaaatggcataacatcataacctctggtattataaaagattttagtcacactagaactctcctatgcttatttataaaatagtttatttcctccaaagtattagtcaaaataatcttttttcatttttaaaaaatcatttgctatcttcaatatgtatagactcagaaaagcacgcaaactgaaagggaataaaaaattcttactagtcacattgctgtacatcatgcaacctgatttttctttttattttctttataacctcatatttatttatgtccttcaacatttctcaaactgctttccttgggacagatgacatacattaggaaaaagggtgagaaagacgtgcaaggaaagggatccacggtcatgaggatggaaaaccccacactgcctacctgctcctagaaattcacaaggcacttccacacattaaagatttaatttcatatttcccaaatcccatccccaagctacttttctgcagaatacacttgagaaataccagtttatgaagttttatgtttcatttgttttcaaaaactggaatagaacacaaatatcaaagtatgacaatcaggcttataactctagataagaaattacaatggtgcaatctagtagttctaacaattaaccttcatttgctcaggtaagagtgaaatatgttccctactgtcccccaggtctgggtaggggacataaggctatctttaggtttatttcatcatgttctgcatctttactcttgaagtcttcttactcattttagctcatgctgctttcttattattctacccaaatatccttccttcttttcctctatctaccttccttctatttctctatctataagtataccacagagaggtcagagaggaaacaaagaaccagatggtataggcatcaaaggccttgtatttactcttgtgatgtatgaatgaggaaaagaggaagagatgcaatggccagcagggataatccacgtagggagtatccaggagacaggtagggctgggaccccagcacaggtggcctgtttgccttggcaaaagaggaggaagactgcatatttagtggcaagtactttgtggagtttccatgttccccacagagcagaagacacagccactcgctgctagagagaaacgatggcagcattaaacgtttgaggaaagacagaaatgtctgaaacaccactcacatttcaggagagtggtaactggggaaaacacagtgctgctgggatatcttaggggaacaactgaggctgcagaacacaaatctatagggtcactaatcataagattgtgtgatttttgcctaccaattatcagcctagaaagcacaaatgaaatataaaggggcaaagaaactgaggacattggccagaaagtgtctgaagtgatggatcactgaaatgagagcatcagatagaggagcttagaaagcagtacaggctaggaagtggacgccagggttctctcctgaaaggtgtaccacatcttcaaaagagaagcacacaggctaggcccaggcttcatcacaagtgattagacattagaaaggttaagacagagttaatggtttagaaaacaaataaatacactttagtgttttgaacttactctaacaagacaaaaaatatagtttatagggaaaaaaatgtgattttctcttgctaccctctcccaatcctattcacctaagaacattttagtatgtgtctattcttccaaatctctctctctaaccgcacaaacatatattttctgtgtgatcatattaacatctaaaatttgttccttttctaattattcagcataaagattattcctaatcaatatatgtaaagttaaagggattctttttatagatggcaaatactgtatagtacaaatatatttatttagcccattccatattactgggcatataaatatttttcaatttcttgctataataaaaaatggtgaaagtaaacatcctcgtacgtgtaaatgctggcgcatttgtttcaggagggatctaactgtgagacacatgagtcaaaggatgtgagctgtgcccggaagcactgcagcagtccacaccctcgtcacagagtatgcaggaggtcatttctccacccctcgtgcagcacctcatgtgtttttcaaaattttgtccttaggcaggtgaaaacccttttctcactgcctacttgtatgcagcatcattttagtgttttgttttgacaacatgtattttctcttccgtgaactgcttattcatattcttgtctatttttctattagactatttccctacttaaaaattaaggttatcaaacctttgactgtcaaatgtgaaaataacatttaaaagctgtccaaaaaaacaaccactttaagccttcagaaagatgtaactgtgatctgagtcacatatggttacaacttccattctcagattatagattaacttgctttcttatttttcttgttcagtacaatgactacagaattaaacactgtcaggcacaaaaacttcctgccttttttttttcccagagaccgggtctcactttgtcacccaagctagggtagagtggcacaatcatggctcactgcagcctcgaactcatgggattcagcaatcctcctgcctcagcctccagagtagctgaaactacaggtgtgagcctgcctttgtagttaataacccctgttaaagattaactttccctgtgttgttttactttgcttagatcagactatagaaaacctgtcattattataccctctgtttaaaaaaaaagttaaatgtacccttccccaaaagaaataccacctataaccaatcaaactgctgtgactatgtgccaatccgtatgaataatgttgtattcctgctaaaaatgtctctgtctctgcccatataaatgaaacctaaatttccctacttccaaaggctgacttcattcctttggagttggtgttcctgagtggtctaccctcacactttgtgcttgaataaacgctatttagattctgatccttttgattattttaagttaacacatatgtgtgacaaagtattttgatataatttgttgtgtattctgtcagaaagaatttttaaacttttatgtatttaaatatgttgatattttcctttatttcttctgcactttctgtcttgtctctgaaggtcttccacacctcaaaactatagtctcctaaaatttcttctaatattattaactgcattttccacttagctcttccaccctaattttgaactctttgaaatacccaattatattaaaatcatttatcacgtaaacatcccttttaccagtgaaatgaaattcagcctttgtcttatattaattccttacaatgatagactctgttctatttcattcaactgactgaattctttatttttttgtatcacactatttttattactgtagcattatggtaattttaacacatgattttaaaaagctccccacccccaactactcttatttttaagattttttaggtaattcctaccaacttattcttacatataacatctgaaccagtctcccaaccctgctccccaacccaagaaaaaattgtcaggcttctgatcagaatgacattaaatttatatataatttgggttgggaagggctgtcatttatatgatggtcattcagttgcacagtatatttctttccatttactcaattctaattgtattcctttaaataaaaatttttggggccagccacggtggctcatgcctgtactgtaatctcagcactttgggaggccaagtcgggtggatcacttgaggccaggagttcgagaccagcctgcccaacatgatgaaacactgtctctacaaaaaaaaaaaaaaattagccatgtggtggcgcatgactgtagtcctagctactcaggaggctgagagtcaagaatcgtttgaaccaggaaggcggaggctacaataagctgagattgcgccacggcactccagcccgggtgacagagtgaaactatctcaaaaaataataaatttttttttggacaaccaatgtaagagtcaagtaccaagttaaacttctagaaatacaaagagaacatgataaaatctgatcacagtggaaaattttaattctttcataatctgacaggtcaagtaagctaaaggaaacatattagggatctgaaggagataatcaacaagctcaatattgtgactatacagagattacacatcattttcttatgtcactgggacatctagttgcaaaggcacctcattctctgattagaagctaaaacaacctaaaacacaagaaagatgagttttttaaaaaatgacacggggaatttaatgtaaaatttccgtttaaaaattctctggaacgaggaataaaaatggaaatttaataactttaattttctaaatggcagagtaaaggtagagaaagaacaaaagactcacaaatccaattccctaaccaaatctcaggacgaggtttgcctaagaagtcgcacaccctcactcagctgccatacaacctgggaggctctgaggttggacaatttcctgagggcagagccactgtaactacattcctttttcaccaaattactaaaatacaggttatggtccaacatcttccatgaatatgggctcagctttgcttaactaacataagaggcagattttttctagtacacttttgagaactgcaaagctagaggaggagaataaaatttgtttatctacaaggaatgttctgagttagaatcactgtgaaatgatatgacttgaaacaaatctaaactagtgttctcgacgtccaccctctcaccccaatgcatacaggctactaagtaagtcctgttattttgctaaacagaaaagatgcagcaatcagaatacctaaaattttaaaaaaaatttttcccattatagttgatcagttgacatttcagcattccctagtggttaaaaaaaaaaaaagtctctcctgcaatattaccaccaactgtcagaaaatatgaaagctcctattgtgcaaattttaaaacattctaagcttgctaaacatttaccacatttactcatacatctcattcacctaaaccttgatttttcttagacataaaatgaggggataataaaaaataaagctaaaaaggacctaaaaatactttacagttctaaaatttaagaatgctataattctcttctttcctacctactatagttgtatagatttaaatcaattatcaagttttgataggtttcattaatcattgagatttttatctctatttacaaaaatgatgaaccatccaaagttaaacttttgaagagaaaaaagtaatcagagttcattcaaaactatattaaataactcttacgagttaagttttcttattgttgtataaatgcttaagaaagagaaaatggagaaaaatttggaaataaccaaattaagataatttccaatcttaagttggagattgaaggcttgagcatcttcctggcccaatgaagaaatgccaagcaggcctggttcagagctgagaaccttcccctatactcatggtggcagggggaggggggattcactggttactaaggaaagagataggaaagaaagatgaggaataaggataagaatcaggaagggtgagaaaagttctcagcttggtcgtttccagtctgtttcaagcaagtcattaacgcctttaatttaactctctatctgccagttctaacagaagttttcatttattagattgtgaactcctcaattcacccatggtgccaaggaccaaggcttgtccatgaaagagagtgaaagggtacctgaaaacagaactgttcaatcaaaagactgctggcattccttttttgaaagcttgtagccaaacacaccacacctcatgtcacaccaggcagggccatgtgttcaggtgagcctctgctctgacccaaccaccacacccctcaactcctatgcagacctctccactgtgtgctccaggcccttcattccatggtgaacaactacctatccaacacccgcagcctcttcccagatgcttcctccttctcctgcctggaaatatcactctcctctgaacaaatgcttcccctggagcctcccctacaattctgcctcctagtatcccagagtctgtccacttccctccatcccaccaccatcataccagctcaggctcccatcgtcttcccctgggctgctacagcctccgacaccccctacccaaagcctgctccctctacactgcagagtgtgttgtctttaacaatgaatggacccaatcccactccatgcacacagcccttcaatggcatccctgcccacaaggtcaaatccaaacaccaaaacatatccgaaatgcctcgcaggatctggcccctgcatacacctcaactcctttcactattcttcctcctacccacactctgctctccagctacacggtcctcatcacagttcctcaaatgataagaccacactgacaacagtgtgcagagcagcctgggagcaagactggtggggagcagagccacatgagctgatgcagagtcatcccagggggatgggctggcagagaagtggaaggacgccagagatactctgaagcaggacagtaataataggattttgtgactccttggattacagaggaaagaggaaagtcatggctatctcttagaggtcagactgggcattagagtagacagaagtgtcatttgctgagagagtgaaggcataaaaaggggaaggttttggagaaaagatgccaatactgccaaccaataactttcatcaatttatgcatattaaataaaaatacttatcttttaaatattcatatacaactgttagaccaaatggatttgattaaagatgtgttagcaggccaagttaatagtacattaaaaaaaaaatgtagctggaaaagtttgagatggtagaattcacagcctatttaagacgtgtttttagccaaaaatccaggctgtataagcagtaaatgcttgattttttgaaaataaataataagaaaatatcatgtaaaacaatggaagcaaaactggcataaaatttaagaaattcaacttttccttaaaacaggtggagggcagtggaagagtggaaaattaatacaaaacactattccattctgctacagagcctaagaatacctcataggcaacttggttggatcatgggaagagaaggtagaaagattaactgtgttaatgatgactattcactccagatgtaaagggggacatcaagcaaaattaaaaagggctttgacatacagactaatcatccaggccctcagggcttctggaacatatctagaaataaagcagcttaaaaaaaatctctcaggtatcaaagaaaccactctgaatctccaatgaccaaagaagataacagagaacagaaaattggaagatgaagtattgtcctctgactagccagttccttatgtggaagaaaagggattttctgctgactacttatgtctacaaaaggacatccaggcttttctcacaaaagctcagaaacaatggagaactgggtagagacaagggcaaatattcaaaagtgggggagaagatcaggaacagatcaacagaggggccacagggactctgggcagcccacattaaatgtagagaagttcatgaaaaagatcatttaaaagttctgttcaaaaagcgacctcatcgccagagaggggatgaagtaaggaaaagggaacactgaccctgcctcagaaagtgtgtgctcagccctcacgcataagtgtctgcatatgaccaggggtgagggggaggagtagtcaatggcactgggtgtcacttctgcactgacgtgaagaatcagatatgtctcccggactctggccacaggcagaagcagctgaggctggtaaactaaaaagcaacaacatgaaaggagcctgagtctccctaaacaaagcagtttacagtctcatcatgctgtaataaaagccactagtcagttaagacccatccactttgcaatcttccaaccagctcctcattcttagatacaaatgtcaagctaggaatcagcaggctgttggggatggaagcttccaatgtgaaaaatagaaactaatacaaattgaagggggacctagaggtaacaaagacaatgcaacaggcagagaaattttcaaactcaagattctttaggttggaaactaacagaaatgacaataaaatgtaaaaataaaataagggagaaaaaccctgagaaaattcgacttcaagaagtccaatatcaataactttcaagaaaacaggaaaaaaaaaatggagaagagaaagtcattagggaaataatactaaaaaaagttttcctccaaagtgaagtaagtgcccagatagagcacacaaagtatgcgatgagaaggatgaaatatctaccacatcatgaactttttggggactaaagagagaaagatgaacccaaaagctgccagaggaaaacaactaaccacacacaaaaggaactaatggtagaacagcaccagacttttgaaaagctacactccatcttagaatacagtcgaacaaagcctttaaaagtctgaggaaaaataaaaatcaacaaccaggcaaaccagtaatttagtacaaaaataaaaaaggaaatgttcaaacatgccagacaaatgtattttaaaactatctctgtgactctcttggaaattacctgaggatataatcctcgaaaggatgaaacagaccagaaagagaccaacctggggtccaaaacacaatgaatccaatgccagagaggaaaggggaattctcaggatggtggtaaacaaaactcccagggaatcgctatacggaagcccagggaaggacgggtctaggatggaaccagagacagaggctccaggagggaggccccaggggataggagtgggagaattgaaataatggattttatacatttgacaaagtataaaataagcgtttacagttcagttgtagatctggagagcaattaatcagcatacagaacaccaaggaaaacaaaatattagcaataattaactacaggaaaaattttaagttaccaaataaacaattatttatactacttaattcagcagtaagcaatatttttacagtcataataacgtaactgtggactattgttttacgtatcagaattgctgagatttcaaagatctgaaagtggctttccctagacaaagggatagatggggtggggaagacagatggggcaagggaccactgacgtacttgatgataaaaagttgaataatgccaaaagatatgcatgtatatataaagcagtgaaaattcagtttaaaaacatactaataagtaatatacccattgtagagcacattaatagaaagaaatttgttcaattacttatttggagacctcttgatatttgtcaaaaaatacttataaggaagaaatcataaaaatgttccagataacattaaaatagatgtttgtattcaccaccaaaagaaataatacagtatattttaaccttggcttgaaaacattaaagaagaaccttccaaaaaaaaagagaaattttccatactgaaattaccaactacaaactaccagaccatgcgaaggtatggagttacagtcatcttacctggagaatgaggagtcggggaaatgtgtaatcgcaaaagcagacatttaagaaaccgccacccaacacgctgtatgttacctttccctccaatgtgtcgttagttcaataaatgagtctaagtaaaattaactgaggaaactattagaataattataaaattacatgtatgacagctaaaaatggagcaaaataggatcctgaaaaatgacaatattagaaagagtaaacttccacctatcaaaccaaaacaatgcatacagaaatatcagctgaagaagagcaaaatcctgggacttcagaatccttcagaaatgaattattacagaacagtaatattctggaacatgagaacagaaaagagaacggaaagtctagatccttcttagtgtcgtgtatctttaaaacattttaacattttaagtaaaactttttatgaaatataaatactcactttggaaatggaataaacacttttttcttcattatgcaggatctttaaacaaaaattaactaaagctgcagacaatttaattgctgtggaaagaacactttaaatgtattctcaaagacagtaggccaggcgttgtggctcacgcctgtaatcccagcactctgggaggccaaggcaggtagatcacgaggtcaggagatcgagaccatcctggctaacatggtgaaaccccgcctctactaaaaatacaaaaaattagctgggattggtggcgggcacctgtagtcccagctactcgggaggctgaggcaggagaatagcataagtaaacccgggaggcggagcttgcagtgagcctagatcataccactgcagtccagcctgggcgacagagcaagactccatctcaaaaaaaaaaaaaaagacagtagagcacacactttggagccattgtcagtactcaaatccctactctgccaatgactagccctgtgaccttggcaagctatttaatatccttgtatctcagtttcctcatctataaagtggtttacctatctcatctggtaaccatatggattaaatgagtttctgattgtaaagagcttagactacagtctcacacataagcattttacacatactgaatttctccaatcaacaacagtcttcaagaaagattggaatctgcagagggaaagcttcagaatgagtccactggaaaaatacttcctaaattggtaaatgctagtaaagcttatgtgatagataatatatttttattgtgcctttcatatatggcaaccataagctaagtttttctttcaatattttattaattatgaatttattcaatcaaaaaatattttggaaggcaagcattcttctgggtcctttgcaaacactaccttattccattctcacatagaagacagagtctcttaaactcatttaggtgttctcccctctactcaatcacttctttaaaaattgtctataatcttccattttagttaacctaataaaacactgcacctcccttttacaaccctaaaagacctctgttactttatattttcttttacatctaaaggcaaaccaaagaactggcagtcactctaagttctgctcacatcatttattcaaattatataagaactcaaccttaatagattccacccacaatttagagcttctatacagcttttttcggtcttctagccttaatcatgacagcctaagtttgccagacatctaaggaaagcacctaacatggaaggtagagaccaaaagatgtttaaaaaaacaagctaggctgggcacggtggctcagacctgtaatcccagcactttgtgaggctgaggcgagtggatcaccaggtcaagagattgagacaatcctggccaacatggtgaaaccccatctcaactaaaaaatacaaaaattggctgggcgtggtggcgcgtgcctgtagtcccagctacttgggaggctgaggcaagagaaaattgcttgaacccagggggcgaaggttgcagtgagccgagatcatgcgattgcactccagcctggtaacagagtgagactccggctcaaaacaaacaaacaaacaaacaaaaaaacacaagctagaagatgccaagattattctgggagggtaaaaacatcattaatacccttagagagaaaatgtgttgaatccatgaaacaaaaataaaatactattttttagaaaggaatgtttatagaacaaacaaaactacttggaaattaaaagcatgacaatgaaaaataaaaactcattagaacagctggaaaaaataaggctgataaaatgttctagaatgtaaaacaaagccaaagagcttaaaaatggggggaaaaaaagaaaataaaataaaattagaggactgggaactatgaacatccaaacaataaaagttctgaatcagaaaacaaagggaatgaaataagtatagaaataattcaagaaaattcccagaaatcaaaggcatgagttacaagactgaaacaacccatcaagtgtctaagagaacacatgaaagcagatctacactgagatggtattgctctgaaatttcagaaccatagagacaaagaagatattctacaatcttccagagagaggaaggggaagcaaaggtcacatacaaaggtttagaaacccaaataacttcggaacatctgaatggcaccatctgaagcaaccgacaatgttttcaagtctagagttcaatacttggccaaacagtgaaccaaatacgaaagcaaataaagacattttcaaatatgcaaagtttcataaatgtttacctcccagctatctactctcaagacctacttactagaagatgaagtctaccaaagtgagaaaataaaccaagaaagaagaacaaacaggataagggcacaggagatccaacaggggagagcagtcaaggaaatcccaatgagatgccaagaggacagatgtacacaaaccatggaaggtagccagtccagaaccaagtacttactgactcatgcccaaaatctccacattttatttgtgtgagcctggatgagcctggaccagattcttgtctgtattttatcttggctccaaatgctttactgctggcatcagttaaagacacttatgtcactcacagaagttgttctgctttgatatgctccagagagccagggtaaacagtggtgaatttagaaagagggaacagctcttcccctcatgatatttctgctggatattcagtacctggctactacatttctgccagatgtccctaccaactgagtcccacatttatcccaggactagctcatgaccttgcctactgatgtctttaggaatcaggctcctggttgaaaatctatatgggatttctcaggcctggccatatgcaaggctttgcctggcaggcctcacagggaaaagaagaccttcacacaccaggcttggtgcagagccagcgtactgtagtctctcaggggagttgcagtcaatgactcagccatttctgggtgataaagctcttcttatatttgccttcctagcccaggcacctttatttcctggtcccattctctgctggcagagaggggctccttgaagaggttgctccccactctgactcagactctgcactctttggctcctggcccttctcctttgccccaccacctcaagaaccataaactgcaggagccttttgttcccttttgatgggggtgagacatcctgatcgtcacatctcacttataccattacagtaaatgattaaaggcttaattctcacttttgccttgtcgctttaaccagccactccaatacctggcagctcagctccctcccctagctcagctgtgctcctgacagcctcagaaagttccctcagggaacctaaagaccatgactcagaaattctcttcttctgggaactttcatctaacaagggcaatagtgtcctccccttaagcagctaggtttgtgcctgatactcagtttttcaaaactaaacacaccatatttaatatatacacatgagtggcataatcataaagaaaaacaaggaaaacattggtccaaaagttaggatgccatttcctctgagggttgagggaaggaaagagaatgcattaagaaggaattttaagggtatgaaagctctgataatttatttatttttttaatctgtgtcatgggtatgtaagtattcattttactaatctttaaaaatgtatataaagattttacacaattccatagtcgtaacattttacacataaaaaagtattttttttactagttatttatttactgggtcacagataatacactcatatgataacaatgcataaaataaagtaaggaatttcacacagctgtttctgacaagagcctcaacataaactgaagggataatttaaaagttccagtaaaagtattgcatgcggtacaataaaccaaagtccaagtaggcagcagtgactgggcagctatcagtcaataatgagacactccacaggggcattgttctgtctgccccaggatgactcatcagccacactcactgcccactgttttctccagaagacctcctctgacggcacttgatctagatggaatcaaaggctaaagagtctaaaaagctaatgaggtattttgggggcaacctcggataggatactgaatgggaaagaactcaaagattctaacataagatctaaaaatcaacttaagtacttttataattctaagacatttctcttaccttagggaaaggaatttttgtctatccttcagctccagttttaaggagagtagtaggaactctgaagacagaggcagcagtaatcaggggagaacgctacaaagaaaatgaagttcaaaaagacagcaccagagtcctctctggccagtcacagccctggtctgtgaaaaccctgggtggtttcatgcatcatttcaccatcctaagattcaaaacaaatcaagcaatcaaaggcagggctgctaagtaagcagctgcacaagcagagcagtgggagtggtgaatgggaccagggcctcgctgctggggagaggaggaaggggtgggagactagatgggaatagcaaagggacccaagggaagtccagttaaaaagttttgttggccgggcgcagtggctcacgcctgtaatcccaacattttgcgaggccgaggtgggtggatcacctaaggtcaagagtttgagaccagcctgaccaaaatggtaaaaccctgcctctactaaaaaaaaaaaaaaaaaaaaaaaaattagctgggtgtggtggtgcacgcctgtaatcccagatactcaggaggctgagacaagagaattgcttgaacccgggaagcggaaaatgcagtaagccatgatggcaccattgcactccagcctgggcaacagagcgagacttcgtatccaaaaaaaaaaaaaagttttgtcttaattttgtcatgtgagaggggaggtaagggatgaacacattctgaggcagatgggaaggaaccaggaaagcaagcctgaaggacagcgacgggcaaagaagaactggcagccagtagggataaatctaacacctacaaaggaatgagccttaaacaaaggcacttttttcgatgtttctctgatcccaccaggcctctgtatcccagtattgtactccctcttttatttcagctagtcagtatttttggcacccttttcaaaagagaaagaaaaaaactcctgctcagaaaccctgttattgtttgtactcatccttacatagcagtaaaatttataatacacaaatttataatatataaactttatatacatatgtatttttccagagaactgttaaacatatacattatttaacagcttaatacactatccaatctattcttcctcaacaatgcaccataacctagctaacctcgaattccaaaataatactaaaatcacactaaagtacaaagaaaagctttagaatcacctgcttggtatctgccttagagtccaacgccaaaagttttttatatttatcaataagggaaacttaagcatatatgaatttcctccagaagaaactatggggaaagttcgaactgcccaacaaccaatgctccttcttacttgcagaacagagatttctacacattgggtcttaagaaactggccttcagaaactgttagtctgtggctaagaaatatcagggtatcttatgaaataaataacggtaagtatatatcaatacagcttcaaaaaataattaacaatgagtatttttaaaaaaatactaaaatactgagaattccagaaaaagaattataccatgagtaggctgtgtttgcaaaacagatctcacttcatcttctcaagttagagcttggcagcctggctccattcatcatttggctgttttctattttcccttcttctatttctggtgaaatggactggcttacatggcttctaaaaacttacatgtatattatttcaaaacaaatatacttctgaatttaagatgtcacagtcaatctgcccgcaaatttctaatctgctagacaaatctcaacttttatttctcagtatataatacaatttattttttcaatcctaaaaacaactttagatatcctcctctttatttttaacccatattttaagaagtctgcagctttatccctctcataaaattacaagggtgactaaccatcaaggaagaaaatattaagaactaactagtaatttgaaacctctaaatgtacttcaggtcaaaaaacatacaaaaatgcaatgaaaaacactgatagaaaagaagtgataagagactctattcaaaataatatacatcaggatcaattgtgggaagaaccttcagtttaggatgcctttgaatagagctaaagagatggttccgggttaagaaaaagcccacaaacagcaaaaggaaagctggaaaaatgaaaacatgtgctgctagtgcagaccaccatggggtccaagagttgggtaacacagaaggggccagctaaagcacaaagcagtcaagtgggcagagtgaaacaagctatagccactgacactggaagaaccagagacagccatctggaaagacccaaatgctctaaggtaaaagctgccctcatgccaccttaagcagtagtctacagacttttttacaccaaaactacagtaagaagactttacacaactcagcacacatacatatgtgtgtgtgtgtgtgtgtgtgtgtatatacatacacacagcaaatggaagtttctctaagtagtatctatccttactagtctggtagatgatattatttactttgtagtattttttttctcatctaaaatgaaatgggctcaacccactgaatcaattttaaaactctcaaataagtgataacctgcaatttgacaaacactgtgctgaagtagtcactgcttgactttggggactggggaaagtcaagtgttccatgagatcatacttcagcttgaatcctgttcttatactggtcaatttttgtatttatttcacttgctttggaataggtttcaactcagtcagttaccaaggcctttcatcatccagcacaaccactgttccaatctgaatcccccacaacactccctgaagaacatgcttactgatctgcttactacctgctttccacatactagattttggcctttgcctctccctggtatgcttttatcctcatggtttatttccacctatccaaatacctctgattctacaaggtcacactaaagtagcccctccatgaagaacaaatttctcctgcctctggagttctaagcactttatttttccttcctttctatcttccattcacacacaccctgccgcactcccatgctctcagagcccaaacagtcttaagaaactacttggtatgaattgtttgtgttgactgaacaactgaatacaaaaaactgcctaccaggcaccacaggggttaaacactgagaaagatcaggtcagggccaaaaccaccaaaaacccctcaatcgaaaccagaaccttctattctcctcagtagatgttgtgccttctgcctttgaaaaaacagttacaacaagcattacaagaaaatatgaatgctttctttaacagatgtttacaaattcttctttcaattaaaaaagtagccaggcatggtggcacacacttgtagttccagctacttgggaggctgaggcaggaggactgcttgaagccagtggtttgaggctatagtgcactgtgaatagtcactggactccagtctgggcaacaatatagcaagaccccatattttttttaaaaaaggtagcataagtgcagattagcagcttagcaataatgccatgtttcatatttcaacttctcttatgtaaaatctaatctcccaaatgtaataaagctacccatagacagacgggcagtacttagcaaaatgaacagacaccaccaagtttctctccctctggctcattacgatgcaagcacacaggcccactttccctcaagtcagcctccttttctcattaccatattcttttggtttaacttatttccctgcatcttgtttcaaaaacaaaatctttcacatcatcttttaatcatgcatttttattttagtctccccaattaaacaaaagaattttcttagacctaagtcagaaacattaacttcaaagtgtcttaaatctatatacaaatatattttacatcaatcttctaacagcttcctcatttgataaatgcttatcaagtaactgctagatactcaaatggtgggctagaaactcaacacatctttgaggtactaaactgaaaataccacacttccaaaggaaaggagataatgggataatagcaaattcaaactcattatcccgaattgaaaatcatatacaattctcataattctgtactacaaagaatcaataagcagcaaggaagaaaattctaaagataatctcaaggcaaaatacttcaaacatacatacagtataataaattggcaaaacaaataagaaagaagaaaagtaaacataaaaagcctgaaaaaattagtcttttagttttaggaatgctgctcaactgtaaagtaaatcaggtcagatattaaatattgcagagaagacacttctaaatattgcatagaagatacttctattttaacattagtaaagagctattaatatcatttgataatgagtggtcttttcccttatattttatgtaaacaatatatactggatggagctgaaacaatctacagccattgacattggaagaagaaccacatctggaaagacccaaatgctctaaggtaaaagctgctccctcatgctaccttaagcagtagtctacggactttttttacaccaaaactacagtaagaagtaagacttcacacatctcagcacacacacatacacatgtacatacaacaaatggattatattgttccataacaatatattagatattccataacaatatatggaatatatattgcttatgttcaaatgcctatgaatatttaaaatttatgccaggcactgtggctcatgcctgtaatcccagcactttgggaggctgagatgggcagatcactcaagcccaggaaattgagactagtctgggcaacatagcaaaaccctgtctctacaaaaaatacaaaaaattagctgagtttggtggcatgcacctatggtcccagctactcaggaggctgaaatgggaggatcgcttgaacccaagaggtggaggttgcagtgagcagagatcacactactgcactccagcctgggtgacagagtgagaccctgtctcaaaaaaaatagtaattaaatttatcaagtattcccaattctatttacatctctaaaactatcttaagtgtgatgggccatggcagtggtgaaatcatgcaaataatgaatgattttatgataataagatattttaggatattttcataaaactgaactataaattaatcaatgattaactattaacttatcaactattttattttagtatatcttataaacacatactaaaatattcttaccttaaatatgtgccatatatgaagaataatgccatcattagtccatttaaaataaaaattacagcaacatagaagcaagcaagatctcccaatcctttaaaaataaacaaaacatatgttctaatcacattaacccaaattaccttatgtgtctagcaatttatattaaattgtgttcattttgaaaatggttgccagatacattaagtagttgccttggttcccacatgaaaacccaacactgctgcagaacacagatgagatcagggcaattagcaatgatggttttaaaacagggctgcaaattcacggatacgtctcctctggaggtatggggtctacagcccccatttttgagtttcagtgggcttgtgactcaacagagtacggcagaagcaacactagtgacttctgaggctaggtcataagaggtcacacagtgtccagcttggagccttcagctgccataggaaaagccttactactactctgaggtactttgctatcataaagcccaagtcacccagaaaggccacgtgtaggtgtcccagctgacagttccagttgagctcagcctcacagtcctccatgcccaggagccaaaatgtgagcaatgcagcctctcagttaactccagccttcccagacatttgagtcttagtagcagaggtccctgaaatcatggagataaaccagccccgctaaagcctgcccaaattctggacttgcagaatccatatgcataataaaatgggtgttgcttacaccactaagtttacagtgttaagtttattatgctggataagtttattacgttacaacagataactggacaatattacagaacgaaacttaccttcacagctttcagtaggactgagtccttctcctctggtaaccgtccgacatatcttggtttgaattgcaatgaagtccattattttggtataaatccagtaccagctggccaaaattacctatttttaaaaaatatagtggtatcttaagaaaatataccaaacaattttcattactagaatacttttgagatattgtgacaattgccatattttccctttctgtaccatccacttggctccctttaaatctagtaaaacgaggctcagaatctcctaggcagattcttcactggtcagttttcaattgttcatccatgggtaaggacaaaatatgggccaaaaaaaagtgctaagtttatgtttttcaaaaactatacaactctactaagagatacaaaagaggatttgctcaagtaaaagatactgggtctactggaatagaccaaattatttaagatttgaattctccctcaaattaattgataaacataaaataattctaatcaaaattccaagtgcctaaaatgtatctagaaaactaacaagaaaactaaagggaatgttttaacagatattaagtcttatcacctttaataattaaaatagtgtgatactggcacaagaatggctagacagatcaatgtagccatagtacaggtggtgataagccaccccagatgccctcttccaggctgaggcaatcattcctccagctagttggaagactggtgcctgagagctcgaagctgtgtccctccctgggaagaaattaaattcactcaaagtgacaccccctacccaagggcaatctgcatccaatgacggacaagtcaatagggaaagataccaggggcccttatgtcaaggtaggacaactctgcaaggccatcccagatccagagctgcccagggactggatgaggccttcacagtgactgcatcaaagctctcctcttcctcctgcctattctgcttcattcatccctcttcaagtgttgaccctaaggacactccctcaactacttcctgcatgcaaatctccatctcaaagtccacttcccatgacctcaacctaagaaatactgagcacaaaatccagaaacacatgaaagcacgtatgtataacaattttgcacataaagaagaaagcttacttcaaatcagtggagagaggatggacacctcatcagtgttaggttacacacaatactattttcaaagaaaaattcaaggttagattcctaccccacactatgcatcaaaaccaattccagataaattaaaaatgtaaatttaaaaaaagttataattataaaaatgaagttttttacatgtatgtataaaagacaaaaagattcatagatatatttctgtataaaaaaatacacagacatcatacacaaagctaaagggcaaacaactgggaaaaatgttttattatatagcattatattaatatccagtatataaaattttaatagaaatatagatgaaaagcatgaattggtaattaattttaaaagtaaaaatgcattatatgtatatgtatgtgtgttatacatacatatataaagaacactgaaatatatctataatcaatgaatgaaatacatcatgtgacttcaatttctttgtctatccaatcaacaaagatgcaggtaaataaatagtttcgaaaacactcctggtggatagttgaatatctatccggaaggtcttctgacaaaatcattaaagtatatattctactgaactagagttccacatcaacaaatttatagttttgcaaggaggataaaggaaaggccaaatgccatctccacttgctggatcgggctcaccttccctccactcccactcaagaaagtgcacttaattaaatgaggataaggaagaaaacatttaacaaatgacatataaaagtaacagagctcccttagtataatccttgtaagcacaccaaatctagtttttgtattttttaaacaatgcagtcacaacaacagttccccacagaattaaagccccctcctcaaaatcagtaatgatgttttttacatattcctccccaagatacatattttcttttaaaaaattaaatacaatttaatatattgaattataccttagagttagaatcagcatttaattcaaaaaagttttacaaaagtgaaaaatcacaattggaaaaagtaccttacctcagggtaaagattgaatctttttaatgtattaataacaagggggtattcagtcagtttatcattcataatcatccatactccattcaaaaatgagggtgtttccacaatagtcttgaaataggaataatacagtccctgaaataaggatatgctcagttaaaataacaaaaggtacataattatgatgcctcttcgaagtaaatatactgtttttgaaaaacaaagcaattaagcaactaatagctattaagacaatgaatttcacaggtttctgaccattgataaatcctaaagttgcgaaaaaactacgtattttcacataaacttgtcttaattgaaataactgaatgcaaaatagcttcaacaatagtttcagcatttaaaaaataatatgactcagcatacttcaacttagaaaatcctattacccacactaatataactgttagaaaatgctatcttatgaatagagtgagtggtttcttacggaactaaaatttatcattaaccaagaaatcttaagccaaaaatgctcctctaactgcttatgttaatccccaaaatgacactatcaatcatttttcctccggatttacatggaaaaatgcaaatgtgttgagaaggctactcactgatgtattattacatatgaatttcactcgggtgccacctaattttgcagattattttccctcctatcaagtcagcataaggtaagaaccctgcgtgactggggatgagggtggggagtggtcctattttgaagaaaagagttttttagcttggcacactgctttggaaagatagcaagggtggaaaattacgtgagacaaaacaagaaaacactagaagcctaacggagagtctaagcggcagtatgagggaagacagagaaacacaagataaatctacgtcttgtatttgcatcttcagttttgtctggagctgccctggtagccagtaccagtagctgccaaagtttaaaccgggtttaagactcacaaatacaaaagtgagatgcctacccagaaatttactgaaaaagaaaaaaatggtcttgatactctgatgtattagctctgatatcactatttttaaaattatgtttccttgtgaactgatttggatactgtcccctaaaatttcatgtccaccagaccctgtggattgatcttatttggaaataggattcttgcagacgtgatcaagatgaggtcatattggattaaggtggactctaaacccaacacaactggtaaatctaaataaagaggaatatttggcctcaaagctacaggcacacaggggaaaaggctgtgtgaagatggatcagagactgcggtgaggcatcagcatgccaaggaattccaaggatggccagcagccatcagaggctgagaggaggcaaggaaggactctcccctccagccttcagagacaagatgcccatcaacaccttaacgtcccactgcaagtctctgcaactgtgagagaatacatttctgctgttttaagccacctagcttgttgtacttctttatgacagccctaggacactataccttccttcttttgtaggtttgcttttggaaacatatcaaaaatttaaaaatccctaaatatcaaaataaaaatgaaagaaaggaatgaactatttatcaacttgggagaagatttcaaataacattaagatactgtaattttactgtatatccctagtggactatatcctaaggttaaaatggagcccaggaatctggcacgactggtttcacaagttacaggtcacaaagaccctgctgataatacaggatgtggtaaagaagccggccaaaacccgccaaaaccaagatgacaactaaagtgacctctggtcatccttattgctcattataatatattagcatactaaaggaaactcccaccagcagcatgacagtttacaaatgccatagcaacctctggaagttaccctatatggtttgaaagcgggagacaccctcagttccaggaattcccctccctgttcccagaaaactcatgaataatccacctcttgtttagcatatgatgaagaaataaccttaaaaacaatcaaccagcagccctcacagctgctctgcctgtggagtagccaccctttcatccctttactttcttaaggtaaacttcttttcacttcactctgttggagcattcttgaattccttcctgcccaaagccaagaacccacatggcctcctgggctcaaccccaattctgggggttgccctgtgaagaaccaaactgcacgaaaatcttaaactcttttcagtaatcacataaatgatggctattattattatttttagtagtatttgactatccatttattccatgaccattgcccgggtttccaatgctcttcagacttatttttctttgatcacacgtcagtgagtccatggccaaaatgagtctatctttggccctactctcacattcagatatattctacactttcacctgaacttgggatactccatggattgctggtcctacctcaattatttttcctgcttgttctctgccttatttgtccttctacttcctgagcccctaatttattcatgtgaaaaagcaaaattgcacaatgtaaattctgtgagaacagcttcactctaaggtaaattataatgtcttgtattattcaggaaatgactggatgttgatgttcatatatatcatctactaaaatgatagaatgaatgctttagacactctagaaatagattgttctatttttctctacttgactgatgatttcttgggatcagaacagatattcacaatattaaaaccacagtaaatggttttgtggttgaaaccaatgacaaataattttttgtctttgaatctgatgtcctccacatgtactctctgggatggaaatttctttagtggtactgtcaaaagaagcatcagagagacattagacagagatgacctttccatgaattttaagaggaagactctgatatggtttggctttgtgtccccactgaaatctcatcttgaattgtaatcctcaggtgtcaagggaagaacctggtgggaggtgattggatcatgggggcggtttcccccatgctattctcatgatagtgagtgagttctcacgagagctgatggttttaaagtgttgtactttctggtgctctctctctctctctctctctcttgcctgccccatgtaagaagtgccttgcttccccttcaccttccaccatgattgtaagtttcctgaggcctccccagccatgcagaactatgagtcaattaaacctcctttctttataaatactcagtctctggtggtattcttcatagcagtgtgaaaacagactaatacagagaattggtaccgaggtagtggggcactgctataagaatgtggaagcaactttggaaatgggtaacaggcagagggtggaacagtttggaaggctcacacgaatacaagaggatgaatgaaagtttggaacttcctagagacttgttgaatggtttcgaccaaaatgctgatagtgatataaataatgaagtccaggctgagatggtctcagatggagatgagtaacctattgggaactggagtaaaggtcactcttactatgctttagcaaagagactggcagcatttttttcttttttttatatactttcagttttagggtacatgtgcaaattgtgcaggttagttacataagtatacatctgccatgctggtgtgctgcacccactaactcgtcatctagcattaggtatatctcccgatgctatccctcccccctccccccaccccacaacagtccccagagtgtgatattcccctacctgtgtccatgtgatctcattgttcagttcccacctatgagtgagaatatgcggtgtttggttttttgttcttgcgatagtttactgagaaggatgatttccaatttcatccatgtccctacaaaggacacgaactcatcattttttatggctgcatagtattccatggtgtatatgtgccacattttcttaatccagtctatcattgttggacatttgggttggttccaagtcttcgctattgtgaatagtaccgcaataaacatacgtgtgcatgtgtctttatagcagcatgatttatagtcctttgggtatatacccagtaatgggatggctgggtcaaatggtatttccagttctagatccctgaggaatcgccacactgacttccacaatggttgaactagttgacagtcccaccaacagtgtaaaagtgttcctatttctccacatcctctccagcacctgttgtttcctgactttttaatgattgccattctaactggtgtgagatggtatctcattgtggttttgatttgcatttgtctgatggccagtgatgatgagcattttttcatgtgtcttttggctgcataaatgtcttcttttgagaagtgtctgttaatatcctttgcccactttttgatggggttgtttgtttttttcttgtaaatttgtttgagttcattgtaggttctggatattagccctttgtcagatgagtaggttgcgaaaattttctcccattttgtaggttgcctgttcattctgatggtagtttcttttgctgtgcagaagctctttagtttaattagatcccatttgtcacttttggcttttgttgccattgcttttggtgttttagacctgaagtccttgcccatgcctatgtcctgaatggtaatgcctaggttttcttctagggtttttatggttttgggtctaacgtttaagtctttaatccatcttgaattaatttttgtgtaaggtgtaaggaagggattcagtttcagctttctacataaggctagccagttttcccagcaccatttattaaatagggaatcctttccccattgcttgtttttctcaggtttgtcaaagatcagatagttgtagatatgcagcattatttctgagggctctgttctgttccattgatctatatctctgttttggtaccagtaccatgctgttttggttactgtatccttatagtatagtttgaagtcaggtagcgtgatgcctccagctttgttcttttggcttaggattgacttggcgatgcgggctcttttttggttccatatgaactttaaagtagttttttccaattctgtgaagaaagtcattggtagcttgatggggatggcactgaatctataaattaccttgggcagtatggccattttcacgatatagattctttctacccatgagcatggaatgttcttccatttgtttgtatcctcttttatttccttgagccgtggtttgtagttctgcttgaagaggtccttcacatcccttgtaagttggattcctaggtattttattctctttgaagcaattgtgaatgggagttcactcatgatttggctctctgtttgtctgttattggtgtataagaatgcttgtgatttttgtacattgattttgtatcctgagactttgctgaagttgcttatcagcttaaggaggttttgggctgagacaatggggttttctagatatacaatcatgtcatctgcaaacagggacaatttgatttcctcttttcctaattgaataccctttatttccttctcctgcctaattgccctggccagaacttccaacactatgttgaataggagtggtgatagaggtttcaaagttttcctttgaaaactgtcttgtgccagtttttcaaagggaatgcttccagtttttgcccattcagtatgatattggctgtgggtttgtcatagatagctcttattaatttgagatacgtcccatcaatacctaatttattgagagtttttagtatgaagcgttgttgaattttgtcaaaggccttttctgcatctattgagataatcgtgtggtttttgtctttgattctgtttatatgctggattacatttattgatttgtgtatattgaaccagccttgcatcccagggatgaagcccacttgatcatggtggataagctttttgatgtgctgctggattcggtttgccagtattttattgaggatttttgcatcaatgttcatcaaggatattggtctaaaattctttttggttgtgtctctgcctggcttttatatcagcatgatgctggcctcagaaaatgagttagggaggattccctctttttctattgcttggaatagtttcagaaggaatggtaccagttcctccttgtacctctggtagaattcggctgtgaatccatctggtcctggactctttttggttggtaagctattgattattgccacaatttcagagcctgttattggtctattcagagattcaacttcttcctggtttagtcttgggagggtgtatgtgtcaaggaatttatccatttcttctagattttctaggttatttgtgtagatgtttgtagtattctctgatggtagtttgtatttccatgggatcggtggtgatatcccctttatcattttttgttgcgtctatttgattcttctctcttttcttactagtcttgctagcggtgtatcaattttgttgatcctttcaaaaaaccagctcctggattcattgattttttgaagggttttttgtgtctctatttccttcagttctgctctaattttagttatttcttgcctcctgctagcttttgaatgtgtttgctcttgcttttctagttcttttaattgtgatgttagggtgtcaattttggatctttcctgctttctcttgtgggcatttagtgctataagtttccctctacacactgctttgaatgcgtcccagagattctggtatgttgtgtctttgttctcgttggtttcaaagaacatctttatttctgccttcatttcgttatgtacccagtagtcattcaggagcaggttgttcagtttctatgtagttgagcggttttgagtgagattcttaatgctgagttctagtttgattgcactgtggtctgagagatagtttgttataatttctattattttacatttgctgaggagagctttacttccaactatgtggtcaattttggaataggtgtggtgtggtgccgaaaaaaaatgtatattctgttgatttggggtggagagttctgtagatgtctattaggtccgcttggtgcagagctgagttcaattcctgggtatccttgttaactttctgtctcattgatctgtctaatgttgacagtggggtgttaaagtctcccattattaatgtgtgggagtctaagtctctttgtaggtcactcaggacttgctttatgaatctgggtgctcctgtattgggtgcatatatatttaggatagttagcacttcgtgttgaattgatccctttaccattatgtaatggccttctttgtctcttttgatctttgttggtttaaagtctgttttatcagagactaggattgcaacccctgcctttttttgttttccatttgcttggtagatcttcctccatccttttattttgagcctatgtgtgtctctgcacgtgagatgggtttcctgaatacagcacactgatgggtcttgactctttatccaatttgccagtctgtgtcttttaattggagcatttagtccatttacatttaaagttaatattgttatgtgtgaatttgatcctgtcattatgatgttagctggttattttgctctttagttgatgcaatttcttcctagccttgatggtctttagaatttggcatgattttgcagcagctggtaccggttgttcctttccatgtttagtgcttccttcaggagctcttttagggcaggcctggtggtgacaaaatctctcagcatttgcttgtctgtaaggtattttatttcttcttcacttatgaagcttagtttggctggatatgaaattctgggttgaaaattattttctttaagaatgttgaatattggcccccactctcttctggcttgtagggtttctgccgagagatccgctgttagtctgatgggcttccctttgagggtaacccaacctttctctctggctgcccttaacattttttccttcatttcaactttggtgaatctgacaattatgtgtcttggaattgctattctcgaggagtatctttgtggcgttctctgaatttcctgaatctgaacgttggcctgccttgctagattggggaagttctcctggataatatgctgcagagtgttttccaacttggttccattctccccatcactttcaggtacaccaatcagacgtagatttggtcttttcacatagtcccatatttcttggaggctttgctcatttctttttattcttttttctctagacttcccttctcgcttcatttcattcatttcatcttccatcactgatatcctttcttccagttgatcacatcggctcctgaggcttctgcattcttcacgtagatctcgagccttggttttcagctccatcagctcctttaagcacttctctgtattggttattctagttatacattcttctaaattttgttcaaagttttcaacttctttgcctttggtttgaatgtcctcccgtagctcagagtaatttgatcgtctgaagccttcttctctcagctcctcaaagtcattctccatccagctttgttccattgctggtgaggaactgcgttcctttggaggaggagaggcgctctactttttagagtttccagtttttctgttctgttttttccccatctttgtggttttatctacttttggtctttgatgatggtgatgtacagatgggtttttggtgtggatgtcctttctgtttgttagttttccttctaacagacaggaccctcagctgcaggtctgttggagtaccctgccatgtgaggtgtcagtgtgcctctgctggggggtgcctcccagttaggctgctcgggggtcaggggtcagggacccacttgaggaggcagtctgcccgttctcagatctccagctgtgtgctgggagaaccactgctctcttcaaagctgtcagacagggacatttaactctgcagaggttactgctgtctttttgtttgtctgtgccctgcccccagaggtggagcctatagaggcaggcaggcctccttgagctgtggtgggctccacccagttggagcttcctggctgctttgtttacctaagcaagcctgggcaatggcgggcgcccctcccccagcctcgctgctgcctggcagtttgatctcagactgctgtgctagcaatcagtgagactccgtggggtaaggaccctccgagccaggtgggggatataatctcgtggtgggccgttttttaagcccgtcggaaaagcgcagtattagggtggcagtgactcgattttccaggtgccgtccgtcacccctttctttgactcagaaagggaaccccctgaccccttgcgcttcccaagtgaggcaatgcctcgccctgcttcggctcgcgcatggtgcacgcacccactgacctgcgcccactgtctggcactccctagtgagatgaacccggtacctcagatggaaatgcagaaatcacccgtcttctgcgtcgctcacgctgggagctgtagaccggagctgttcctattcggccatcttggctcctccgactggcagcattttgcacctggtctagagacctgtggaactttgaaataatatggtttgtctctgtgtccccaccaaaatctcctctcgaattgtaatcctcaggtgtcaagggaggaacctggtgggaattgagtgcatcatggaggtggtttcccccatgcggttctcatgatagtgagtgagttctcatgagagctgatggttttaaagtgtggcacttcctggttcgttctctctctctctctctctctctgtctcacctgctgctatataagatgtgccttgcttcccctttgtcttccacaatgattgtgaatttcctgaggccttcccagccatgcagaactgtgagtcaattaaatctcctttctttataaattacccagtctctggtggtatttttttttttgaggtaagactctcactctgttgcccaggctggagtgcagtggcgcaatctcagttcactgcaagccccgcctcctggattcacgccgttctcctgcctcagcctcccgagtagctgggactacaggcacccgccaccatgcctggctaatttttttgtatttttagtagagacgggatttcacttgtgttagccaggatggtctcgatctcctgacctcgtgatccgcccgcctcggcctcccaaagtgctgggattacaggcgtgagccactgcgcctggcctaatggtattctttatagcagtgtgaaaacggacaaatacagactccttccctagacacgagaaccatgatggcattagggatggagttattaatgcataatagcagaaagctctttacctcaacattataaagataataaaggtatagttaacaatgattggacacacactgtagaaaaagaaatgtgtgaattccattagagtattaaattgagcaatagtgtttgcagcaaactatgagcattattctttaatttccactcccattaaaggagagggtggtctcttttcaggtaaagattgttcatctctttcttctgcatgccccatgcagttgtaagctagatggcattctgtatgtcaggaccatttttcattactgcaaaatagtcaaactaagttttaaagaaaagaatttctatcactatgcattgctataaggctttttattccaacatatggtattaaataggagttttgtgctcaattgtgaatttatatgaaaaggagattaggacacaacaggcacagaggaaagatcatgtgaagacacagggagaaaacactcatctgcagatcaagaagaaagatcccagaagaaactaacagaggcccaagagtggcctttgtgtttcacttcagtgctctatgttctggccaattgtctgtcatcttcctttctgtgtgaatgagtcccctgtgggcaaaagcagagaccaccctttggggcatacctagatgggtggcaggcagacagccactatctgtcatctacccaacccccacttacgtccttttccctccacatccctcatctttcaccatccctcccctcctactcaccttcttcaggtagcaggagtgggaggtaggaaaaagcaataaacttattaatattaaagatccaagccacaaacctttgcctctgtttagctttttggtttcagactctttttcaaggcaaaattttctcaaaattatctgctataaaaacaggaattcagagaaacatttacaaactctaaaagtagacagataccaccaccttccccatcctccacccaaccaggctgtgacagtaggtaaaatctgtacaccaaacaccaattcccttgatggtatttggatccatttccaattgagaagcagtcatctatcctttttcattagcttcgccttcactggtgagaagttagtgggaagtaaagactctggaggcctggagttgttgggttttaaaattttatgcctggagggtaagtccactgtagtaaatgcaaagttatttttaaacttaaagccatggaataccactacattatagtaaccagctattttgttaacctacattcattcatgtattgtttgtatgaatgttctgtttccagcataatggcttttaaaaattaaagatataaattagctattattagagaaacagcatgatagtaaaactcccctaaattggcataacaaaatattactaatagactctagaggggacggacagtctctaaagaataaacaaaccattgagtagagaacagaaatcccacccaaccagtaagtgctctatgctgatcttcaaacaatgagttcctgggtcttagcaataaccacaaaaacaactcaccactaaccgagtgcttactgaatctcatatgctttacatgtattactttatttttttcttccaaatgtcacttttgaagaagatacctttaatatttccactttacagatgatgaaattttaaaatgttaaataaattgcccagctagtaaatggtagagcagggattcaaacccactcttaatatatatactattattttgatccccagagcactcaatatagtgttgggtactttaaaaagaattaataaaatgttgagccatatgggggatgattcagccatattgtagggacagaaagcagtaaaagtgacccaaataccctatctttaaaatgtttgtatattttaaccatttattttccaccttattctttggtgcaatgtttgctgagcatctgctatgttccaggtactgtgtcgggtggaaaacaggaataaataatatacaaacccttttattaagtaattcagagttcaataaaagacttcaaaggaaaacagatcatttttaaatgatcaaactgtgtgacaggtggagtggcattagcagatcacagaggggatgttcgggactggctgctggcaggaggggacatctgagcaggtgagaggcagaggtgtgggaggaagacaggttaagaccttaacagacaagggtacagtgggagcactggcaggaaaaagagttgctggaaatttccagcaatttattgttgctgaagcaaaaggtgtgatgtcaggtgggtccctgatcctggagcggaggtgggatgcaaagcatggagacccttttaaggcaccagaggagggagagagattgaacaaacaggagaggtgggtgggtgagggagagaagagccactgagatcatcacaactcaaacaaaactaaaacaagtgtaatacatgtcccttgagttctcttgctttctcccattttctattaaaacatgtgcaaactagcaccttaacactttttgtaatttcatgacaaatgctatcatatttcatagccagcagatggcactaagtatacataaaatgaacattttgcacactgtcactttttttttttttctcttgagacagtctcactctgttgcccacgctgcagtgcagtggcgcaatcgtgtctctctgcatcatgggctccagcgatcctcctgcctcagcttcccgagtagctgggaccacaagcgcctacctcctacttattttaaaagagttcaatccaggctctactgttctcaagggacttttctccatactaggaactctaaaatctgacaatggtctggatctctgagataggcaaggcatcttgtaggtacagggtcctctcttctgccaggggctactgtgctgtagtctcagagggatttcatcaggggatcccagtaaggttgtaaaatgaataatgatcttggtggcaccacaccatctctgtgtagtgaggaaaacttatgtaaaactggaacgggtgaaggggtgaaactaggaaggtttcatagctgttagaagagggggaacaggattgggtgggtaaagccttcagctgtgaggcctgttgacatctatgaaagaggaagaaagcaggagagcctccagctgcaaaggacagctgaccagggcttggcttgctcagtgagcagcttcagagcaaagattgcctgatgaagcagttcagcattgggctgaaacagccaggccctacagtacccttctaatctggtttggctctgtccccacccaaaatctcatcttcaattgtaatccccataatccccacaagtcaagggagagaccaggtggatataattgaatcatgggggtgttttctcccatgctgttctcctgatagtgagttctcacgagagctgatgattttgtaagtgtttggtagtttctcctgcgttcatttctccttcctgccaccttgtgaagaaggtggcttgcttccccttaaccttttgccatgattgtaagtttcctgaggcctccccagtcatgctgaactgtgagtcaattaagcctctttcctttataaattacccagtcttgggtatttccttagagcaatgtgagaacagactagtatatcttccttgctcagtcattggctgggggttgcctaggaagaagaatgtggtccagcgtgaatgccatgcagatgctgatggctctacagttgaaggctgtcagttaactctgttccctgcagctgggcagcaggttctcagaggaataccctagaggttgtgtacttttgtggctgccacaccatccttattaaagaaataactctcatatgtatgatccccattgtatttcttaggtctgtgtgaagctgtgtaaacaggcttgctcttttcaatagctgaggtgctttttaaataaaattcatacgttcttggatatgattcaatccagtatattccatgaactggctttgcagcttcatctgaataatctcgatatttatatatgagttatatgtatctcttggatgaaaattttaaaagtaaaggccattatctatatgtgctcaaaggatataaaagaattttaatctcagaaaagcataataaggaagtcagtatatattttaatctcaggcaagcatactaaggaagtcagtagctgcaaaagctcctcaaaaaattattcgaagtcaaatataaataatcctattgctcttctggattacgaatacatcatagcttttttattaacatccaattcaaagttggtctattgtctggtggtattaaaatggatcacatgtgtagcccttaataatgcacattgacttggaacaccttgcttgatcctcataattctatgaggtagttattatcacctatgtacagatgaagaaacacatcctgagatatgtcaattttaatgcaatttctatgaatgacatctttttttcaaaaccctatgaaacacaatccagtaatttttaagaagctataccactccttccttacacaatatacaaaaatcaactcaagatggatgaaagacttgaaaactataaaaaacctagaagaaaataggaaaggccatggacataggccttggcaaagacttcatgatgaaaatgccaaaagcaattgcagcaaaaacaaaaattgacaaatgggatctaacaaaactaagaggttctgcacagtaaaagaaactaacaacagagtaaacacacagcctacagaatgggggaaaacacctgcaaactacacatctgacaaaggtctaatatccagtacctaaaaggaacttaaaccaacaagcaaaaacaaacggcctcattaaaaatgggcaaaaaatgtgaacagacacttatcaaaaggagacatgcatgtaggcaacaagcatatgaaaaaatgttcaccatcactaatcattagagaaatgcaaatcaaaaccacagtaagatgccatctcacaccagtcagaatggctatgatgaaaaagtttaaaaaaaaaaagatgctggtgaagttttggagaaaagagaacacttatacactgctggtagaaatgtaaaccagtttggccaccgtggaaagcagtttggagatttttcaaagaatttaaaatggagctatcattcaacccagcaatcccattactggatatatacccaaaggaatataaattgttctaccataaaaacacatatacacgtatgttcattgcagcattattcacaatagcaaagacatggaatcaacctaaatgcccatcaacggcggaatggataaagaaaatatggtacatatataccatggaatactatacagccatataaaaagaatgagatcatgtcctctgtagcaacacagatggagctggaggccagtttcctaagtgaactaacacagaacagaaaaccaaatactgtatgtgctccttataagtacgagctaaacattgagcacacatggacaaaaagaagggaataacaggcaccagggcctacttgagggtggagggtgggaggagagtgaggactgagaaaatacctatcaggtactatgcttattacctgggtgacaaaataatctgtacaccaaaccccatgacatgtgatttacctatataacaaacctgcaaatgtacccctgaacctaaaatagaagttggaaggaaaaaaattcattgcacaaatggaaacaataaaatctacaatttgaacatgtatttgaatagctagacgtgtcatcagaacaattcttggtgcttatttaagcacccagagctacctaaagagaacatgaggtttaagaaccactgatgaggaatcaaagccctactttgaagagtataaatatataagcattatatacatatatacacacatattttaaagaattataaaatgaacacttgtatacttaacaccaagaaattgaatattaacattgaagcacccagggcttctcctgtattgcattctttcctagaagtgatcaccagcctgttttgaattaactatgcctatgctttcgctgttttgccacactatatcttctataatattgttgtcttgtttgtttttagggcatatgtaaatggcatatatattgacatgcacactcatcccctttgatgacttagttttttatctttaacagtctatttgacattggttcccgctgacacttttgactgtagatcacattcactcatttacaatattactttgtatggaaatattcattttatccattctgttggtgggcctttgagttgttttcagcttttttttctcaggtacaaataatgcttccatgaagattcatgtaattggtttccttggtatatttgtaccaatatttctttagggtgaaactataaattgcagacactatataccttaaaacttattaggtaataacgacttattttctttttattattattatactttaagttttagggtacatgtgcacaacgtgcaggtctgttacatatgtatacatgtgccatgttggcatgctgcacccattaactcgtcatttagcattaggtgtatctcctaatgctatccctcccccctcccctcactccacaacagtccccggtgtgtgatgttccccttcccacgtccatgtgttctcattgttcaattcccacctatgagtgagaacatgccgtgtttggtttttggtctttgtgatagtttgctgagaatgatggtttccagtttcatccatgtccctacaaaggacatgaactcatcattttttatggctgcagtgagccaagatcgtgccactgaactccagcctgggcgacagagcaagactccatctcaaaaaaaaaagggagaaccaaggattttatatctagccaatctgtcattcaagtatagatgttataaaaaaagtttcaaatatgcaataattgaggaaataatagtaaccttctcaaatacaaaaagtttaaaagagaatcatatacagaaacaaagcaaatatagtcaaatacacataaaacttacaacaaaggttctcacattatctcacaaagcaaagacagactcaacttatgctacacagggaagacaaatacaaacagattcagaaaggtgaaaaatagaatgatggcatcagcatggcaggcaataccatttccatatgcaaactaaggaagacatttaaagcaaggataagaagcaaattcatggcctcaaaagctttatcaataaaaatgaaagagtgaaaataaatgaattaaattcttgacttaaaaatctaaataaataacaaaataaagcaaaaaaagtatactaaaggaaatactcatgagaagaatagtctattatatctacccctctgtgtatctattttgcgttttatatttcttctctatattctaggattccttctttcatttcctttttgttttcagaatttttaaattttaagttcagggatacatgtgcaggatgtgcatgtttgttacataggtaaacgcgtaccatggtggtttgctgcacctaacaacttattacctaggtattaagcccagcatacattagctatttttcctgatgctctccctccccataccctcccctgacaagccccagtgtgttttgttcccctcccagtgtccgtgtgttctcactgttcagctcccacttgtaagtgagaacatgcagtgtttggttttctgttcctgcattagtttactgaggataatggcttccagctccatccacgtccctgccaaggacatgatctcatttctttttatgactgcaaaatattccatggtatatatgtaccatattttctttatccagtctatcactcatgggcatttgggttgcttccacgctatcaaaaaagagctcatacagccaagacaatcctaagcaaaaagaacaaagctagaggcctcagcctacctgacttcaaactatattacaaggctacaataacaaaaacagcatggtcatggtaaaaaacaggcatattgaccaatggaacagaatagagaactcagaaataaaaccacatatctacgaccatctggtcttcaagaaacctgacaaaagaacttcaattaaccattcttttttttgtttgcttgtttgttattatactttaagttttagggtacatgtgcacattgtgcaggttagttacatatgtatacatgtgccatgctggtgcactgcacccactaactcgtcatctagcattaggtatatctcccaatgctatccctcccccctccccccaccccacaacagtccccagagtgtgatattccccttcctgtgtccatgtgatctcattattcaattcccacctatgagtgagaatatgcagtgtttggttttttgttcttgcgatagtttactgagaatgatgatttccaatttcatccatgtccctacaaaggacatgaattcatcattttttatggctgcatagtattccatggtgtatatgtgccacattttcttaatccagtctatcattgttggacatttgggttggttccaagtctttgctattgtgaataatgcggcaataaacatacgtgtgcatgtgtctttagagcagcatgatttatagtcctttgggtatatacccagtaatgggatggctgggtcaaatggtatttctagttctagatccctgaggaattgccacactgacttccacaatggttgaactagtttacagtcccaccaacagtgtaaaagtattcctatttctccacatcctctccagcacctgttgtttcctgactttttaatgattgccattctaactggtgtgagatggtatctcacagtggttttgatttgcatttctctgatggccagtgatgatgagcattttttcatgtgttttttggctgcataaatgtcttcttttgagaagtgtctgttcatgtcctttgctcactttttgatggggttgtttgtttttttcttgtaaatttgtttgagttcattgtagattctggatattagccctttgtcagatgagtagcttgtgaaaattttctcccattttgtaggttgcctgttcattctgatggtagtttcttttgctgtgcagaagctctttagtttaattagatcccatttgtcaattgtgtcttttgttgccattgcttttggtgttttggacatgaagtccttgcccatgcctaggtcctgaatggtgatgcctaggttttcttctagggtttttatggttttaggtctaacgtttaagtctttaatccatcttgaattgatttttgtataaggtgtaaggaagggatccagtttcagctttctacataaggctagccagttttcccagcaccatttattaaatagggaatcctttccccattgcttgtttttctcaggtttgtcaaagatcagatagctgtagatatgcggcattatttctgagggctctgttctgttccattgatctatatctctgttttggtaccagtaccatgctgttttggttactgtagccttgtagtatagtttgaagtcaggtagtgtgatgcctccagctttgttcttttggcttaggattgacttggcgatgcgggctcttttttggttccatatgaactttaaagtagttttttccaattctgtgaagaaaggcattggtagcttgatggggatggcattgaatctgtaaattaccttgggcagtatggccattttcacgatattgattcttcctacccatgagcatggaatattcttccatttgtttgtatcctcttttatttccttgagcagtggtttgtagttctgcttgaagaggtccttcacatcccttgtaagttggattcctaggtattttattctctttgaagcaattgtgaatgggagttcactcatgatttggctctctgtttgtctgttgttggtgtataagaatgcttgtgatttttgtacattgattttgtatcctgagactttgctgaagttgcttatcagcttaaggagattttgggctgagacaatggggttttctagatatacaatcattttgtctgcaaacagggacaatttcgcttcctcttttcctaattgaatactctttatttccttctcctgcctaattgccctggccagaacttccaacactatgttgaataggagtggtgagagagggcatccctgtcttgtgccagttttcaaagggaatgcttccagtttttgcccattcagtatgatattggctgtgggttggtcatagatagctcttattattttgaaatacgtcccatcaatacctaatttattgagagtttttagcatgaagggttgttgaattttgtcaaaggctttttctgcatctattgagataatcatgtggtttttgtctttggctcccagtattttattgaggatttttgcatcaatgttcatcaaggatattggtctaaaattctcttttttggttgtgactcagcccggctttggtatcagaatgatgctggcctcagaaaatgagttagggaggattccctctttttctattgattggaatagtttcagaaggaatggtaccagttcctccttgtacctgtggtaggattcggctgtgaatccacctggtcctggactctttttggttggtaaactattgattattgccacaacttcagctcctgttattggtctattcagagattcaacttcttcctggtttagtcttgggagggtgtatgtgtcgaggaatttatccatttcttctagattttctagtttatttgcgtagaggtgtttgtagtattctctgatggtagtttgtatttctgtgggatcagtggtgatatcccctttatcattttttatcgtgtctatttgattcttctctctttttttctttattagtcttgctagcggtctatcaattttgttgatcctttcaaaaaaccagctcctggattcattgattttttgaagggttttttgtgtctctatttccttcagttctgctctgattttagttatttcttgcctcctgctagcttttgaatgtgtttgctcttgcttttctagttcttttaattgtgatgttagggtgtcaattttggatctttcctgctttctcttgtgggcatttagtgctataaatttccctctacacactgctttgaatgtgtcccagagattctggtatgttgtgtctttgttctcgttggtttcaaagaacatctttatttctgccttcatttcgttatgtacccagtagtcattcaggggcaggttgttcagtttccatgtagttgagcggctttgagtgggattcttaatcctgagttctagtttgattgcactgtggtctgagagatagtttgttataatttctgttattttacatttgctgaggagagctttacttccaactatgtggtcaattttggaataggtgtggtgtggtgctgaaaaaaatgtatattctgttgatttggggtggagagttctgtagatgtctattaggtctgcttggtgcagagctgagttcaattcctgggtatccttgttgactttctgtctcattgatctaatgttgacagtggggtgttaaagtctcccattattattgtgtgggagtctaagtctctttgtaggtcactcaggacttgctttatgaatctgggtgctcctgtattgggtgcatatatatttaggatagttagctcttcttgttgaattgatccctttaccattatgtaatggccttgtctcttttgatctttgttggtttaaagtctgttttatcagagactaggattgcaacccctgcctttttttgttttccatttgcttggtagatcttcctccatccttttattttgagcctatgtgtgtctctgcacgtgagatgggtttcctgaatacagcacactgatggatcttgactctttatccaatttgccagtctgtgtcttttaattggagaatttagtccatttatatttagttaatattgttatgtgtgaatttgatcctctcattatgatgatagctggggattttgctcgttagttgatgcagtttcttcctagtctcgatggtctttaaattttggcatgattttgcagctgctggtaccggttgttcctttccatgtttagcgcttccttcaggagctcttttagggcaggcctggtggtgacaaaatcggtcagcatttgcttgtctgtaaagtattttatttctccttcacttatgaagcttagtttcactggatatgaaattctgggttgaaaattcttttctttaagaatgttgaatattggcccccactctcttctggcttgtagggtttctgccgagagatccactgttagtctgatgggcttccctttgagggtaaccggacctttctctctggctgcccttaacattttttccttcatttcaactttggtgaatctgacaattatgtgtcttggagttgctcttcttgaggagtatctttgtggcattctctgtctttcctgaatctgaacgttggcctgccttgctagattggggaagttctcctggataatatcctgcagagtgttttccaacttggttccattctcctcatcactttcaggtacaccaatcagacgtagatttggtcttttcacatagtcccatatttcttggaggttttgctcatttctttttattcttttttctctaaacttcccttctcgtttcatttcattcatttcatcttccattgcttatatcctttcttccagttgatcacatcagctcctgaggcttctgcattcttcacgtagttctcgagccttggttttcagctccatcagctcctttaagcacttctctgtattggttattctagttatacattcttctaaattttgttcaaagttttcaacttctttgcctttggtttgaatgtcctcccgtagctcagagtaatttgatcgtctgaagccttcttctctcagctcgtcaaagtcattctccatccagctttgttctgttgctggtgaggaactgcgttcctttggaggaggagagacgctctgcgttttagagtttccagtttttctgttctgttttttccccatctttgtggttttatctacttttggtctttgatgatggtgatgtacagatgggttttcagtgtggatgtcctttctctttgttagttttccttctaacagacaggaccctcagctgcaggtctgttggaataacctgctgtgtgaggtgtcagtgtgcccctgctgggggtgcctcccagttaggttgctgggtggtcagggacccacttgaggaggcagtctgcctcttctcagatctccagctgcgtgctgggagaaccactgctctcttcaaagctgtcagacagggatatttaagtctgcagaggttactgctgtctttttgtttgtctgtgccctgcccccagaggtggagcctatagaggcaggcaggcctccttgagctgtggtgggctccacccagttcgagcttcccggctgctttgtttacctaagcaagcctgggcaatggcgggcgcccctcccccagcctcgctgctgccttgcagtttgatctcagactgctgtgctagcaatcagcgagactccgtgggcgtaggaccctccgagccaggtgcgggatgtaatctcgtggtgcaccgtttttttagcccgtcggcaaagcgcagtattagggtgggagtgacctgattttccaggtgccatctgtcacccctttctttgactaggaaagggaactctctgaccccttgcgcttcccgagtgaggcaaggcctcgccctgcttcggctcgcgcacggtatgctgcacccactgtcctgcgcccactgtctggcactccctagtgagatgcactcggtacctcagatggaaatgcagaaatcacccgtcttctgcgtcgctcacgctgggagctgtagactggagctgttcctattcggccatcttggctcctcccccttaaccattctttaaggttctctgctagccacaaattattttaattttccttgattggagaatgtctatttccccttcattcctaagggaaacatccactggatatgtaattcatcttgacaatgttctgccacaaccttctggcctccttaatttcacatgagaagtctgctacaattcaagtcagttttgcctgtaggtgatgtgtcatttctccgtacctgctttcaagattttttcttttcgttttaaaagttaacttataatgtatcttggcatggatttctctgggtttgtcttacttgggaatggctcagtgtcttcactctgcaggtgtgtctttcaccaaatttggggagtttttagcaattacttcttaaaatactattcagccccactctctttttccattccttctgaaattttgatgatacaaatattaaatcttttgttactacaccataggtcccggaggctctgtcctttttcctgtgattttctctcaatttacattgggagatttctattgttctatctgcaagagcagtgactgcttcctcagtaatattcactccgctaccaagtccatttactgaattttaattttagttattgtatttttcagttctataatcaccaagttgttctttaaaaaaaaaaaaaattctgtggtgagattttatagccttttcatttgcttccagagtatttaaaactgctcattgaagtgtttttatgatgactgctttaaaacccttgtcgaataatccccacatcctattcatctcagtgttgacatttgttgtcttttctcattcaagttgttttctccattcttgctatgatgagtggtttttctattgtgtccagtacattttttatattatgttagagactgtggatcctatcttaaatttctatttcagcagacagtcattttgtttttaggtttatcacgcaagtcctggcctacttctgtgtgctatagttacaatgacagtttagttttcagagtctttgcaatgctagtgctattgtggtcagcttgattcatctggtgccctggtgctccgtctccaccccaaatcatgctgccgatgcaggaagaatgtatttcccatgtcctgttgccatgggatagagggtgagagacaccagactgtggggtagggggttggcagagggcagagggctctttcctagggtgcctagtcctagcagggcacctgttagatctccgctgctgctacctgcatgggcagcctccctggagggaatagtagataccagacccacaggatggagagcatttccctggaccctctttctgattgtcttctgccactggatggagtttcaggaggtggcagcctgtggtgtttttctgtgagttctgaggtacctaactagtctgcctttctatatagcattgggctgggattggagctacagttatgaaatcatgatttcatacacacacacacgtgtgcacatacgtgcagtgaaagggcctagaaacaaggacacactggtagtaataagtgcacataccactcaggtcttggtttccaaataccattctcctctaaaaggaaccagggctccttggaaaaaatggctgattccaaggctagcacaaggaaaatcaagaaaagcctggagcattataaatttataaagacatgtcaaagagacatccagcttaggaacattcaaaacggctaggcccagaactgatatttgtgtataacatatggtttttctcatatagatagactattccagcatcatttagtgaaaagtgacctgcaagacaatcttgctgaaattgctttgaatctgaacatcagctggggagaactgcattacatgaaacttcatacacataaatgtgttttatttttctatttatgtcttagaattattaaaataaattttcatacaaatactatatgtattttgttagattcattcagatcctatgcatttttcttcctaatacataaggcatatttttaaaaaatatgttttctgtttgttgccaaagaataaaaatgcaattgatttttgaatattaaacatatctagccatggtattgaattcttctaattcctaataagttgtcaattattttattctttctaggtaaatattgatactataataaattttccttctttctgtttctttccttttcctattatttacttttcttgcattactaggctagtttggactttatttttttttattttttatttttttcttttgagacggagtctcgctctgtcgcccaggccggactgcggactgcggactgcagtggcgcaatctcggctcactgcaagctccgcttcccgggttcacgccattctcctgcctcagcctcccgagtagctgggactacaggcgcccaccaccgcgcccggctaattttttgtatttttagtagagacggggtttcaccttgttagccaggatggtctcgatctcctgacctcatgatccacccgcctcggcctcccaaagtgctgggattacaggcgtgagccaccgcacccggcctggactttaataaaatgtgaaaaagcacatttatctttatcttgattttaaacagaacactctaaatactttattatcagtaagactaatgactgctgaagaattttactgggttgagaaaactgttatttctattgtgttacatgttttcattataaatggatgttcaattttatcaattttattttctgcatctaatgggatgatcataagattttttctcttttaatctgttagtgtgataacttacatttttggattttccagaaatgtctttggattcctagaataagccagatttatcacaagtggattatctttatcatatatatggctgttcttgagttactaatcttttatacttttgtgtgtaaggaatgcttttaatctaggtgaaattttgaatctatgctcacaaataagaatatcctttctcaaactatcctcatctggccttagtactgagctttagattatcttggaggttccatttcccttcttgtaatgattcttatgcctcatggcacacacaaagttcccctttgtaaatttcatatgagctcaattcaataattaccttgccaccaaaaactggagtctcccattaaacagtgaatttgcttctattgatgttaaactctaaactgaatcacttagatctaaaaataccttgtgcaggttgtgtgtaataaatacttacctttgccaaagacatacagagctagaaacagaaaataatacctaggaaggcttaaaaaacatgtaagctgaacatttggttaaatctcaacttttctctccttagattttttgtttctttgatattcttgaatttaaaacttagtcaattcatgttctttccagtctactactgaaaatattcttgaaaatgaagacagtaaattttcctttgagtgcagccttggcagaatttttttgatgtttatggacactcttctacttactgtcatttttcaatagtttgcaactgaaattctgaccttcttttgagttgtattaaattgctcaatttttctgaagtgaaagaattatatattacaagtgtaatgtcgatatgtgaatttctacaaagcctgcatgcctaacaacaggtggcctgggtaaagagtcaaattggtagaaccaataaagaataataaaaagacaaaaaaagcatcatgtcattcattcaacaacttactggacaaatctttctatattttcaccataaaggatgggagaatgcctccaacaagaagaaaatagcaactccttacattttgttctcttgtattgtgggtaggaacctacctcctcaacttgtaacatttccagacttatcctctcaatatataacatgaaaacatacagttcatttcttccgtcacccagggtggagtgcagtggggtgatcatggctcactgtaaccttcccgggctcaagcaatcctcccatctcagcctcctgagtagttgggatcacaggctcatgccaccatgcccaactagtttttctattttttgtagagacggggttttgccatgttgcccaggctggtctcaaactcctgggctgaagctctctgttcgtgttggcctcccaaagtgcagtgattacaggcgtgaaccactgtgtgtggcccagggtttattttttaatagaagtacatcacagaccagagaaaaagaatatcaactgtctcatattaagataatttaagagttgcactacctgcctaataacttattttactaggaaaccatggaggtaatatgggccatccatctgcatattagggaagaagccaaacaaagattaggttgtggctgagttcaaattagaaggggctgggagactgtaaggaaaatgttaaaaggacaaaagtaatagactctaaagttggaagatggccgaataggaacagctccggtctacagctcccagcgtgagcgacgcagaagacgggtgagttctgcatttccatctgaggtactgggttcatctcactagggagtgccagacagtgggcgcaggacagtgggtgcagcataccgtgcgcgagccgaagcagggcgaggccttgcctcactcgggaagcgcaaggggtcagagagttccctttcctagtcaaagaaaggggtgacagatggcacctggaaaatcaggtcactcccaccctaatactgcgctttgccgacgggcttaaaaaacggtgcaccacgagattacatcccgcacctggctcggagggtcctacgcccacggagtctcgctgattgctagcacagcagtctgagatcaaactgcaaggcagcagcaaggctgggggaggggcgcccgccattgcccaggcttgcttaggtaaacaaagcagccgggaagctcgaactgggtggagcccaccacagctcaaggaggcctgcctgcctctataggctccacctctgggggcagggcacagacaaacaaaaagacagcagtaacctctgcagacttaaatatccctgtctgacagctttgaagagagcagtggttctcccagcacacagctggagatctgagaacgggcagactgcctcctcaagtgggtccctgacccctgacccgagcagcctaactgggaggcaccccccaagagggacagactgacacctcacacggccaggtactcctctgagacaaaaattccagaggaacgatcagacagcagcattcgcggttcatgaaaatccactgttctgcagccactgctgctgctatccaggcaaacagagtctggagtggacctctagcaaactccaacagacaagcagctgcgggtcctgtctgttaggaggaaaactaacaaacagcaaggacatccacaccaaaaacccatctgtacatcactcatcatcaaagaccaaaagtagataaaaccacaaagatggggaaaaaacagagcagaaaaactagaaactctaaaaagcagagcgcctctcctcctccaaaggaacgcagttcctcaccagcaatggaacaaagctggacggagaatgactttgacgagttgagagaagaaggcttcagacgatcaaactactccgagctacaggaggaaattcaaaccaaaggcaaagaagttaaaaactttgcaaaaaatttagacgaatgtgtaactagaataaccaatacagagaagtgcttaaaggagctgatggagctgaaagccaaggctcaagaactacgtgaagaatgcagaagcctcaggagccaatgcgatcaactggaagaaagggtatcagtgatggaagatgaaatgaatgaaatgaagcgagaagggaagtttagagaaaaaagaataaaaagaaaagaacaaagtctccaagaaatatgggaccatgtgaaaagaccaaatctacatctgattggtgtacctgaaagtgatggggagaatggaaccaagttggaaaacactctgcaggatattatccaggagaacttccccaatctagcaaggctggccaacattcagattcaggcaatacagagaatgccacaaagatactcctcgagaagagcaactccaagatacctaattgtcagattcaccaaagttgaaatgaaggaaaaaatgttaagggcagccagagagaaaggtcgggttaccctcaaagggaagcccatcagactaacagcagatctctcggcagaaactctaaaagccagaagagagtgggggccaatattcaacattcttaaagaaaataattttcaacccagaatttcatatccagccaaactaagcttcataagtgaagaagaaataaaaaactttacagacaagcaaatgctgagagattttgtcaccaccaggcctgccctaaaagagctcctgaaggaagcactaaacatggaaaggaacaaccggtactagctgctgcaaaatcatgccaaattctaaagaccatcaaggctaggaagaaattgcctcaactaaagagcaaaataaccagctaacatcataatgacaggatcaaattcacacataacaatattaactttaaatgtaaatggactaaatgctccaattaaaagacacagactggcaaattggataaagagtcaagacccatcagtgtgctgtattcaggaaacccatctcacgtgcagagatacacataggctcaaaataaaaggatggaggaagatctaccaagcaaatggaaaacaaaaaaaggcaggggttgcaatcctagtctctgataaaacagactttaaaccaacaaagatcaaaagagacaaagaaggccattacataatggtaaagggatcaattcaacacgaagagctaactctcctaaatatatatgcacccaatacaggagcacccagattcataaagcaagtcctgagtgacctacaaagagacttagactcccacacaataataatgggagactttaacgccccactgtcaacattagacagatcaacgagacagaaagtcaacaaggatacccaggaattgaactcagctctgcaccaagcggacctaatagatatctacagaactctccaccccaaatcaacagaatatacatttttttccagcaccacaccacacctattccaaaattgaccacatagttgcaagtaaagctctcctcaaaaaatgtaaaataacagaaattataacaaactgtctctcagaccacagtgcaatcaaactagaactcaggattaagaaactcactcaaaaccacccaactacatggaaactgaacaatctgctcctgaatgactactgggtacataacgaaatgaaggcagaaataaagatgttctttgaaaccaacgagaacaaagacacaacataccagaatctctgggacacattcaaggcagtgtgtagagggaaatttatagcactaaatgcccacaagagaaagcaggaaagatccaaaattgacaccctagcatcacaattaaaagaactagaaaagcaagagcaaacacattcaaaagctagcaggaggcaagaaataactaaaatcagagcagaaatgaaggaaatagagacataacaagcccttcaaaaaattaatgaatccaggagctggttttttgaaaggatcaacaaaattgatacaccgctagcaagactaataagaaaagagagaagaatcaaatagacgcaacaaaaaatgataaaggggatatcaccaccgatcccatggaaatacaaactaccatcagagaatactacaaacatctacacaaataacctagaaaatctagaagaaatggataaattcctggacacatacaccctcccaagactaaaccaggaagaagttgaatctctgaatagaccaataacaggctctgaaattgtggcaataatcaatagcttaccaaccaaaaagagtccaggaccagatggattcacagccgaattctaccagaggtacaaggaggaactggtaccattccttctgaaactattccaagcaatagaaaaagagggaatcctccctaactcattttctgaggccagcatcatgctgatataaaagccaggcagagacacaaccaaaaaagagaattttagaccaatatccttgatgaacattgatgcaaaaatcctcaataaaatactggcaaaccgaatccagcagcacatcaaaaagcttatccaccatgatcaagtgggcttcatccctgggatgcaaggctggttcaatatacacaaatcaataaatgtaatccagcatataaacagaaccaaagacaaaaaccacacgattatctcaatagatgcagaaaaggcctttgacaaaattcaacaacgcttcatactaaaaactctcaataaattaggtattgatgggacgtatctcaaattaataagagctatctatgacaaacccacagccaatatcatactgaatgggcaaaaactggaagcattccctttgaaaaactggcacaagacagttttcaaaggaaaactttgaaacctctatcaccactcctattcaacatagtgttggaagttctggccagggcaattaggcaggagaaggaaataaagggtattcaattaggaaaagaggaaatcaaattgtccctgtttgcagatgacatgattgtatatctagaaaaccccattgtctcagcccaaaacctccttaagctgataagcaacttcagcaaagtctcaggatacaaaatcaatgtacaaaaatcacaagcattcttatacaccaataacagacaaacagagagccaaatcatgagtgaactcccattcacaattgcttcaaagagaataaaatacctaggaatccaacttacaagggatgtgaaggacctcttcaagcagaactacaaaccacggctcaaggaaataaaagaggatacaaacaaatggaagaacattccatgctcatgggtagaaagaatctatatcgtgaaaatggccatactgcccaaggtaatttatagattcagtgccatccccatcaagctaccaatgactttcttcacagaattggaaaaaactactttaaagttcatatggaaccaaaaaagagcccgcatcgccaagtcaatcctaagccaaaagaacaaagctggaggcatcacgctacctgacttcaaactatactataaggctacagtaaccaaaacagcatggtactggtaccaaaacagagatatagatcaatggaacagaacagagccctcagaaataatgccgcatatctacaactatctgatctttgacaaacctgagaaaaacaagcaatggggaaaggattccctatttaataaatggtgctgggaaaactggctagccttatgtagaaagctgaaactgaatcccttccttacaccttacacaaaaattaattcaagatggattaaagacttaaacgttagacccaaaaccataaaaaccctagaagaaaacctaggcattaccattcaggacataggcatgggcaaggacttcaggtctaaaacaccaaaagcaatggcaacaaaagccaaaagtgacaaatgggatctaattaaactaaagagcttctgcacagcaaaagaaactaccatcagaatgaacaggcaacctacaaaatgggagaaaattttcgcaacctactcatctgacaaagggctaatatccagaatctacaatgaactcaaacaaatttacaagaaaaaaacaaacaaccccatcaaaaagtgggcaaaggatattaacagacacttctcaaaagaagacatttatgcagccaaaagacacatgaaaaaatgctcatcatcactggccatcagacaaatgcaaatcaaaaccacaatgagataccatctcacaccagttagaatggcaatcattaaaaagtcaggaaacaacaggtgctggagaggatgtggagaaataggaacacttttacactgttggtgggactgtcaactagttcaaccattgtggaagtcagtgtggcgattcctcagggatctagaactagaaataccatttgacccagccatcccattactgggtatatacccaaaggactataaatcatgctgctataaagacacatgcacacgtatgtttattgcggtactattcacaatagcgaagacttggaaccaacccaaaagtccaacaatgatagactggattaagaaaatgtggcacatatacaccatggaatactatgcagccataaaaaatgatgagttcatgtcctttgtagggacacggatgaaaatggaaatcatcctcctcaataaactatcgaaacgacaaaaaaaccaaacaccgcatgttcacactcatagataggaattgaacaatgagaacacatggacacaggaaggggaacatcacactctggggactgttgtggggttgggggagtggggagggatagcattaggagatatacctaatgctgcatgacaagttaatgggtgcagcacaccagcatggcacatgtatacatatgtaactaacctgcacattgtgcacatgtaccctaaaacttaaaagtataataataatttaaaaaaatagaaaataaaaatgctactgttacgtgaaaaaaaaaaaagattgtaatttaccattaaatattctaaatacaaaagctcgttttcctctacatctgcatgacattagaaatttaatactccagcaaggaggtcagaaaataggacagggcgctgcccctgcacacctcaatatgcttctcctgtatgtgtagcaacaacttttatataccaccacttttctgtttcaaaaaacattgaagagaaatgtaagtgctgccaaagtaataagttaacaactatgggaaaaatttaagggaaaagaatcttaaaaaattaaaaaatcattctagaattcagctgaagcatgtggaagtttaaattgtccattctgcattactgagatgtattgggaaccaataccttttaccacagagaattatagtaacttttagataagaaaaaagaaacacaaacattttacctgaataataaaactgtaactgctccttttataaatgctatattggattttgatgaatctttgtataatcgtatataaattttcaagaacaaaattctaaatgttcatattgtttattaatgttatcataaaatactcattatgtactttgtaatcttacatttttcaaacaaaaattagttctgactaagatacagagtatagcacatgcactcaatgatacaaccctaaatgtgctcattaagacattttattccatgaaagccgtgactgaccagactgatatcacctcaaaaaaataaaaataacccaccttcctaggaattaaactgggaatgaatagcaaggggtgatgaagaatggtcagcttccatcacctaatctttgagagaaggcaaagtgtagagcaaagatacagaaatctgaatgaggaggaggttcctaaatccaaattcaaccccagaatatacttgtcaggttggtaagaaatcagaagttagcctgctccattctcaaggtttgtgccactccagtacactactatttaccactcttcaattagctttatctgagtgccacaaatatttgcatggacatgtgcagtgttctgtggttaaagagataaatatggcatggtccctgtttccagtggtacttttaaatacatataattggctgggcacagtggctcacgcctgtaatcccagcactttgggaggccgaagcgggcggatcacttgaggtcaggagttcaagaccagcctggacaacatggcaaaaccctgcctctaccaaaaatacaaaaactagctgggggtggtggtgtgcacctgtaatcccagctacttgggaggctgaggcaggagaatcacttgaacccgggaagcagaggttgcagtgagccgatcatgccactgcactccagcctgggtgacagagcaagacttcatccctaaagaaataaacaaataaaaatttgtgtatgtgtggatgattcataaatttactgtttcaaaaaacaaggaagaaaaacaaatgatttttatataaggcagaatctgccagggactagtaggtgaagaatggggtcctctgggagtttggaggagatagtgatcattatttcattcagtgagagttctcattagtattctatcaaatttatttctctgataaggctatttatactattctaccacataaggttttttttgttcatttctcagaccttttatatatctaaaatgcttataaatgtaatccctacaaaaaaagtgtatccaaaaaaaaagtttgaaatgaaactggttgtcctgttagaaacattagttgttcagaaatgcttcataaatatgtgaatatatgtactctttatccatctaactctgcatttcccaaattcgtttccacacagaacacttttttcatggcacattcatcaaaaccacaggttagaaaagaatgtcagagtacctaaactttgaagagaaaatgtaattgtttctcaaaaacttctgaatcttggcaaactatatacaaacacataccttttggtttattaaaatataatgtagttatctaaaacctgtagcctacactcttaaatggagagcaatttttacgtagcaattttgaattattttcttaactctatactcaatttacttttaaaataactaaaaaatggtcaatttggtaattacaacttcataggttgaagtatatatatataatatatatatttacatattttttttttagagggagtctcgctctgttgcccacgctggagtgtagtggcacaatcttggctcactgcaacctctgcctcccgggttcaagcaattctcctgcctcagcctcccaagtagctgggattacagatgcacaccaccatgcctggctaacttttgtattttagaagagacaaggtttcaccatgttggccaggctggtctcaaactcctgacctcaagtgatccgcccacctcagcctcccaaagtgctgaactgaagcatattttaagacacttaaattataatttatttgcctttgttttataaatcgaagttacctgagaatcaaagttaaaatatacatctgaagtacaaggaatggataggaaaaactttcacggagaggttgtgtccacatcacacgggtgacctgaaatcaacaaaatgcccactttacatcatgtttactacaacaaacatttaaaaaccaggggtgaggtttttttagtaatttcaataccaggctcactagatcccatttctgagtgtctggcatagcttctcagtttttgaagctctcttaacgcatgaggccattaagtagagagcaattaactaccatgtccagaaaccagcaacagatgtatcagaccgagcaaaatgaaacccaacggacaaacaagattgtacgtataagagttgtgagaattctgggactgaccaactagatccataggccagccctgcagtatgatcctggcacatgatcctggcatccgaggctttgggatatatgcatgccgagacaaacacctaaacaaatgtcacctaggtcattcgcaagcaccatgagagtttctatgtaacaagtatgaacgaatataaatacacactttgaatagctaagattgcctcagattttgtaaaatgtaccttaaaaaagttaagtatatattttaaaaacaactagaagtatttgggaactacaaatgtgatgcatgtaacgaaaagtattaaattttcacgcaaactttaaaattatttctaagacgtatgggtcagagtattagaaaaattttccatcaaaaattctgaaattctagaaagaatgtgaactcttattactttgcaagagtcttagaagttattgctcctcttccaagataccaaaattgtaaatgttggaagaggaattatgatacataaaagtcaacttataccaacagttgtctggcacactcaaagaaaaagctttgtctttaaatcagcacattgttgaatgtcaatgcatttgtttgctttaaaataatatatatggcttttatgtataatttttatgattcctttatctaactgatttttaaaaattaacccaacagcaatggataaaagtacctctaccccggccgggcatggtggctcacacctgtaatccccagtactttgggaggccaaggcgggtggatcacgaggtcaggagttcgagaccagcctggccaacatggtaaaaccccatctccactaaaaatacaaaaatttagctgagcatggtggcacatgcctgtaatcccagctactcaggaggctgaggcaggagaactgcttgaacccacgaggcagaggttgcagtgagccaagatcatgccacggcactccagcctgggcggcagagcaagactccatcttgaaaaaaaaatacttctaccctatgaaacctgtgtcataacttattaaatattttgctcccaagagctaggagtcagaatctctctctttttcattgccatatcctcagcatctaacagagtatggacatggtatataccaatattttgttgaatgtatccatcgtatttgaaataagcttctatgagctcttttttaggtggactatgtttcattgggctgaattagtaagttaatgtctattttgaattcagcattttgcattactgaacagacagcatgacgtaacacaaagaagtgagggagcaggtggcagtgtcttaaccgtgtccctgctgtcaggcctgaggcctctttcattgttgttaaggggagtgcaatgcatacaaagtttcagttaggcaagataaataagttctagagatctgctatacaacattctgttaacactgtattgtacacttacaaatctgttaagagggcagatctcatgttacttattcttaccacaataaaaaagttgaatatatatgttatacatataaaatatataaaagtttttataaaatataactataattttataattaataaaatataaattaatatatatgtgaggttttaaatggcagaccagacatagaatgggaaatccagcttcatcatgtagtaaatgtggaatgtggataagtaacttaattttctctaaatttaaatttcataacttgtatggtgaggctaccaccacccacaaaaaaagtttagtgggaataaatcagataatgtgcatgacgtgattcaactcaacaagtacagtatttccttttctctacagaatatatgtatatgtatatatttactaaaaataaggcaagagatttcatgtttgaaattctagctatttaaacattttgatcagcatgattaaaatatcaacttataacacaagggtctttaaaatattgtgaagtcataagtagtatacaattatatattgtttcgatgagtatatttctttgttcctctataaccccttctatttcttaaaaattgctttctagaaaacaaacctctccatggttgaaaaagcagcacagtactgtaataagacctcctagttgagtcccactgtaaaaaataataataataacagagtatacaatcaaaattcatgtaaaatacagtgagtttttcacaaaattacctcagaattttaaaccatagtttaaatcatatttaaaacataatagtactaaaccatacccatgtggttgatgcttaaatcctgaatgtacaatcgtaaaaagtgtacatataaattaatctcaattttataatttatcatagctaaaatactttctaaataaaatacataaggtgtgaacataaattttttttgagatggggtcttgctctgtcgcacaggctggagtgcagtggcgaaatctcgactcactgcaacctccacctcctgggttccaaatattctcctgcctcaggttcccaaggagctgggattacaagcgtgtgccactatgcccggctaatttttttacttttagtagagatggggattcaccatgttggccaagctggtctcaaactcctgacctcgtgatccactcgcctcggcctcccaaagtgctgggattacaggcatgagccaccgcgccccaccgcataaagtaatttttaagaaacaggctagcactttagagtctagatcacatcctttgaataacctgaataaaggcaaattcttatttttgaaattggctttaagggattgagaaatgaagacaagattcaaacagtttcatgtagcattaacttagaactgtctaaactactgcaaatattctttacttgagtcccagacaagcaataatgccgaatacaaaaatcagatgaaagataaaaaccatttcttttgttgttgtctttttgtttttttgtttgtttgagaaggagtctcgctctgtcacgcaggctggagtgcagtggagcgatctcagctaactgcaacctctgcctccccagttcaagccgactcttctgcctcagcctcccgagtagctgggattacaggcgcctgccaccatgcccggctaatttttttttttttttgtatttttagtagagacggggtttcaccatgttagccaggatggtctcgatctcctgacctcatgatccgcccgcctcggcctcccaaagtgctgggattacaggcgtgagccactgcgcctggcccaaaaacagaactttttttaaaaaaatagaatatttttaaacctgcccaaacaatctcaaagcaatccttttccctcaaagtactttaatgagcttatatttttctacacggcatatagaaaagtgcataaaatttctagattatagaactgtaaagggaacgtccatgtagtcaccatataattaattgaaatagagaaatgattatactgtcttcacttgccagcctccaagataagaatcagctactgacctgatttttgagattatcaacataactctttctatacacatatcaaactatgatttactttaatctgtttttaaacaacatacaaatggaagaatgc

SEQ ID NO: 170 - DNA, 187106 bp, Homo sapiens
  source 1..187106: mol_type = genomic DNA
gcagatggaagactgcatgctgttggccaagcataggtccaagaggaggtggtaaggaaacttgtgcagaagcttctcacaggacagagattagccagactggaacctgaaggatctggcgctctccactggctgccttggtgggcctcgaattcctctacggggcccttcacccatcaggtagtattgtaggggattgggccacagttctcctttgataatctctgcaattctgtcgaattctagaaggctgtggtctgaaaaccagttgaagaaactagggatagtgttcccttcccggtttctgtggatatgagcctgggggtcttggcctcggtgccagcggattggagtggaaagagacaccacccggccagaggatctgcgttcatattccttgacaagcccctcatttcggaagtaggggttgccctgaaagatgaacttgaatttgcagcctgctctggggtgtttaagctcctccacctccaaattgatcatgtacctcagcatgtcttcatcttggccactgatcataggtgacagctgggggtggtttcgaaaggcagtaacccagaaacctgggatattctggataatgaaacttctgcgctgcatgtggagccttcgcatgcggccaaacttgcgctcaagctgaaggaaggccctgtcagcctgggcatttacgtttgacaactcttgatcgatggcctccagtgagtccatgcagttattgatcttcggggccctgggccgtgtctcctctttcacccctcctgccacctttttttccttctgcactaccttcttttcctccatcgccgcccctgcttctccctccttttccactgctgccgagatggcgcgttttttagtcgtcacttccttggccttcttccccggtatcatctgagaccccaagccccctgcgccacaggcttctagagccttctgcccagcagggccacggggctctccaagctgacagccatttttctggctgctgtcagcagcctcggcggcagaggctgcttccagacctttcgtagaaggtggagcatcctcctgcccggctttggtcgctgcaccgccgcgactcccggcaactgggacgcggagcgcggggccacagtcgacaggatcctgggatgcacccccctccgcaacggtctccaggctgcccccacctgtgttcgccatcacctgtgtcgcctcggtttcttcacggagcccttggcactggtctcggtccggatctcctgaggcatggtcgggagcagccaggccgccggtttgggcgagagggagcttgttgcccccatccaggccgctcattttggaagaagtcagactagtgggagagggagagttccttgtcctccgcagcggccgagctctgcccgaaacgtctagcaccacccctcctttactctcggcggtgctaccatggcaactggtgatgtcagggcggtagcgtcgtaacatcgcgcgagaactctctgcgcggttgactacgcttatcaatccatcgtattcctttgtcttcttgtcacaaaaagaatttcgtcagtctggaaggggagttttacttacgtaaatggatgtagaccagactcaagcatgtaagaactgtgttaatgtggatttctaagcctctgaatgaatttctaaggcacctaacctattgtttctgaaaatatttactttaaggtgagttactgtctattcaagtcagttcatagggcttctcctgagtaggaaagtggattcacgaactcacaggccttccttcttttaaggtgtggattcatggctattaccaaagaatttaaatgagcagagtttgattttaaagagaagtgttgctgtgttgttatttttaaaattaaggagcagctgaaaggcaaacttctctcatcctaacaagacataataaaggaatatttcaatttgtcttacagattttaaagtttatataatttggccaacatctacaaaacaagtggacaatatttcctcttcacttttaacaaagagtagcaaaatgtttttccttacgtagaggtgactggcacacgagcacaaatttaggcttttaagcattactgaaagaaatatctcaggggattttaatttctaaactgatgcatatgttcttttcctcaggttacaatcttaatctaaaagtggttcctgcttcataatgcctgtggacatgaagctaacaaatcttttcaaaatgtgttcatgtggtaattcactgcagcacaggagcaataatcagctatgtgcaggcatctatgctactgtctcttaaaatactttaaaagtaaggttagttattgtctattcgagtcagttagctcttacaattcatttgatagtgattatcagtacaatatattagtttgttggagtgtgagaataatggtgttaatccttagaaaaatgcaagaccaaagggaaatttaaattttgcatatttatgtttaatgtcaaatttatattcaaataaacggttatgattataactctttgtaaaagaaactccattttaagccccccagattatgatcactttcaaatacaggctcagaagtacagatttagagaaaaaggattcctcttagaggaatacatcatatatactgagacttctagcgagggaaggagtgtagttctggttcaactaagataaagtactgatgaaaggtcactggcagacaatacggagaaacagcctgccttgcaggattttttgtatgcctagtcagcctacccaaggacaatgtgtccagaatgacctctttactgcctgccagctaatcagttatcccataagaaatatgcaaacaagattcacacagcagagagcaattatttttctctccctctttcctctttgtcttaataaacgctctttttttatttgtggggtgaaatcaatctattgaggtatcgtctttgtaaacacataaacagcgtgctataattgactttgtgactttgaattattgacactgctctgtttcttttccaaagaacctttgcactgttgaaagagtaacttttccattataacctgagtcaagatgaagagaagcagggaatactgaatgaaagttacttttccatgcagcaggaaaaaacaagtttgctactatacaaatttatagaaaagtataaaattacatgtgaacttctttttctttttgtgtgtgccaaagttttttaaagatttatatctctactactcaaagcattcccatctctagcctgtattagttctgtcacctgaatcatttttcactcataaccacctggccattctttaacactcagttcatgtagattgtactaggcagtttaaatacattagattttataaacaaagacccagtgagcacagagcagttaacatgcccatggtcacatatgtattaattggcagattgcctcctcccaccttattactttacctccttccttaattacttgccattttgacagtcttctgatttctgtatagcccttatgacttttactatccaacttagtacagttacgtttcactgaatgacagggattttgtcattatggaaacatcatacagtacatctatcaaacctagctgcaatagcctactatacacctaagctaaatagtatatcatattgctcctaggctacaaacctgaacagcatgttgctgtactgaatactgtaggcacttgtaacataatggtaagcatttttgtatctaaacataagaatgatacagtaaaaatagagtattacaattgtatggtcccacacttgtatatgcagttcatctttgaccaaaatgttatgcagcaaatgaccgtacttatttatcctctactttttaactttattggttgtttcattaaggtcagttttatcccagctagataatgactgcatagcagcttctgtagcatctacgacagtatagtccagttactatctcatagaatgttttaatgaatcttgattatttaagtgaaaatttaaatttaaataaaaattttaaaaaattttaccaaaatgaatagtatgactacccttgtgtttcattttgaggtgggtggatatataatagtagctatgagttatattttacattttttgcacattagaataatatatattttgtacacagtaaagtctattctactggaaattggcaataaaccttactaagcagaaaaaactacatcagtgacttatgattctatgggaaaatatcgatagaaaatgccatgaaaatctatgaggtaatttttatttgcaaggagaaaagatatttaatggaagttcaaacataaattaatacagtcaaacaggaatgactttactaaagtataaagattggaaaatttgtgaaatatcccctattgttacatctttgaccagcagtttctttttcagaatgatatagtttctggttcattatttagtgttttctatataccatatacttttatgtgcttaaatgtgtatctcatttaatttttacaaggaccctgtgaggtgatattatgacctccccttccctatgcctcagaagaaattgaggcaatgagaaataaagtggtttatccaagatcacacagcaagtggtagagccacaatctgaacgaggtaatctgactggagagcctgtgcactcattcaccatagtattctgcaaccttacacaacccataaaatgaaaagccaccttcttagaaataagactacatgaccatcccaatttaatgttgaactttcttctttatcttcttttcctttacctgtcttagtccattcaggctgttgtaacaaaataccatagagtgggtggcttgtaaacagtaacttacttctcacagttctgaaggctgggaattccaagatcaaggcaccaacagatttggtgtctggtgagggcctacatcctgattcttagactgtagtttgttgtttttttgtgttttgttttgttttgttttgctgtgtcctcacatgcaaaaaggagtgagggatctctctggggtttcttttatagtggcactaatctcattagggctctaaccagaggtctcttttatagggcaccgattgccccccagaggaccccagctccaaatactctcacattggggattaggtttcaatatattagaggggacaaaaacactcagtctatagcctgcccccatccataaaattagtgacaattgttgaggaagtgcccaattactaaagagaaacaagaattcatgattctgtgtttcaatgccttaacagttctcagctcatcagatataacatttattttttacttttattttatttttagatggagtctcgctctgtcacagccaggctggagtgcagtggcaagatcttggctcactgcaacctccacctcctgggttcaagcagttctacctcagtctcccaagtagctgggattacaggcacctgccaccatgcccggctaatttttttttttttagtagatacagggtttcaccatattggccaggctggcctcaaactcccaacctcaggtgatctgcccgccttggcctctcaaagagctgggattacaggtgtgagccaccggacctggccagatatttctttttataacgtgctttataactcccttttcctttcttgaaattcatattgtatatcaacatgcacattttttaaagtcattataataacttagttgtaatttttttgctttttttggtagggctgccctgaagggcagacaggtttattgggcaacagctgggaaaatcagcggttggacttggccacatgctccaagaaggccacacgtccttcttcttaatggcataggagttggaggagcccttggcagcattgatgagctcctctgccaggcactcagcaatggtcttaatgttccggaaggcagcctcacgagcacctgtgcacagcagccagatggcctgattcacacggcgaagtggggacacgtccacagcctgtcgtctcacagtcccggcgcacccaatgcgtgtggagtcctcccggggaccactgttgatgatggcgttcaccaggacctgcagagggttctcgcctgtgagcaggtgtatgacctcgaaggcatgcttgacgatgcacacagtcatgagcttcttgccgttgttgcagccgtgcatcatcatggagttagtaaggcgctccacaatgggacactgagctttgtggaagcatttggcggcataccaccctgcactgtgaggtaggtacttggcatatttctccttcactgcaatgtaatcctgcagggaaatgtcactgatgtgcacatcatcagtgctccacttcccaaagagcttgatgtctggggtctctgccactgctggtgctgctgtctcccactcagtcatcgtgagaacacagcctgagtgtctctgttgctcgacgtagaccatgcgccaccctggcacagacaggaagagcaaacttacttgtaatttaaaggaaaaataaaaggaaagtaatttttaaaatatctattttaaaatataaatgctttgacatgccagcactttacagcatgataaattagttaaatggttatacctgtagacttaccagtgtatgaaactactgatgcaactcgatataggtgtatggtactagagacataagcagcaatgctcttctgagatagattttctgaaattttgagcagctttatgataaagttctggaggaaaaggacaaaatttcttcaattcacatttatatctctttgattataagacacatcttttttccccacattttatttaagttcaggggtatatgtgcaggatatataggtaaacgtgtcactggggtttgttgtatagattatttcatcacccagatattaaacttagtacctatgagttatttttcattatcttctccctctcccaaccctccatccttagataaaccccagtgtgtgttgttcgtccatgtgttctcatcatttagctcccacctataagagaattcgtggtatttggtttcctgttcctgctttagtttgctaaagataatggcctacagctccatccatgttcctgcaaaggacatgatctcattcttttttatggctgcatagtattctgtggtgtatatgtaccacattttctttatctagcctatcattgatgagcatttaggttgattccatggctttgctatgtgaataacactgcagtgaatatagacatgcatgtgtctttatgatagaatgacttatattcctttgggtaaatacctattaatgggattgcttggccaaacaatctgtctgttttgaggtctctgaagaatcaccacactatattccacaatggatgaactaatttctactcccaccaacagtgtataagcattccttcttctccacaacctcgccagcatctgttttttactttttaataatagccattctgactggtatgagatagtatctcattgtggttttgtttgcatttctctaataatcagtgatgttgagctttttttttcacatgaatattggctgcatgtatgtctttcttagaaaaatatctgtccatgtcctttgcccactttttaatagagttctttgttttttcttgtgaatttaagttccttatagatgctggatattagacttttgtcacatgcatagtttgaaaaaattttctcccattctgtagattgtcctttcactctgctgatggttttctttgctgtgcagaagctctttagtttaattagataccatttgtcaatttttgcttttgttgcaattgtttttggtgtctctgtcatgaaatctttgtccattcctatgtccagaatggtatttcctaggttgtcttccagggtttttatagttttgggttttacatttaagtctttaattcatcttgatttaatttttgtgtatggtataaggaaggggtccagtttcactcttttgcatatgattagccaattatcccagtaccatctattgaatagggaatcctttcctcattgtttgtttttgtcaggtttgttgaagatcagatacctgtaggtgtgcagtcttatttctgggttctgtattctgttccattggtctacgtgtctgtatttgtatcagtaccatgctgttttggttactgtagccctgtattattgtttgaagttgggtagtgtgatgcctcaagatttgttctttttgtttaggattgccttgggtatttgggctctttttggcttccatttgagttttaaaatagtttttctagttctgtgaagaatgtcaatggtagtttaataggaatagcactgaatctataaattgctttgggcagtaggaccattataacaatattgattcttcctgttcatgagtgtgtaatgtttttcctttatgcatctccgatttctttgagcagtgttttgtcgttatccttgtagagaactttaatctctgtggttaggtgtattcctaggtactttatttatttatttatttatttgttgagacagagtctcactctgtcacctaggctggagtgcagtggtgcgatatcagttcaccgcaagctctgcctcccaggttcacgccactctcctgcctcagcctcccgaggtactttatttttttgtgtggctattgtgaatgggattgccttcctgatttggccctcagcttgactgtttttggtgtgtaggaatgctagtgatatttgcacattgattttgtatcctgagactttgctgatgttatcagcttaagggctgagactatggggttttctagatacaggatcatgtagtctgcaaagcgggatagtttgacttcctctctttggatgcactttctttctttctcttgcctgattgccctggccaggacttccaatactgtgttgaataggagtggaaagagcaggcatccttgtgttgtgctgcttttccagaagaatgtgtccagcttttgcctattcattatgatgttggctgtgggtttgtcatagatggctcttgttattttgaggtatgttctttcaatacctactttgagagtttttaacatgaaggagtgttgaattttattgaaggccttttctgcatctattgatataatcatatggtttttgtctttagttctgtttatgtgatgaatcacatcattaatttgtgtttgttgaaccaaccttacatcccaaggataaagcctgcttgatcatggtggataagctttttgatgtgcggctggatttggtttgctagtagtttgtggaggacttttgcattgatgttcagcaaagatattggcctgaaattttctctttctgttgtatctctgccaggttttggcatcaggatgatgttggcctcatagaataagttagggaggattccctccttttcattttttttggaataatttcagtagggatgatactagttcttctttgtacatctggtagaattcagctgtaaatctgtctggtcctggggtttctgttgttgttgttgttgttgttttggttggtaggctttttattactgattacatttcagaactcaatattggtctgttcctggattcagtttcttcctagttaagtcttaggaggttgtatgtatccaggaatttatccatttcttccagattttctactttatgagcatagaggtgttcataatattctctgatggttgtttgtatttctgtaggatcagtggtaatatcctccttgtcacttctgattgtgtttatttgaatcctctctctttttatctttattagtctagctaatggtctgttttattaatgttttcagaaaaccagctcctggattcgttgatctttgaaattttttgtgtgtctaaatctccttcagttcagccctgatttggttatttcatgtcttttgcatgctttaggatttgtttgctcctggttctctatttcttctagttgtgatattaggtttttaacttaagatctttctaactttttgatgtgggaatttagtgctataaatttccttcttaacattgccttagctgtgtcccagagattctggtatgttgtctctttattctgattagtttcaaagaacttcttgatttttgccttaatttcattatttactcaaaagtcattcaggagcaggttattcaatttccatgtaactgtatggttttgagtgaatttctttgtcttgatttctaatttgattttgctgtggttcaagagattttttgttataatttcagttctttggcatttgctgatgagtgttttacttccaattatgtgatcaattttagagtatatgccatgtgggaatgagaagaatgtatattctgctattttggggtggagagttctgtagatgtctatcaggttcatttgattcagtgctgagttcaggtcctaaatatctttgttaattttctgcctcaacaatctaatattgtcagtggtgtgttaaagtctcccgctattaatgtgtaggagtctacgtctctttgaagggatctaagaacttgctttatgaatctgggtgctcctgtgttgggtgcatagttaggtcttcttattgaactgaatactgttttgccattatgtaatgcccttctttgtcttttttttttttatctttgttggtttaaagcctattttgtcagaagctaggattgcaacccttgcttttttctgttttccatttgcttggtgaattttctccatccctttattttgagcctatatatgtcattgcatgtgagatgggtctcttgaagacagcataccaataagtcttgattctttatccagcttaccattctgtgtcttttaattggggcatttaggccatttacattcaaggttagtaatgacgtgtgtggatttgatcctgtcatcatgaagctggctggtcattttgcagacttgtttatgtggttgctttataatgtccctaatctgtgtacttcagtgtgtttttgtagtggtcagtaatgatctttcctttccacatttagtgcttccttcaggggctcttgtaaagcagatcaggtggtaacaaatttggcatttgcttgtctgaaaaggatcttatttatcctttgcttatgatgcttagtttggctggatatgaaattctgggtggaaaattcttttaagaatgttgaacattggccctcaatgtcttctggcttgtaggatttccactaagaagtccaccataagtctgaggggcttccctttgtaggcaatctgccctttctctctagccacctttgacatttttctttcatttcagccttggagaatatgatgattatgtgtcttggggatgatcttgtgaagtatcttactggggttccctttatttcctgtatttgaatgttggcctctctcactaggttgtggaagttctcatggataatatcctgaaatatgttttcccagttggttccattctcctcatctctttaagggacaccaatgagttgtagatttggtctctttacataatcccatatttctcagaggttttgctcattccttttcattcttttttctctattcttgtctgactagccagtcttcaatctctgagagtgtttcctctgcttggtctattctactattaatacccatgattgcattatgaaattcttgtagtgtgtttttcagctctatcagatcggctacagtcttttctatactggctattttgtctgtcagctcttgcattgttttatcattattttcagcttccttggattgggtttcaatgtactctggtagctgaatggtcttcattcctatccatattctgaatgtcatttaagccatctcagcccagttcagaacccttactggagatgtgagcccatcctttggaggaaataaggcactttggctttttgagttgtcagggttcttgtgctgatttttttcttatctttgtggtcttgtgttccttcaatctttgaggttgctgacctttggatggtttttcttttatcctattatatttgatgaacttgagcatttgtggtgtaaggtggactcagccaactggctgtgtttctggaagatttttatggggccagcactcagctcccaagtcctacacttcaagctgtaattctgggggaacttatattaggccctgactttgttttctggctcctcaaggttaggaattcactgtgttgggggaactgaggtgctcccggaccactgttcactacactttgatgggtggtatcagccaaagtgtttcatattgcagcaacagggggatctgtcttcgttcacatgtgccagcagcagtggtagtaacagctgcagcagagtgctagcaggtgccatgctagcaggcgccatgctagcaggcattcaccacagtggcagaggaaatgcagctgcaggggtggggagtggaaggagtggccccagatggtgactgtgtgcacagtcatgctggaggtggtgttgactcaggggtgggtcactgatgggcacaggtctgggtgccttttctgtgccctgcaagcaggagtgattgctcagggcagggaaggatctgctgttctctgtgtagtgttagtgcaagggtggggtgctggcagggactgggctggctggctctgtgcccaccaaggctctgtctacaatggcagtcagcagggggagtggagtagacagcactcccacatgctggtggggcagtgaaagcagaatctgcccatacagacgtgctagcaaagtgatgtggggagttggtgtgagcccaggggaagctgcattatgaggagagagcatgcaggctggcacatggctgtagtggccaccccactggagctccctgctggttaagcatggtccaccagcacagaaggtatggtgtgggcccccagggaacccgagaccaccctgcaagcaggaatggccaggctggggccccaggagaggccagcaaatcaaggggtgctcaagtcagacctgcccagtctgatggacaagaccactctgcagagttcagatctgacagttcccctagggttaacatctcctatgtgagcaagtcaagcctagaggggacagccttccctagttgtgctctgctacagatgctcccacatcaaaccctctgggttctgcatcagatggcttgctgcccctaccccttctctaattagctctctctgccaccttgagtgtccatggtggtcaaggggttcccttctgccagggttccagaggccgcgtgagagtaggttgctccttgccagttcaactcacccattcccttggagccagtggaagccaggaatgagtcctggtgtgcagtagccccatgcagggttcccagctttctccccttttaacccagtttctttttccacactttaacatctctgaaatgactatccatgatataatcaatggcatcttacaactgctaccagcagaacagcagtcatggtatactagtcatccaggaggtgtgaacttggctgttagtcttgccgacattattggacaactgcaacctcttgacgtttcaatcagtaaactctttaagagccatttgaggaaggaaaataagccttatttgttccctgaaaatattctgttgatatcttctggtaaagtcaagaaagtgccagcatcaaaacttgcagaatgagtactggaggcttaggggaaaaaatctcagaagcatactgttattagtagtagaacattctactaagatatgttgtcatcatcaaaattattcaagaattttgaatagtaattaagattactattataaatgggaaaataattagaatagtgaaactagtttatttcactcataatttactttgtatatatacctatgagtgatatatgataaaactacatttttaaaatcaaaaggtctttcaatatgtatacaataaaaatcctaagaattagaaagctttgtgtcagagtttaattgaaagttattttctttctttttcttactttctttcttagtgttaactaatggcttattttacaatcaatacttttagagcagatgaaataaatccttgtaaaaatacagcacatatctaaaaagtgcaaattttttgttttcatatgtgaaatactcatgtgccacataatgatgtttcatcaaatgatggatcacatatccaacagtaaaattatgatggagctgaaaatttcctatggcttagtgtcatcacagcctgagtaatgctgtagccctcataaggtcatagtataactcattactcatgtattggtggtaatgctggtataaacaaacctactacactgctaatcatataaaagtatagcacatacaattaggtacagtacataatacttgataaaacataaatgactatgttactggcttatgtatttactatactatatgtgattgtagaggatactctttctacttattaaaaagaaaacttaactgtaaaatagcctcaggcagatccttcaggtggtattccagaagaaggcatttttatcacagaagatgacaactcagtatgtgttactgcctctgaagaccttctattgggacaagatgttgaggtagaagacagtgatattgataatcgggagcatggctatgcctaggctaatgtgtgtgtttgtgtcttcatttttaacaaaaaagtttaaaaagttgaaaaaaaagaaaaaatattagaaaaaagcttataaattaaagatataaatatttttgtacagctgtacaatatttgtgttctaagctaagtgtcattataaaagactcaaaaagttttaaaaagttaaaacataaagtaaaaaagttacagtaagctaaggttaatttattattggagaaagaaaaatttttttataaacttagtgtcccaaagtgtacaatgtttataaaatgtacaatagcatattagtccattttcacactgctataaagaactgcctgagactgggtaatttataaagaaaagaggtttaattgactgacagttccgtatgcctgaggagccctcaggaaacttacaatcatgacagaaggtgaaggggaagcaaggcacatctaaccatgacaaagcttgagagagagagagagagagcaagccacatacttttaaacccccagatctcatgagagctcactataaaaagaacagtaaggaggaagtctgcccccatgattcagtcacctcccaccaggcccctctgacatgtaaggattacaatttgagatgagatttgggtggggacacagagccaaaccgtatcaagtagtgtacagtaatgtcctagaccttcacatgcgcttaccactcactcactgactcacccagatcaacttccagtcctacaggctccattaatggtaagtgtcctatacaggtataccattttaaaatattttatgccatctttttacagtagtttttctatgtagatatgttagttacacaacatatgttagatatgtttagttacacaaatacttgccattgtgttcctattgcttatagaattcagtacagtaatatgctgcacaggcttgtagcctaggagcaatagactataccatagagcctacatgtgtagtaggctatagcatttaggtttgtgtaagtatattgtatgatgtttgcacaatgatgaaattgcctaatgacacatttctcagaatgtctcattgttaagtgaaacatgactgaactgctatgttctagacttaaaaaataatgaatttttcatctacatgaatgttttgagctggaaaattattttatatagggcactatccctcacattcacgatgtctagcatccctaatgcccttaatgaataccagctgcagccctattcatcgtaataaccaaaattactactgaaaatttcccaaatatcccctagagggaggtatgcatatacattgagaatcaagttttctaaatgcctgtagctgtgatattcccattcctggtcactagagggaggaagtagtctttaggatgatagtacgattctgttttgtctgccctcaaagttcaagtttaagctgatatagatcagcttggcaaaaatagatcatatttcagtaaaataactgtggcatagtttctcacatatgtttggtactctttattattacaatggaatcacatttctattttatttaggctatcactgttacaaaagtaatattttctcaggctaattatctagttatgatcactgcctgtgataatactttaaaaaaaaaaagaaaaaaaaaaacctcatatgctcctgctttcaccagtcttaagagaaaccagagacaaaggctctgacctgaatgaccccacacctttgtatgctggttaaagatgcaccctttgaaatcaaacagatctgacgtcaagtcccagttctgttacttactagctgtttaatttaggcaagtcacttcagctctctaagccacaatttactcatatacaaaatgaatataataaaacaacttacagaattatcatgaaggtgaaatgagatatctgtgaagtgtttttcacaatatgctttcaataaatagaagctgacttgctcatttttattatttttatgctaagaattacattaaataaacaatattgtaggcagtataaaatcaatgtcaaattctattatgaaactgtaattgtataaaagttgagaaacaaaagtcatccatgtaaaataagtgaaaggtttgtggaagaaaagaagagttgaattggaccaagtagattggataccatttgaataatctgaggaagtcatgaaacactagcacatagtaataatgcttgtccactatgttacagttaattcctaatgattctagacatatggtattttgggctgatagggaaaacaaccctttttgctctaactaaagtgctttaccacattcttccacatatcactttaaagactttataaaatatattaagaaaaaactagatgcatgaaatacatacttttaatagctgactttaagcagacttggttgctcaaagtcacattttctgtgaggaacatacagtctgtatttcaaaccaagtttgacctgaaaatctttgcttataatagactaacacattcagttcatcaatattggatcaagactggaacacagccactctctgaaatcacattccaattaaacatctaccatgctaagaatgtaagatataaagatgaagaagacacagtcttctgctctgatagagttatactttagtaaagaagagctaaatacaaataaatagagagtaaaaaatttctgggaaaagaaaacaattctggaaaaacaaggtactgaaatatgattacaccttgtaaacattctatttctgggagctgcaaggccaaaaataagcaagccccactcttgcctaatatactcagtgctcaatgctcaccttgaaattacatttccctcattgttgatgaaattgcagaggagttatcaaaactgacccaagagaagtttggccattaagcaaaatggttaacaacaagagcatgttgtaccatgcacctgtttttaaagccatctgaacacaactcttaattgtattgtccaaggttaagttggagtttggtgaagaggatgataattaagtactacatgcctcttataagtaatcgctctattgactaaacctcaataaatatacattatttatttactagtgatatcaatagttctttacatctcagcagccaaactccagaagaatattaaaatatttgaactgctttggtccattctatttctctggaaagtacaactaagcaatttaattcaggcagtagatataaaaaattacatttttaaagacaggatacagttatctgataggatttggagaccttctattgtttaacataaacatatcccttttaaaagctacttgtgaatgaattaggaataactttcaactaagatcaagctattcaaacttaattaggattttagatatatttttatggcaaatttagttacaagctgcttcaatatggtgcaaagtgtcttagctggaaatgagaaaccctaattgaatgcagcccatgttaccttcgtcttggataatacacttctctttcctgagcccctatttccctatccattaaatggagatagtgacactgcaactacaaaatgagagcatatatggaagttactgatatatctaataatttgttgagattgtgaagacagagatatgtacttgatgcagaattagatatccaaagcccaaattgtgaccccacagggtagggaacttatttgtgattaataatataggtaaatgtcttgttttgctttattttgtttttataatggtaacaattaaggaaactgaatcaactggagatgaagcagaagcagcagctgagtttaggacaatggttcccaaatgattgatagcaggcattagaatcacttggcacattggttaaaaccggtttctaggcctcaccttcagagttctgtttcagtagctcatgggtggggttcgaaaatctgcatttctaacaagatccaggtggtgcagatactgctggtctggagaacactctttatgatccacagctttagggtaatggaaaggagcagttggagctgaagaagtcagagaaaagcatcttgtaagcatctaaatggtcagaaatggaaaaggaagctcagagagattcttgagagggccccagggaatgtcaatcctatttacaggacaatatgtcctaagcagacttcacttcaatgaccagaggatgacagacctcagtttgtaaactaagagaatcttgagaaaggtcaattttggcctggaattgaaagagaaataagtttttaaaaaggaatttcattattagaattataaataaaatcatgcaacagtaagaactcacaaataagatcttgtaagtagagtcagcaatttttaccaccaaggaagagaagccaaaagactggagatgggcaaatgaagttctattttttaaattatcaataatattttaaaatctatttattgaggtataatttacttacactaaaatgcataaatcttaaatatatacttggacaagttttgaaaagtggatacacctgtgttatcacccaactcaagatatggagcactattacccctgcaaatgtcctcaagctttaccgttactcccctcaaccttgaggctaccattcctgggatttctatcaccataaaaaagttttctatgctagtgaatttcatatacatggaatcatataatatatattcctttgacatctttcacttaacatgtctctgagattcatccatgttgatgatcaataggttgttcctctttattgttgagtggtgttccattgtatgaatataccataatttgttcattcactcacttgttggtgaacatttgggctgtttctagtttggggctgttataaataaaactgctatgaccattcctgtgctacatgtaaattatactttattaaagaaaacaacaaataccaagtatctattaaaacatctttggacactttaaaagagcaaatagtgatcaacagaagtaaagcatatcactaagaaatcatttccttttttggcaagggaatttcaaagacagacgacacctgctgttatgaattttaaagacctcttttgttgaattcaggttaattccattctgcaagaccacaggggggaaactatgaaatagatatactgaaactctacgatataccaggctctttgcaatagctggatgtttataaggtggcaaatttgaatcaatttgacaaaactgggaagggagtatgtattccctaacttaaggagttcaagaaaaggtaagccatgattctcaaactcagctgcactttaggctgtaatttaattggttcagggtagagtcttggcatcagtattttttgaaagctcaaagctatatataatgatcagccaggtttgagaaccatgaagctagatgactatttgtctgaatgtaaattaaatgagaaattaaaattgagaggaagacaaatggaaattttaattgattgcatattatatgctagacatgatgcttgctgtctaacctctatattataactatattaatacttgaaatctcttagcacagtgtcaggcgcaaagtaagctctcaaatgtttctgttgttatcttctctgtaaccttataatgcagtctccaaatgcatcctaaaacattagcttatactgcaagttttatcatccctacattatggataaggaaaccaagattcagagtagtttattttgggaaatgcaatacatggtaattgtaaaaccgggatttaatcctaatttaaagctagtatgccttctctgcccatcaggtcatatctaagacatataggtgttcacaaaaattagtaacttacttaaatgaccctttcctttttaattgaaccatttccttttacctgttctcaaagaaattaccttaaatacaaatcctaaaaaaagtgaagccaaaaagtagacatccacatttttcctaatgtggcttgatagaaactcttctataggtcttgacaacctctgaggtcagagagaatggattaagatggcccttcagagctcaaagcacttaacatggagaaagtactgcttccaagtaaaacacctcccataataataaatgcatagagagcatacctgtcacttctatatagtctaggactttaattatataataatgttgaaggaaaggaagtcagtcctgagggggatggtcaactcctctcagccaggctggtcctctctgagtttgcttgtgtgcagtagatgttttgaatgtgtgtatttgctgcagaaaaaaaggaaacattcaaggaacggtacccccctcaatgagcctgagttcctcaagggcaaagacaacctttactatcccattcaatccttacttatgctagtattcaataaacaactactgcaagattacaattacagaccactaattttcaaaaagtatgtttttttgtttttttttttttttgagacgaagtctctcttgtccccaggctggagtgccatggctcaatcttggctcactgcagcctccacctcttgggttcaagcgattctcctgcctcagcctcccgagtagctggaattacaggcgcctgccaccacacccagctaatttttgtaattttagtagagacggggtttcaccatgttggccaggctggtctcgaactcctgacctcaggtgatccagccgcctcggcctcccaaagtgctgggatttcaggcgtgagccaccctgcccggctgctttttcaagtagtacgcgttcattgaactgacttaatgcagagctagactcagatattttccttttctgttgctagccaactgttaaaatacgactgaaaatattttctgaacatcatgtacatttgtaaactaaaaatagagcatttggccgggcacagtggctcacgcctgtaatcccagcattttgggaggccgaggcaggcacatcgcctgaggtcgggagtttgagaccagcgtgaccaacatggagaaaccccatctctctaccaaaaacacaaaattagccgggcgtggtggcgcatgcctataatcccagctactggggaggctgaggcaggagaatcgcttgaacccaggaggcagaggttgcggtgagcggaagcttgccatgagccgagatggtgccattgcactccagcctgagcaacaagagcaaaactctgtctcaaaaaaaaaaaaaagagcattttactttagaaaatatgcatatattggtcttaaaagtcactaaaaattaaaccaatataactgtgtcaatttggcatcaaaatctaccctgcctatatcaagaaagtgttgcacagtacattttgcaaaatattcagtgcatcttaagtactcaagaacagttcattaaagaaattttactcaccttctttttacccattggccttgaatttaagcaagataacccttatcttagtcacaagaagcttcaggaggagaaagtattaacatgtttaatttttacagatattttatatgctttcagatattcctcaggaagtcgagacatgctgtcctatgtaattttagatttactagtagccacattaaacaatggcaaaatgaggataattaatttttcaatatattttaacacaatgtcaaaaatatttcaacatgcaatcaatatgaaaaaaattgagatattttaacatttttctttccatactgagtcttcaaaatccagtgtgaattttatatttatagatctcaattcagactagccacatttcaagtgctcaatagccactggtggctaaaagttactgtattggacaacacacatctagagtctaacccccttctatctccagtataatcaccttaaaatgtacaaagtatataaaaggtaacccaaaattaagtagtgctctgttaaaatgcaagtgaaagatttaatgttgaaagtgtttagacgttttctaatgactaaaaggggaaatagttatttaggaatggcattgcaaatctttttgacattttcccatttgctcattaaatctttctgagaactaggttattttgttctttttcctccatctgagttttgtcattcaatatttatctgctgacaactatgcaaaacattatgctagatgggctgggtgcggtggctcacgcctgtaatcccagcactttgggaggctgaggtgggctgatcacgaggtcaggagatggagaccatcctggctaacatggtgaaaccccatctctactaaaaatacaaaaaattagccgggcgtggtagcacgtgcctgtagtcccagctactcgggaggctgatgctggagaactgcttgaaaccgggaggcggaagttgcagtgagccgagatcgcgccacttgcgctccagcctgggcaagagtgggactctatctcaaaaaaaaaaaaaaaaaatgctagatgcaatgaaccatgtaaaatgcactgcatctccactttcacaaagtttccaaactactgagaggaaaagagtgaacatgggaaaaacatgaaaatataatctctgtattttattttactgtatcactctgttaattctttgtttgcttatcagtccttccccagttccccaaagaagggaatggactttatcttcttactctttttctctatttgtggaattcactgtaatgaataattatgttaattttctagaacagaggtccctccaaagtacactaagtgcataaagaaacatttatctcctctatggggaacagaaagactttggcagaggaattaccaagggcaggccttgaaggatttgacagaagagaacagtgaggaagtttaaagaaaaaaaggaagtttttacagatgagaaagtatgaaaatagaggagtacatcacatatgataggtactccctgcatacaagttaataaaaagaagagcctgaataacctgagaatataatttatggagacagaaatggaggatttgagcaactgaaggggaggttgtgctgcataaactacatggaaaaaagtgattgagtaagcagttgcaactgctaacgttttaaggcaaactaccttggaaggtaccaaacataccgtgccctgctttcttctctttgggataatgtctattgtgtccatttaaggactttaatgattctgtaatttttagttaacatcaatttaaggactttaatgattttaatccattaagaactttaatgattttaatccattaagaactttaatggattaaaggactttaatgattccataatttttaattaatatgaacaacttcattcaagcattacatttatgggtaaggtgaaaaataagaaatctagcagaacaacatgcttttattttaccatcatgcataaaaaggaagacaaatatgccaatggtacacttccaatttgtcagagcaatttcacagtatttaagcaatttaggaaaaaagatatatcacttactaagttgttaccagggaaaattatcatgtaagacaatcaattaaaccatacttttgtagattatttttccatgaaggcaatttgacaagcctaacaaagaccaagttgttcaaactatgtttctaggaatatagtttaacagaaacaagaacaagttgaaaactgttatgactattcatatgtctctatattgtacaggcaagtaagactgttgttcttccaaatgttcccaattgaaatcaaaagaatatctgtacagctcaattttcacaataagtttagaatcagaaaaaaaaattttactaaatcctaatgaaataacaatcttccacataaattaggtcacaaaacaagtaagaaagcattcaaagttgcgctgtctttctttaaagaacccttgtctaggcaacatatttaacactttaaccccttcaattctccctgaaaagtatttttccattcatcatcattggggagtaagtactccttcctcgaaagctcttaacgacagcacagtcttcactctaggcccaatttttacctggcccatgcctctagccttttgttcagtttctcctgcttagggcacctttcatcccatctagatgtgtctctctttaactattctaggagttgataaaagggctaggaagtaggaagttgggaagaaggggaggggcgtaagagctctagcactctattttacaggccaacttctttgcctctgaaaatgacagagccaaaatgaaataaaaaccttgcttttacaaatgtttctgagctatcacttttttaagagaggattgggaggctaaggagggcggatcacgagatcggggttcgagaccagcctggccagcatggtgaaaccccgtctctactaaaaatataaaaattagccgggcgtggcggcgcgcgcctgtagtcccagctactcgggaggctgaggcaggagaatcgcttgaacccgggaggtggaggttgcagtgagccgagatcgcgccactgcactccaacctgggcgacagagcaagactccgtcctccgtctcaaaaaaaaaaaaaaaaaaaaaaaaaaggaaaacagggagagagagggaccttggcaggagccaatgtagggcaggtagcaatagaaagtgactagaggtgaaggaagagcaatgaagtaccataaatcacacagaacaagtggctcactgcttttctcctctgagttcattaacgtccagtaactgtccacagggcatgtgcccatactgctcaatgcagagctgagtaggtggaacaggctcccaaagctagaaatccaagtgacagcaaccagttcagaggccctgggaataaacagggtccaagcagtgcagataaaggcagtacaatctacagtatcatttgcttggcttacaagtagtgtgaaggatgacctcgtagcatgtgatattccagaacagcatgaaggtcatatggaagtggagaagcatacccaccaccgtctcaatcttgaggttgagagaactgaatatccaaaggaaacagggtgcagaaaagtcagcaaaaacaaagcacaatagaaggcatactcattgctgatgcccaagcacaggtccagcagaaggtggtaggagaccttgtgcaggagtattcccaagggcaaatgttaaccagactggaacccaaagggcctggggatctctacaggctcccttagcgggcgacgtcgggctctacggactccttcacgcaacaggtagtattgcagtggatttggccacagatcctctttaataatctcagcaattttgtcggactctggaaggctgtggtctgaaaaccaagtgaagaagctgcagatgaggtcttggtttctgcgaatgaaggactggggttcatgccccctgcgccatataattggagtagaaagagacaccactcggccggaggatcttacctcatattccttgacaatcagcttgtttctgaagtaggggtttcttctaaagaagaacttgaacttgcaaccggttctagggtgtctgagttccttcacctctaaattggttatgtaccttaacatctctgcatcttggcccctaatcatggcggacaactgggggtggtttcgaaaagcagtcatccagaagcccgggatattctgaatgatgtagttcctccgctccaggtagtgtcgacgcatccgcccaaacttgtgctccagctgttggaaggccctgtcggcctgagcattcacagtgtccagttccagctggatggcctccagagggtccatgcggagagcctcatgcaaaggccagggcccttcttcctccctcgcctcctcctccaatctatcctcctccgccacttctatttcttcaccttctggcggctgctcctctacctccatctgctcctccattacctccttctccgccaggccttccttcaccacctcagcgctctccctctcagccacggctgctgagacggtggcgcactttcctgtcttcacctcctccgcctcagcctccgcccccgccgtcagctcagacgcggatctctgggcgccacagatttctagggccttctctccaccctgaacgccctttttcaggctgcggtcggctgccatcaccacagaagcggctgccaggccttcggcgggaggctggccctcttcctgcccggctttgatcgccacatgaccgcgacccccaacaactcggatctggggagtaccgccacggcccgcggcatcctggggtacgcccccctcctctgaaggcggtggaggcgggagcgcgacggtctccgagcctccctcacccggctccgccatcacctgtgtcgcctcgctttggtcgcggagcctcaggtactggtgtgcgtcctggtcgctcgggacttggtcagaaataatgatgctgtgggtttggaggggagtggtcctcttgaccccatccaggccgctcatgttgctaacagtcggaccaaccgcaggcgaacgcccgttttcctcagaggccgaactgggagctaaccgccgctcgcaccgcccaccctacagtctcactaacatttcagcggcggtgtcgtcaggactggagatctcacggtatcgcgagaacttgctgagcccgggattggttccgccgctccctgccagccaaccggattctctgggctttatttctgtgaatttacccatagcaacagtaattttacctacgtaaataaatgtcgattgtgctgagtctggaagcgcggacgacccaccttgagatgcatctagcgactgctcccagcatgtaggagcagttgtaaaatcacagccgtaacagtgcctgctctccagtgtctgaaaacaaatgtttttctggtcttcacttttttgaggcaggaaggtaaatctattccctgttactccacgtaactagcagcaaaagacttctctttaagattaatagcaaaatgtttccccccttcttagtaaaagtgacataaaaatatcaattcttgcctctacggttactggggaaaaaaagctactcagcagcctcttaccactaaagcgatgcatagtattcattgctaattttcgatttataatctgcatcaaataagagtttgtgctgcatagtatcggtagaaattaagccaggatcagtttgctaaatgttccatgccttttcactgcaagaaagaggaaattataactatttccagccccaagaacttaatttattatcatatttagttatgtaagataggaatgtttggctctaacgaagcatctgtctttagcaatcagctgagttcattagagggggatgtcaatgtctctggttgaagtgttccagtttgttgacttgtgagttaaactggtgctgtcttagagagctacaaggcctcagagaaatatcagtggggggagccacataccaccattttgtgaggaaaggctagttaaaatggacaactaagatggccttgaagtagaaaacaaacttgcaaagggcaacatgcagctggtggactcaaggtataaaagaggcaaacgttattttctacttaatttgctttgtgtggtagtagcctgatggccctcaaagatgtacctgtcttagttatgcggccaaagggacttcgcagatatgattaagttaaagatttggagatgagaagatgattctggattatacaggtgggccctatggaattacaaatttcttataagaaggaggcaggagggtcagtcagagaagataagaggacgaaagcacagagagagggaaggaatggtggagaataggtgtgggagggaggaaagggaaatcgctatgttgctggctttgaagatggaggaaggagccaggatcgtaggaataaaggcagcctctagaagcttgaaaggtaaggaaatagattcaatcctagagcctccaaaggaatgacaacaccttgaggttattacctctaaactccagcactataagaaaataaatttgtgcattttaagctattaaatttgtggtaatttgttacagaagcaatatgaaatgaatacaccttggattaaggtttggttgcatctatgggtgcctcaagttgtttctaatagcagccccttctaccttgctcatggcttcccgtgagttcctgcccaacagctgtgatgtattacagcttgaatctgtctttcaatatcaagaccagaaatatacttaggcaaatgcacagaaagacaaaattaaagcctaaacataccacaaacgatatctgaggagactgtaaactgcaagaggacatgatcatggtttcgtttccctctgtttatcgagtgcctagcacactaccttacacagtatcccatagattattaaaatgttaaataaaggagcaaatgagcagaaaacagtttctcttgcttgcaacttgctccttgcggaagagaagtaaggggcatatgggttgtcactctgctctccttcctatctgccactggcaaaccagagggctgctctattctatatagtaacagtttcctactcaggagaatgaatttctatatatgtttcaaaggctctaaaaggataggaaaaacacagagaaaacaattttattttacaaataatttaagtttgtgtggtcacactgtatgacaaacgaactctgaaaagaccagcatatttaggtgagtttacatatcaaagcctcggactaccagcactgtatttccaattctctcctttctgaaaaagtcaaggtaatcatttcaggctttacttcgtttctgtctacagaaatatataatgcatttctctctacaagtgatggagcctgtgatgcatggctggaattacttttggtgtaaataaaaaggaatattggaactttccacaaagactgtttctaattgccatgaaatcatcttctattttgaactggtataatttcattcggcctaaagtggaaacttctattattccaatatgtctcctatttttttttaagcagaaaggagtgtcaggcttggaccaatcttagaatatatggctttatttgtcaaagaagccattatgtaattaatgtaattaacactcttaccagtaatgctaggaaaactctaattaggatcatgtaagtataatcaggactctgctgaatgtaatttcccccaaataacgttgagactctttaaaggaactcttccttctcttcttgtcgaacatgtataaagctgtgataaggaatatttgaatatatagagaacgtgatttaaaattagaagtaatgtatctcatgttctctgtgtattagaagaaaattacattagagaagtgattgtgattataactattccttgtaggtgatggaaagctcaggttatgattgctttcggacaagtgctcaggagaagggtcagtaaagggcaaggattttagagggaaaagcaaatatgcatactttatgtcctatttttttttaaagaaagaatctttgcttggaaggaggaactctctaggaatgtcaacatgcaccaaggctcacgtgctcagggagttattttgccatacaggcaaagctgtggttgctattcaacacagaatattgtacttattatagtaggactattacttgtggattttttgttcacctttttgtatctaaaaaggcttaaaaaggatacctgtttcttttacatgacacaggttatcctgctatctgggaattctctttctgggtagatgttacacattctctaagacttaccaaaaacctgtcttgctttaaaatgtgctaggcattttacatgcattaaagtgtcaaatttcataaaagaggaaacagtaacactgagaggctaactaactttaccaaagtcatacataaagtaactggtaaattctttctcccttctcctgagtgcatctttcctaagtagcctatggctccttaatcttcctcacctgaattcctgcaactcttttatgagctgcaccatgcagtttagcacttaattgtgcttctcctcttagggactagttgatttatatgtgtcagtctcatcatcccagcattccagcatcatctcatgggatgggagcatagttgcagcttcttttgcatttattcatcatagcatggggctcaggtttgggtagattctttgttgttgttgttgttgttgttgttgttgttgttgttatggagtctcactctgtcgcccaggctggagtgcagtggcatgatcttggctcactgcaacctctgcctcccaggttcaagcaattctcctgcctcagcctcccgtgtagctgggactacagacactggccaccacacacggctaatttttgtatttttagtagagaaggggtttccccacgttggtcaggctggtctcgaattcccgacctcaggtgatccgcccgcctcagcctcccaaagtgctgggattacaggcatgagccactgcgcccggctagatttgggtagattcttaacaatatttgttcatttgaataaaataaacctcaaattatcttacaaaaacaacagtgtatctgtactggcatattttatttgcagaggaaatacattttggctatgcttcatatatcaccttttttgcactttaaaatataggataaattggtccatgacagagcatttctgtaattgacaataaacttcactacccccaaagatagttgaatcttttctaatacagttctatgggaaaacatctgcaaaaaaccctgaggtttttctccataatatcaaggaatcatagattctttgggaatgatttctcaggtagcaaggagtttagcggaagttcagacatttttgttttgcagaaaggtaggttttatcattataattaatgatagctttcacttatttactgctcctgatgtaccagccacttttataaacaacatccagtgtgtcacatcttttagttgtcataagaaccccatgaggtaattgcatttatgaccttcgtgttactcaataggaaactgaggcaaagagagactgtcacttggccaaaatggtacagaaagtaatagacccatgattcgaacccagaaagtttgtctcaaaagcctgtactctctgaacaagtgtgaactcactttcttttttttattattattattatactttaagttctagggtacatgtgcacaatgtgcaggtttgttacatatgtatacttgtgccatgttggtgtgctgcacccattaactcgtcatttacacattaggtatatctcctaatgctatccctcccccctcccccctcccccaacctcatgataggccccggtgtgtgatgttccccaccctgtgtccaagtgttctcattgttcaattcccacctatgagtgataatatgcagtgtttggttttctgtccttgcaatagtttgctcagaatgatgatttccagcttcatccatgtcactacaaaggacatgacctcatccttttttatggctgcacagtattccatggtgtatatgtgccacgtttacttaatccagtctatcattgatggacatttgggttggttccaagtctttgctattgtgaataatgccgcaataaacatacatgtgcatgtgtctttatagcagcatgatttataatcctttgggtatatacccagtaatgggatggctgggtcaaatggtatttctagttctagatccctgaggactcgccacactgacttccacaatggttgaactactttagagtcccaccaacagtgtaaaagtgttcctatttctccacatcgtctccagcacctgttgtttgctgactttttaatgatcgccattctaactggtatgagatggtatctcattgtggttttgatttgcatttctctgatggccagtgatgatgagcattttttcatgtgtctgtaggctgtataaatgtcttcttttgagaagtgactgttcatatccctcgcccactttttgatggggttgtttgattttttcttgtaaatttgtttaagttctttgtagattctggatactagccctttgtcagatgggtagattgtaaaaattttctcccattctgtaggttgcctattcactctgatggtagtttcttttgctgtgtagaagttctttagtttaattagatcccatttgtcagttttggcttttgttgccattgcttttggtgttttagtcatgaaatccttgcccatgcctatgtcctgaatggtattgcctaggttttcttctagggtttttgtggttttaggtctaacatttaagtctttaatccatcttgaattaatttttgtatgcggtgtaaggaagggatccaatttcagctttctacatatggctagccagttttcccaacaccagttattcaatagggaatccttttcccatttcttgtttttctcagctttgtcaaagatcagatggttgtagatgtgtggtattatttctgagggctctgttctgttccattggtctatatctctgttttggtaccagtaccatgctgttttggttactgtagccttgtagtatagtttgaagtcaggtagtgtgatgcctccagctttgttctttttgcttaggattgtcttggcaatgcgggctcttttttggttccatatgaactttagaggagttttatccaattctgtgaagaaagtcattggtagcttgatggggatagcattgaatctataaattaccttgggcagtatggccattttcaggatattgattctttctatccatgagcatggaatgttcttccatttgtttgtgtcctcttttatttcgttgagcagtggtttgtagttctccttgaagaggtccttcacatcccttgtaagctggattcctaggtattttattctctttgaagcaattgtgaatggaaggtgaactcactttcttaaaatgtgtaaccatcattgatgttaacttgatacacaattttcttctctcttccctctttcccctatccacaagcatattaatataatatttgtaaggaaagtacccaattattttctttcttttcagaggagaagcagttattgatgatccccaaattcagtattttctcaactctatcagactgaatgccatctttttataacagatatcttctaaaagagtctttactttccttaaatgaaatttatagataatataacctgcctacacaggtaaatagaaaaacatcaatataatcacatcataaaagagaaataaaagtaatttataatattgtctattttgatatgtaaggacattaacattgcctacactgtaagaaatagcaaagtgattagaaagttatacttgttgatataatcaccatggatggagactgatatgggtatgttttacctgtgattcaaataccatggtgatgaggttttctgaaatggtgacccaatctttgttaagttctataaaagaaaaaggaaaagctccccttggtacatgttactgtatttcttccattataggaaatacatttcacatttcttaaatcaggatgtgtcttacaagcactgtcagccatgtgtcagtcattgcatcattaccatcatcactgcctgagcatgtgtgtatccggttattgttaccaatttctggacaaactaaagatcatctgaagaaagaatatgtgctgtttgttgccttaaaactttccattaatctctttgaaagactcaaaaaagtactgacatcaaaacttacaataatttatgcctggcttgaattaaaactcttctagacagaagagttgagcactgttctaggaaatattgcatcatcaaaacacttgatagcagagaggatagtattgcttggaaaaaaatatggatattgacacctctgagccaaactttcagtaaattttgtgaatatgaagttttatgaataccttaacaatttattttgcttttccctttcctttcatttatttccaagtatgatattttatttctgtctaaagcctaaaagagttctttttaaaaacataaaataattatgtataagaatgcatcatgtcatagtttaattggcagtgttttttctccttgtcttcctttcttggtgatacttaaataatactttgttttacaattgatgtctcaaattagatgaaataccataatttccttcctggaaagtttattgcacattaaatcagtgtaaacatgtttagtgtttatatgtaaaatgttaaattcgaggctcagataaatataaataggttttccctctgggaaggagagcattttttgttgagggagacttcccttggatagtatgatatctagcatccatgacaccacctaataaaagtagcaactctcattttttgtaattactaaaattcacatctacaaacttccaagacatccttaaggaaggtgcagctcctgctgagattgtcacttttaaatactgctaggcatgtcattcctattgatgctcactagagggagcaactggtctttaagaaagtgatgtatctagtctctgatggaagaactatgggatggtctttcactataaattaaatacttttttatttaaattgaatcacaaacttttattcccactaagctgtaattgttacaatgtatttttctcagacaagtttaggtttattatgatggctccaatactcaaattgtttacgtatctcataggagcctgcctacaaagtccctacgcagtcatgaatctgatttcaagttacagctctcctactcactagctgtttgactggagctagtcatctttctgagccacaatttcctcataggtaaaatggagattataatacatatttcacaagcctattatgaaaatgaaataagatatatataaagtgtactataagctttcaatgaatagaagatggtaatattatttgtattatgctaaaacttaggcatattaaagttagactattgtgcaaggtataatctggcactaaattttcaatttcctgtacacagctaactatatagaatttcagagaagaatataatccctgtggattagagtggtcagtggaagaaatgagccttgacttatattctgctatgggtgagcattgaatagcttgagaaagaagtggggcgtgaggacatagtaaccatacttgtccactgctccagctatttcaacatgcattcaagacctgcactgtccaatactataggcactagccatatgtgtctattttgatttaaattaattaaaatgaagtaaagtaaaaaattcagttcatcagtcacactaattacatttcaagtacttattagcaacatctgactagtggctgctatattggatctcatgcaacatttcatcatggcaagaagtttgttggacaacattattctagacatacagcatcttcaagtggtggaaaaaggtgtagttgctggaactaaaatgccataccacagaggtagcaggcacacattttataagagtcttaagggaaaaaaacaccttttgaaattcatactagcagcatttttgagcaaaaattttgtgtgtttataattgggagtatataagtagaagtacttatccactggctcacataacataaaaaggataatccaaatattatgttgcttcactataaaacttacatatttaaaataagttacaaaaatctgagccattacccttcagagagaggaatgaagctaaatgggtcaaattcaggaagtgttagttgaaaaatatgtgtaattaaattagttatttaaataaccaataaaatgtgtacttggtgggacaaacccctactgtatttttagtaaggtaaaatggtaaggtataataatttaaaagaaaatttaaaaataatgtacatgaaacaatgaaaatacttgcatagattttttaaagtcactatgaatcatagtgatttgtttgttactataccaaaaattcacagtcaagccatttaataaacatgactgttatatgtgaaagcatctcaatatcctaagattaagcaatttcatgcaaaggaaatatttctgtgtattttttaggtagtatttagatctgcagctaaaaccctttaaacattttgttagttgccattcatttaaaactccagagctcatgtatcatacaaaaatatcagaaatttcttttttaaatggaaatatagtcctagggtcaaagaaccttttcagaacaactagaccttcatgataaaaaaaataaaaataataaaaagtaaagaaaaccagccctcttgttttaaaacaaaattcatcaaggtcatttactactttccacatacaaattgattcaatatgaaaagttcatattatggtatccagcttaatactttggttgtcataacacttcatccattagctgagaactctgccttgtgagttctttggctctgagactatattataacttcactgggtttgtaagcaagccattctatgcacatctgttttaaaaatgtgacaggttgatttgaaaaataccatatttcattcatcatcataaatagaaatatttatatttattgaatatttactacataatagatactgtgttaaatgcttttcatatattatttaattgcctcacccctccattacataggtagtattcaccctgttgtgaagattaagaaatcccagagatatcaggtgacttgcctaaagttacatgactaataagtaatggagtatggatataaacccagtttattggcttcaaagctctttgtactatgccatgttgcttttctgatttcttgaaatctttgacagtaaccggggaactcaagggttactgccacctattttctaataacttcgttttcttggatctgtatcattagtgcctagcacctagaagattcttaggcagtgttggctgcattgattgaatgattccacactgatggctagcttaaacagccatggaaactttaattataatatattaatctaaacaggacatatggtttttaggagttaagtgccctcaggggaagcatttactaaatgtggggcacattttaaaagtaatatctcctgctactgctgatatttctaaattaacagtatttctagattctcagacttggggttcagagatttcacttgctgattaattaattcaaggatataagagctctagcaaataaatattttattaatttgtactgttctacactcaggagcaattattgaaaatcaaggtttgttatcaggaaatacatgaagtcttatttggaaataattccttaaaactcatcctgagaagagacaatctgcatccttcccacttagtatatcatctacccatttgtggtctctcataattggaaatatttccctaattccaaaagcagaaaggaatcctcttaactgctaacttctctcccaaagggagaaactttttccagccaacctcagtgaaattgttgattgaatgctgatcctagaactgcattatgaatgcaaaaaagtaaacaaagcacccattctaagtttgctcaattttctggccaccactgtgctctgcaatgtcatctgtagcacagaagattggaggcgtagacttgagaccagaccacttcgtctgttctttccaaactctctaaattcaaaacatttgttgaggtttatgcaggacacaagagttgtgggatggcatacaaaaatctgaaagtcatggactttgttcattagggaccacagtgttgtggagaagatagacacagaaacacataattataataccagatgaaacaaacaattataataccagatgataccaataattataatactaggagagtgttgttccagcaagagagatgtggacaaagggctttgggtgcacagaataggaaatttgtattcctatattgataagagagcttggtaagaattcagaggtgataattttgagatgagtcctaataagaaaaataaaattataataagagagagggggtgaaaattccaggttgactaaaataccctgaacaaagactcaaatacaagtagaagtccagccagcttgaggaaatgactgaaagatagggagattagttgggggtgatggttaggtaaaatggaatctgatagttaaaggctttttattatacattattatatgtttatgatatattaaatataattatatatatacatatttgttaatcctatgggtattagaggatattggaggcttttaaacaggggattgacatggacagtgtcagaaaataatattaattgccatatggaaaatgatgtgaaggttatatgattaaaggctgggatatcagttgtgaagtattataaaaatgcaggcaagggtagatgaggatatctttaggaatgtagtaactgacaacagaatatgtcagataaattgtagaaccaattgaaaaactagatatgaaagtagacaagaagttaaggaagactgatttgtttagtttgggtaacaaggatgggtggaaatgtgattgagttatggaatacaggaagaagatcgggttgtagtgggaggagagatcaacagttcagctacagacaaggagagtttcatgtgactctagggagatgttgggtatttgtagatcagatagatttgggtatttgtagagcaggagaagagtggggtttacagttagacttggaaatcttgagtgtttaggtgatagttgacatcatcagagtggacgagaacaccaggaagacaagtagaggaagaagaaaggaaggccaaaaatagagctctgaggaacactgacgtgaaagaaacagatgaggtggcacaagtagaggaaactgagaaatagccattagaggtagggaaagaaccagaagagtgttgtttcagtatgcaagggaagaatggacttcaggaagctaaggttcaagggatgcagccatattgagtgagatgaagactgggaagaaaagtttccgaattgggcggcagctatacagcatgggtgtctttagtgagagcaatttcagaaaagtagcaagacagaaaaattgcagagttgaaaaaatgaatgataaatgaacatatagatagtgtgtgaggccagttctttcataattgtcagtatagaaaaggggaaagactggatgacaagttcaaggagatgcagggttgagggaagaatgtttgtagggagcagcattgttgggagcagagtaaggatctgattattacactgaagtgttgaggaagcaaacaaacaaaaaaaaagaaaacaaactgaatgtcagtaagtagaagaaaggttggataaattatggcatgtttatacaactgaatattacgtaacctttaaaaggaataaattggatccaaagtagtgacctggaaaagcatccatgttaattagaaagatgtaaaagaacattgcagaccaataagtatatgctaattatattttaataaatattagctgacacccttgtatctatataaatgcaagaaatattaagaaaggatgtgtacccagttgccaacagtggtgatctctgggggatgaggatgggaaggggactttagcttattgcttcttagaattttaaagagaggtggtgacattaggaatgacttttacacattggatttaaaatatttttcagacaaacattaaagaaaaccctctcatacaatgatgagataatttaactttatataattaactacagaattcaaagaagaaaataacataaacgaacacatttgctttaataagttattgggcttgtatttaaagctgaagcaaaaacatttgctcagatgtgatattgagttcaaggtgaattaaaggtttttccttttctttttttcttttttttttttgacacggagtcttgctctgtcaccagactcgagtgcagtggcgtgatctcagctcactacaacctctgcctcccaggttcaagctattctcctgcctcagactcccaagtaattgggactacaggtgtgctccaccatgcccagctaatttttgtacttttgggagagacagggtttcaccatgatggtttgtttttcttaattctggaagatgaggccaatatttgtttgaagagtgatttaaaatagctgaaattcagtcaaaaacttaatttactgggttgtacctctttattatgaagtattggttgcttttaaaatgagctagaggccagacatggtagctcacatctataatcttaacactttcggagacaaaggcaacaagattgcttgagctcaggagttcaagatcagcctaggaaacatagcgagactttggctgtactaacaatagaaaaattagtcaggcatggtggtgtctggaggctgaactgggaggatcacctgagccagggagatcaaggctgcagtgagctatgatcacgccactgcactccagcctgggtgacagaatgagacgttgcctcaaaaagaaataaaaagagctagaagtgaccttggtgatctatttggtaatatttcttttgtctaaagtatgtttttaaaatatatatacaattagtaactagctaatagttaataaatatgtctatttttagaaaaatttattattttattttctatttttgagacaaggtctcactctgtcacccaggctggagtgcagtggcatgatcacagttctctgcagcctcgacctcctgggctcaagcaatcctcccacctcagcttcccaagtagctaggactacaggcatgtgccaccatgccagttaattttttaattttttgtagagatgaggtcttgctatgctgcccaggctggtcttgaactcctgggctcaagggatccttttggttcagcctcccaaagtgttgggattataggagtgagccactgtgcctggccaaaaatgattttatatggaacacttagaagcagggtgctggaattagcaaaaaacagttttcaagttaaacgtagtttagtaatcagaattgtattgacagtaacagattcattgtaaaatagaaatgctcctatattcatacattagtttaagtaagttaaataatctgtaaaccaactttcttggattgaattctgaggtcaagccaggttaatagaagggtcagggaagataggaaagccataaatatggttcttaaagcttgtgggcacaagaactcttggaatgaaggtagataggggaagtatttgtaaagggaagtgagaagatgtcaggaaagtcctgcaagtgggtacctgaatcatggcattaccagtggtttagcatatcagaacctcagcccagagtttcaccatctagtctctggtcccatcccgaagccagaaagaacataaggaaaaagaggagatgtgaataacaagtctctcctccaatttcctctcaccccatctttattaccaattaccagtggaaagcaaaatgatatatgcagaacaccccatctcaaagccctaaaggtggttaaatgagtagactactcaccaactccttactgagcacttcctatagtaagtatgataagtgatgaggatttaacgataaaagacactgttcatgccctcgagagactgcccacggtggggtggagggtgatttggaaataaatcatactgcagtgtgaaaacaggaatattaggtatattctaccaagtacaagctgaacacagaaaaaaagacctactgattgctgtggcggttggaggagcttcctagaagaagaaaggacacttgtgctaggacttgaaggcagaagaaaggtgggagaggagaagatgggaggagataggttcagggaacagcctaggcaaaggtgtggagggttgtggggagagagcgggagagtggatgaggaaggaaggcttgaatgtggcttggcttatatttgaaggactttgagactcgctgtggagtattatgttctgctgtggtcatcctattaaaccctgactacatccattgattttttttcctatttaaaatttcctatttaaaatatttccttccaaacattttttaatttcaaggtctttatgtaagatgagatgtgatccaacaactatactagcccacatgtgaaatgacaaggcagaaaccacaatacagaaaataaaataaaacagccttaatttaaatatttaaagtagagctgtctagattttcagaaagcaataatgtgtctcctggaaattgactgatatgttttttgacactgttagtttcagttatttttcaaggcatcactaaaccctggaagagaacagtcttaatttatagtttaagtaggtttatttaaggggaaaaagaaaattgcaagatgtcattttatttccattccaaaaataagcataacattatcatagaagcctctttgaaagtagaacttcattaattgggactccactgaggaaaatttttccataatctcatcagttttgcctttgcttagcaaaccatcattttatgattatcataaaccaataataaactaggcatattggaattatatttacaatatgaaagacagcacttttcattcaacctcatcaatcttggaaacctattttttcattaaataaatatttctgaaatcactaaaatgtgcctggtgacattctacatactggggatatatagctgtcccttggtatccaggggaattggttccagtaccccctcagataccaaaatccatggatgctgaagtccttgatagaaaatgatgtagtatttgtgtataacctacacacatcctaccctatacttcaaatcatctctacattattcatcatatctaatacaatgtaaatgatatgtaaacaatgttatactgtattattttttaatttgtattattgtttactgttacgtattttcttgaaatattttcaattcatggttggttaaatctgtagatgtagaacccttggatatgaagggtggactgtggggttgaacaagacatgctaaatccctgcctattaggagtttatattttgatgcgaggagaaagataataaatatgaaaacataaaaagataatttgaaggacccaagaaatgctctaaataaagtaatttaaaagtgtgactggggctaaggttttgtgtggaggtgatatttaagttagacctgagtggtgagaaggtgtcagatgtaaagatccactaggaattacattataagtggaatgaacaaaggagcaaagaccctgagacaggtttagttaacaaaaaagaagagtagtgtggctgagtagtgaacatccttattttggaaatgaggtcagaaagatgaagatggtcagatcatgtgaggctttaaaggctataaggaagctggattttattctagttacaatgagaatctgtttggatttttggtagggtgagggtagggtgaatttttggtagagtgagaatctgtttgaatttttggtagggtggattcgacataattgaattcatgctttggaaaaatcatttgcgctgttttgtggggattgggtagggaggaagagttgaggcaggaaagctgctgaagtagttgctgcagtggtccagggaaagtggcttaaactagggttgtagctgtagacactgtgagaagtggtaagactcagaatatgatttgggtaggcaaagtatagtggagatgttggtgctctgtccatatccctttgcatgcactgtttcagtgtgtgctgacggcttcctactgccaggccagaatgctagggaattgataccctaggagccatccttagccaaagtcaaccctaggagccgtccttagctaaagtcagatgggagttggaggaggaacattccagcttcctctcctcttgggtggagaacaactccaattcatgttctacaccatctctcaaaggtcccagcgggcccccatcagtaacctgctcatcctcacactttgtacttggtttccttccttcctttctccttttcctacctccacatgagtgcctcctaggatcacctcctaaagaagaaacttacactctaattcctgacccaacatcagcttctagggaaatgcaatctgaaacactaattttagtgaattctaagtaattaattagcaggggctaaaatgaggacctataatagttagtggtttgggattatttgatttgttagacatactacaagaagacaaaactgcatttccacttcaaattcattcttttatctacttccaaggttctgcttatgaatcttcttaggataaattatcttgaccattttcagcaaattcacttttgtcaaaccaggaaaaagtgatttctagaaagaggtggcatttctctagcatctctttgccatgttaggggatgtctgccatggcagtagagctctctggagtttagttgtgatctatgatcactaggctcttaataaaatcttgttaaactattgttaccaggatttgggttaaaggttcagacataatgactaaccatcatggtttgcctgggactagtgttttcctggcttggaaattcattgttaaaactggctagtctcaagcaaaccaggattgttggacaccctgtcagagtttaggccctggggtaagaaatatttgagttttaattcctgaattgtcatttattgacttggtgattatagtcaaattgattaacatttctgtgtcctcattgcttatctgtagagttaatgccagtaccaaatctataaatctgttgtgaagattaaatgaggctatccacatgtggtaggcagaataatgccctccccccaggaaagatgtccatgttctagtcttcataacctgtgaatatgctgttacatagcaagggggaattaaggttgcaggtggaattacggtttctcatcagctgaccttgagatagggatattgtcctagattagtcaagtgagcccaatgtaatcacaagtgttctttaaagtaaaaaagggaggcagaagagatcagagtgacacagtgtgtgaagaactcaaccagccattgttagttttgaagacagaggacggggccactagccaaggcatgtgggcagcatctagaagctagaaaggtcaaggaaatggattaccctctagaggttccagaaagaaatgtagcccttctgataccttcagtttaaccccatgaaacacattttagacttctcatttccagaactgtaagataataaatttgtgccctttaaagtcactacgtgtgtgataatgttttacagcagctatagaaaactcaacatataaagcattaaacacattatctgacatatagtgttcatgtaatactgttagctaactcagctccagtgttgaaactcacacaaagcctttgacttttctgcattctgataggtgggacatggaaaacggagccatcctcttctacactagccattcattaacacaattcttaataattaactcctaaataaaaaatcgttttggatacctcaggctagatacattatcttgttcttttgaacccgtaggcattgtgtgcatatctatgatgatacttgttttaccttgtttctagctatttgtgattttacttaactctcttagtttagaaacaagttgaacatgaaaacaatttttactaacttttctattctcaggatgttatcaatttgcataaagtagccaatgtacattaaatattattaagtaataagtatgggaaaagaggaagtgaaagcaagcagttttctgatgtgacctagaaattgcacagttgtgtccactctcatgccactggcaaaacttggtttgcaagagaaacagagggaaatttgtctctagttaatgtagttttgtgcttacctaaaattttgggaaaaaagagaggactgaatgttgaagaacaatgagcactttctctgtttaatggttttaagaataatttgagccaattagaagttatctataattaattatgagtttagaaagctataagggaagaaagtgccccaaaggtatggtgaactagaaatgtaaataaattctcatcctgaaaggcttcttgaattatttttatatatatatatatatatatatatatatatatatatatatatatatacacatacacacacacacacacatacatatatatgtatgtatatgtgtgtgtatatgtatgtatgtaggtaggtaggtataggtatagataaagagatagagatagatgatggacattcctctgcactcaacttgtaccacatagaatctctaaagtttgaacaatactattcacaactttttattttgtcacctaagaggccaagataactttttagggcacatctttaacagttattaatgttgaaatggttaattctacagtgtactgtgaattgaaactgagaaagtaaaatcaatatggtccaaaagaatgttacctaacacattttactattttctgagattgctggtgttttggcagtgactggctgtgggcaaggataacatgcaacattagatggaaatatagttgtggaattttaataaactgttggtctgccaattatttgcttttattcaaaccgtttttaaatttggcagttattcataaatctcagtccagaaaaactgtcaacttttcttaggaagatgtatatagtagtaagagaataaagaaaagacagaccttcacatattccagaaagagattttatttttgccccaacctactgaatttgtacttccagagtttgccatagtactttagaacccaaagttacaattagaggaataataggaactaacagagtcatgtccgaatagtaagtttcaaatagtacattttaggtgattgttactatttcttggaatactaaatagttctgatgagtacaatactcatttccttccatatttgagtattattttcatacaaatgcaaaaatgaaagaagaaaagcctcgcttcaaatgcacaagttccttaaatttctgaatatatcattttatcctgcttgttgataaaattccacagtattgaagagctgggaatttttagaattcacagggactatgcataatatttggtaatggcttgatgtgcttcatgacatatattatctttctccttctgctcaagatctacttggcataattattttcctgacttctgcctcaggcaatcaagtctaatggggacatttttggccttttgctaagttaccagtgctagtgtcaaagaactattgtccttcccccctttctttcaccctttgaatctgagtccaaaataaatgaatggtaacaagttctcttcactgctttttagtgtaaagtttcagttcagggaaagttctgttcaacaatgaattccagcagtgttcctaatgccagcaggcagcataaaggtctcggagtgtggaagtaagccagaataaattcttctcaatttgagtgaagtcatttatatatgataacatatgattatgattcttaatgcaaacttcatggccatcttaagagcttaaatgatcagtatttatagacagcaaacttaggggtgaaatcatcttactgtgttttttatcccaataagatattattcatatacaaaacatggaagaaggtcctaagagatagagagttctttggttgtagcacagtggttggacttctgaggtggtcagggtgaaagattttagagtggttatatggacagagcagtgagggagggagggagggagagagagagagagagatccagagagcacacaaacataggcattcatgcacatgcaagtgtacaacctccctcggggcttctccctcagaggtgaagggcagtgctgaggacccatctggaaagagttttgtttctcttcctcggagatgatggggacttcctgaaagccttggccttacccatgtgcaactaggctgtatgatcctccctacagcagggaggttccgtctgctcagagtcatgctccttgggtatccttctgtattatctcttctattagatgtgtatgtgtcttaagagggaagaaccattttatattttattgattcttcctacactcactcttcatcttccaatgccttctccacactacagccagagtgatctgctgagtagtatctgattatgtcacatccttacttaaaccgcctcaatggctgagtagtactcttaggataaaaaccagcattttttttaatactttaagttctggggtacatgtgcagaacgtgcaggtttgttacataggtatacacatgccatggtggtttgctacacccatcaacccgtcatctgctttaggtatttctcctaatgctctccctccgctagctccccaccttctggcaggctccggtgtgtgatgttcccctccctgtgtccatgtgttatcactgttcaactcccacttatgagtgagaacatgcggtgtttggttttctattcctgtgttagtttgcggagaatggtggtttccagcttcatccgtgtccctgcaaaggacatgaagccatccttttttatggctgcatattattccatgatgtatatgtgccacattttcttaatccagtctatcattgatgggcatttgagttggttccaagtctttgctattgagaatagtgctgcaataaacatacgagtccatgtgtctttatagtagaatgatttgtaatcctttgggtatatacccaataatgggattgctgggtcaaatggtatttctgtttctcgatccttgaggaatcgccacactgtcttccacaatggtagaactaatttacacttccaccaacagtataaaagtattcctatttctccacatcctctccagcatctgttgtttcctgactttttaatgatcgccattctagctggcgtgaggtggtatctcattgtggttttgatttgcatttctctaatgaccagtgatgatgagctttttttcatatgtttgttggctgcataaatgtcttcttttgagaagtgtctgttcatatcctttgcacactttttgatggggttgtttgtttttttcttgtaaatttgtttaatttaagttccttgtagattctggatattagccctttgtcagatggatagattgcaaacattttctctcattttgtaggttgcctattcactctgatgatagtttctttggctgtgcatagttctttagtttaattagatcctatttgtctattttagcttttgttgcaattgcttttggtgttttagtcatgaagtctttgcccatgcctatgtcctgaatggtattgcctaggttttcttctagggttttttatggttttaggtattatgtttaagtctttaatccatcttgaattaatttttgtataaggtgtaaggaaggggtccagttgcagttttctgcatatggctagccagtttacccaacaccatttattaaatagggaatcctgtctccatttcttgtttttgtcaggtttgtcaaagatcagatgattgtagatgtgtggtattatttccgaggcctctgttctgttccactggtctatatatatctgttttggtacctgtaccatgcaaaatcagcattcttttatctcatccaattcgtccaatgtgctctctctttctcttctctggccacagttacatctttcttttctgcctttagtacaagttccttcctgccttggcttctttttatgctatttgctttgcttgaatttctctttacctccacccctcccctcaactttaccctctttatctcgctacctccttctcgtctttctctttttcaactcaaaagtcacttccttcaggaagacttcttgaatttttatacaaagttaggccccttctgcccccttacacactcttcttgcactctgcaatccccatttgcagcacttaatacaattgtagatatttaataccctttcccctggttagattgtaagctcaatgatgacactaaatatgtctgttaattactgtatgtcaagtacatagtgtagttgaggaaaaggcatctacaacatctggcatgttgtagatgatcggtatatatatttcttcaatgaataaatgaagcaagcaaatgaccaactggatggctgaatggctaacatgatttctttttccacttccccttcccccaacaactcagggcaggaaagcaagagacaggtgacgataggggtaggggagggctggttggggaaggatgctggtaggccctattcttaaaaagcagttacaattcagaagggccatagataaaatagcaaaaaccatatcctgaagaatgaagactttggatcagaatggtgagccagtcctgtaatgattgcctagggacagaaacaaagagccaaatatcctgcaataagaaacagtgggggcccggtgcggtggctcatgcctgtaatcccagcactttgggaggccaaggtgggcagatcacaaggtcaggagatcgagaccatcctggctaatatggtgaaaccccgtctgtactaaaaatacaaaaaaactagccgggcatggtggcaggcgcccgtagtcccagctactcaggaggctgaggcaggagaatgaggtggagcctgcagtgaaccgaggttgcaccactgcactccagcctgggcgacagagcaagactccgtctcaaaaaaaaaaaaaaagaaagaaaaaaacagaaacagtgggtcagaggaggggaaacgaaggtctccttagtagttccagatacgaagtgtcaaagactggggaagcttctttgagcgccactcacattttcatgagcaaaatattcatttaaaggaatcagtctaggttgcaaagtatttagcccacttttcaaatacctttgcatatctgaaatttttagtcacatgagtttgaaattcagatttttttggattttagacaggagatagagtgccatcccagaatgcatttaccgtgaataaactaccatccccagtgggttctgaggcagcatttattatcaaacacattagtagccatgtagtgaaacattgaatatttacagtgtgtgggatgtgtaaactatcaatagcctcacatcatttcaggtcaggttttgctgccaaatgagataccaaaatgctttttgcttagaagagcttttggggtttggaaattctggttgggggattgtggcactggtacaaagcactgtgtgcttctggtgccctgttaattcttgtttgactgattcccagcacagaggaggagctgccctggttgactgactcaggggttcctcagttcttcagggaaatccccagagtccccccagccctcatctgcctagaatgaaactctgctaccccttgccttttccttaggctactgtgagatggttgtcattctactatctttattaaatatttgctgtgttcagttgggaaatacaaagataagcagaagctgagctgtttaggtttatcctcctttaggtaatccatctctatcctagatatctcacttgagctccatgacttttttccagctgcctagtacacagatccacttaacattcaaaatcaaaactggtcatctccttcaacctagaatcaaacaaaaacaaaatctgctgtttatcctgtagtccttgtcactccactaaatggtccaaattagaatcaaactttcctttttttttttttctttttgcacataacctgcgctaaatcctgttgggtctcccacataagtgtcctcccttctctcccatcctctcccatcccagtagcatcttagctggtttgatctcccaaggctcctccctgccccttatttaatactctctgtcatctatccatttctttcttgaagaccttagttatttttcagtaataaagattttaaaacatattgttgctttaaaagttctcactattaaagaaaaggttagtttcctgaaacaaaaaataaaataaagactcaggaactgttccagattgaaggagacaaaagaagcaagaaagtgaaatgcaatacatggtcctggattaggtcctatacaagaaaaacaattgacatagtatacagatcactattaaggcaattgacaaaattggaatagataaaattattacatcagtgttaatgtcctgagtttgataattataccgtagctatagagtatccttttttttgtttttgtttttttgagttggagtttcgctcttgttgcccaggctggagtgcaatggcgtaatcttggctcactgaaatctctgcctcccaggttcaagcgattctcctgctttagccccctgagtagctgggattacagtgtagcatgtgccaccacagccagctaatttttgtatttttagtagagacagcgtttcactatgttggtcaggctggtcttgaactcctgacctcaggtgatccacccacttcagcctcccaaagtgctgggattacaagtgtgagccaccgtgcctggcatagagtatctttatttctgtaacatatacactgaattattaagagataaagggattaatgtgtgaacccattctcaactagtttagaaaaaaatgtatgtatgtacatgtgagtatgtgtatgtgtgtatagatacacatacacatccatatcagtatataaatgatatatgcatatatatgtaaaaagagaacaataaatatggcaagagagtaatgattggtaaatctggataaaaactacaaagaagttctttgtactattcttgcaacctttctataagtttaaaattatttcaacatagaaacttttaaaaactcaatttttagatattgaacttatgtaactgttatccaaacaacagactttattataacatacatacacacacaggtacatacacatacaatttcataaacttcccactgcccataaaaagaaattttaagctcataaacattatgctcagggagtttctacaatcaggtctcatcctaattttcctgcctcactttttgctttctctaaggcactccttactctatatatgctgaaatgattatgtttgtttctccttctgtgtttttgttcctgctgtttgctctataaggtaagccctcccagctcttccactggttacctcctatgcctgctttgagaccaagttcaaatgttgcttctataatacccttctctacagcactaggcagatacaactcttccctctttttgtgaactgaatgttgtgttcccccaaaatttatatgttgaagccataactctcaatgtgatactctttagagatggggcctttgggaggaattagggttagatgaagttatgggggcaggaccctaatgatgggatttgtgccctaagagctctctttgccttgggaagatacaacaagaaggctgccatctacaagccagaaagggagccctccccaggagccaaattgactagcaccttgatcttggacttcccagcatccagaactgtgagaaaatacaaaaaacatttctgttttttaatctattcagtctatgttattttgttagggcagcatgagcagactaatatacctcctctgtgtattcatacaactttacacagaggtaaaatatagcagttagaactctatcttatattgggttgttgatgaatctttcacacaggcatgtgagtcctgaggacagcagctatgtgtttcatctttctgtccctaactcactgcctgacccatggagaccttaagtccaggcttgctgaatgaatatggcataatctgaacctgaccactccaatcattcattaaccttactgtttgggtgtggattgatcattacttttcttgaatttgtgacaagataatttcagcagttgacagacagctagtttctagtcaagccgatgcattgtatatgctcctacttgcctgttcctatgtcttcagtgatggattcagtgacctgaagagtgtatcttaataaagaattttgaatgcatttggttgaaaacattctgaaaagaaccttttcttcatacattttatatggatatgaactagacaataatgtatgcttataataattgagaagtttttaaaaatgagatgctgttactaataaattatgattaattctttctctaaaggtagtacgaagttaaacaatggtaggaatcttggtctctgtttattatccttactccaactcatctttcattacaaataatttttttatacagtcccctctctaccctcttacacagaggcatttcagcagatattttattgaaaacaaaacactgtgcagcccatgctgcacaaggaaagaagtgtgtacaagataattccaaagggcaatacatgtttctagttaaaaattggagggtcatgtaaatatgaactgtttagtcaagttcaggtaaaattaggaggaattactggaaaagcgtgaacagtgaatatattccttagttctaattctttcaatagtcatctctatcaactcagagattgcttttgcttgttttctttgttttttatttcattctgtacagggccttgaacattcagtgacaatttatggtaactgcagagtataccatcaccatcctgtgttctttggataaccagctggcctaattttgaatgtcctgaaccacatattactatagctctgtgttaactatgtcatggagtggatttatttctcctgttgactattagacaacctggttgcttccacttactatttattcaactaatactgcctgttatattgtatgttgtaagagttggaggcaagttgtttcctggtaagcattagactcagaaattctgggagtgtttttgttttgtttttaagctcggcttcaatcttgtaagagatttgtaaatctcgtaaatgtataaggtaacatagaacttgatgtgaccttgtttactcttagatattttgatatgagctgtttagacagaaaatatttgttgataaatatgaatgaaaacataaggaatattgaacaggaggttaaatgtcaaagtattatgacgatggcctggcatagtaggtggaatgagggctttttaatgagaaagatcagtgcccacattcttgttttgtgacttactagctatatttttaaagcaatttacataaactcttgagcctcaagtataccttctataaaatggtgataataacacccatcttttgttgcatttttttgttttttggggttttttttgagatggagtctcactctgtcacccaggctggagtgcagtggcatgatctcggctcactgcaagctccgcctcccgggttcatgccattctcctgcctcagcctcccaagtagctgggactacaggcgcccaccaccatgcccagctaattttttgtgctgggattacaggtgtgagccacagtgcccggccttgttgcattcttttgaaaatgaataaaaacggtatataaattatgagttaccgtgccttgagcataatagatactcataatagatattctaataaatagtggctcttatggttaatgttttttaaatcaagaggacaaataagatcaattaaaatttctaattgattattacttttactaaaagtttttattttgtttagaacagccattagtaaattgaacttattatctcatgatgtttttatgaggagcaaattaaagaaaattagaatcatctgttgtgctagatgacacatagcactcaatgtgctcattttattcccccctcatcctgtatacacacaactctactttttaggtggatttcttccaagatggtctagaaaataattttttaaaacttagtcattatatatttggaatacacatacatacatacatacatacatacatacacaccactctaaaatgaagaaggtcaattgcctattatctattgtctagcatgggttctattattgctcctttatatgtttaactatgatggtattaacttttgttcatatatggatgaggatagtatttatgtattagtagatatatctgtttttagttatacatgaattattcatctttgcttatattaacccaaatataaaaataacacaatagttattgtctgtttgtgctgctacaacaaaatatctgagactaggtaatttataaagagcagatacttatttctaacagttctgaaggctgggaagtccaagatcaaggcactagcaggttgattgtccagtgaagacgtggccttgaaccgcaagatggttcaagatggtgccttgaacaccatgttctcctgaagggaggaatgctgtgtcttcatatggcagaaggcagaaggacaaaaagggagcaaactccctctatcaagcccttttataagggcacctaatccaattcatgagggcaaagtcctcatgactcaatcacttctcaaagccctcatcttccagtactgttgtattgaggattaagtttccatataaattttggaaagaaaaaaaaaagaagcatttaaaccatagcagtcatgcacataaggaacattcaaaattttgccaactattagagtttactgaatatttattgtggccaggttttctgctaggcacctcacatatataatcttatttaatccctacaaattcttacaggaaattactgttttacagttgaggaagccacaggtcaaagtctggatcctatgacttgtaggtaactttggaaccctacattctttatttgttccccctatttctcatctcttttacttagtcctttttttctcagtctctacatgtggaagggtgtggccgtggtcctctgcttttctctgtgtatgctccctccttaggttgttgaacctaatcaattgatttttaaatatactgataaatcctgggtaggcaaaataattcttttttttttcagttgctggtgatatcttctgcttatccagccattcacgataatctccatccagatgcctaacaggttttcaactcttactatgtccttcttgacatcttcccctgtaaccactcactgtactcctactccagttttcctcatcttggtccacggctccacaattcattcagttcaggaaaaaaaccaaggagtcatccttcatttccctctttttcctttttttctatgttcagtctaccaacaactccttttggctctgtcttcaaagtatatcccaaatctacacacttttcagcatatttatcatgtccaccctagtatatgccaccatcaaatctcacctggtctacagcaagactcatatccctggttccactgatcctcctcatagtctcctctctgcatacagacagagcaagctttctaaacataaaatgagaacatgtaattttctttttcaaaggcccttcctaatggtttcccattacacttataatgaatcagaatgtcttgtgtggccacagggtctctgggccctgccttgcctgtgtgtccagcctcaacttgtttcctaatatctggctaggtgtgctctgaccattctgccttcttgctgcgcttccagtgtgccatgctcctcctcatctcagctcttcacacatgctgcacttctgtctgaaatgtacttcctcagacttttgtatggcttgctctcacatcattcatattttgctcaaatgccacctcttcaaaggctgtctttgaccaacatatctaaaacagcacccacagctttgcccaaggtcctaggaacaccttgtccttctttagttttttttacagcatttgtcacaatccaaagctatatcctctttatatacatgtttgttttcatatcgcctttctctcccaccagaatataagcatcctgagggcaggaagatgaaccacctatttcacttctgtatctctaatgcccagaacaatcagtgaaatatagtagaaataaagaataacacaaggaaagaaagaaaatgagttgtttccagttctgattctgtttgattccaccaggctatgctgactcttcattgtgtgtaacgttttgcttgtaacaacaaaaaattggcagcaacctacatgtcttcaatagaggactattaataaatcatgaagcctacatataatagaataaaatgcaccaataaaaaagaatgaagaggatcaagatgtactagctctgaaataaagtgaaaaggcctgttgcagaacattgtgctccaacctctgctttcctgctctgggcctttgcacttgcgattccttgtgtatggaatgctcttctccagatctttcaggtctctctcaaatagcacctcccagagaatgttccaaatgtttaaagtatcttttacccttttcattcactaatctcttggcttgctctgttcttctgcatgatagttatcaccatccaaaattacatttacttatatgtaaatgtaaagcagggacttgacagtcttatttgccgctgcattcccagggcctccaacagtgcctggagtaagattgaaaaaaacaatgagaaataaagagagagatatatctggttttccaattaggttcttttgtataagagagtagaagtaccaccatatgctacccctcatctttaaaaactcagtgttaggacctttgtgtttttaggcagatagggaccttagaggtcatctagtccaagctatgattttgcaaaagagtggattgagaagggtgttaggtgatgtgtggaggtccagtgaatatggaagtcagcggtgacaggatgactttttatgctttttgagctttgagttatgtaatgtgctacttaatttaaaaataacctccataaatatattttgaaaaatatcagtgagatggtagccagttaaataattcagacacaagcactcaagggtttagaggaagataagttacttttaagtcactgtggacacagtcattgatcagagcaggcttcctgaaggaggacatcagctggcccttgaagaacagaagggatttaatggtgaggaagcataaggagcatttcaggaaagcattgcagcagtgagcagttggtggaagaggtccaggtataggagggagaccttgaaggagaaacctataagggcttaagaagaaattaatggttacccataatatacttagctctggaaataggaactggaacatcagtctgtaaatccttagggcctgtaatggaaagacttattttctcaaaaaatattgttttaaagatattattattttctctatagacagataatataagtgaaacagtagttacacattgttatggattgagttgcgtaaaatatatatatttttatttttatttctatatataaatatgtagaccctgggaatgcagtaggagataagactgccaagtccctgccttacatttacatataagtaaatgtaatttgggatggtgataactaccatgcagaaaaatagagcaaggcaagagattaatgagtgagggatacaaatatatatgtatatagaagtcttctctagtacctcagaatgtgatcttagttggtgatacagtcactgcagatataattacttaagatgaagtcacactggagagatgggcctctaatccaatatgactggtatccttataagaagatcccatgtaaagacagagctaaacaggaagaacgccatgtaaagattcaggctgctattggagttatgctccttaagccaaggaatgcctgggtctatcagaagctgaaagaggcaaggaaggaacatcccctgtaggcttcagaaggagcatggccctgccaataccttgaattctaacttttagcttccagaactgtgagacaataaattcctgttattttaagccatgcagtttatgatattttattatggcagccttaggaaactaatacagaaactctgcttttacaacacaattttgaaatgaagccaaacagaagaaaaccatcacttgctttgtaactgggtttatggaacatttggtaaatttgattagaactttgtttttgttgatttagtaataatgattggttacataatacctataaatgcaagcatcattaaattctttttgcataagtcctttataaattaattgcaagcatagctggagtaactccagccacaaactaagtgaatcaccattagagtcacacatagatcttttgttttcatttttgtatcttaaaagctcagtcttcaacaggcattctttttctcttattttagttacagcattaattcctatgtatgtttaatcacatgattaacaatcattgggtgaatcggttcatataagaataaagaacagattttaacttttttggttttaagttcatgaacatgcctatcatattgtcatttattatgcctatttaaatgtaacaagagttttaggactcactatgccaataatcttgctaacttatgtcctgaatcagaaagaaaattcatagagaaatgaattatatgtaaacttaaaccacctaggcagatagctgttttctgttgttttcagagagaaaaccaacttacatcaggtttacattttacttatctttgttttcaagcctctcagccactgccttgatggcttcctttcccccatttttttttctgtcagtgctgtctcttatattaaaccaatatctaatattttgtcttttgcttttctggtccatgtgctttcacaataaggataagagattttgctttgttatcatatggcaggactataaatagagaaaatcatatttttaaaaatcatttctagtatggtttgcaacatgtttaaattgattgctcccccttcctttactcagcctcagacttaattcttaattaactgtttttcttttttcttctacttgagggtcatgggaaaaagtttgaggttagtcacatcatatgggttttaacctttatagttatcttgtaacccaaacaaacattagtcattctgataaagggttagaagaatagtttggacatctcataggactttggctcagataagttattccattaatatattttctcaagaaaatgtcttcatttttgctttcctgacttctggtctcctgtaagttttctaagtttcatctggctctaaaatgctttaaaataatgctctggactaaatatatttggggaaatggtcagatttgctttattcatcagatagtgttattttgagggaaattattacatattaaattatgtcaaagatttattttatagtttcttttacatttttccttagccattgcttacttattcatgatataagtggagaccagtagataacccattatgtgaacattctagaaaggtgtttaaggagttggctggagctacaagcaaagtgagtttctttagccttttaacttatccacgctctcagggatgctaaataaaagctccatttagcaatatttgcttctgatgtgtggcaccagcaagagctacattcaggtacaggaatctgtgtccagaggtaggctctgaacccattgttttaccatctgtcttccagccccagagtgaaattcttgtaggaggaagttgagtggggagaaatgggggaagtcctgggcctgattcacctcctaactcttagggttgcttgggcagcttcctccatctctctagaaatcagtttcttcatcagtacaatgaaggaatagccactaacacttactgaacattatgtgccaggcactgctccaagtactttgcatgtaaaatttgttaaatcttcagaactctgtgagggtgaaaaatcaatacacacatactctctcaattctctctgtcctgcttttccctcctattgtctcatcaccttctgagatatatatatatatatatattcttttgtatgctttatatttttgttattttgtcagtctccttgctttagaatgtaaatgtcataagggcaggaatttccatttgtttcatttactagggtatacctctaaaacagagcctggcaagcaataattacaaaatcgatgttgaatgaatgaagtacatagattaagtaatttattaatgttcaccaagatagtagtggggcagagttgggaattggtcccaggttgtttatctccagatcccatactctaaagcaccgtgttatactgactaaaattaggcaaccaatggcttccaagccatggttcatcatgcttgtttcacatgagaatcgtatgtgatgttttaaaagctacaaatgcgggctgggcacggtggctcacgcctgtaatcccagcactttgggaggacgaggcaggcagatgaagaggtcaggagttcgagaccagcctgaccaacatggtgaaaccccatctatactaaaaatacaaaaattagtgatgcatgcctgtaatcccagctactcaggaagctgaggcagtagaattgcttgtacccgggaggcagaggttgcagtcagcaaagatcgcaccactgcactccagcctgggtgacagaacaagattctgtctaaaaaaaaactacagatgcctgctgcttcctactcttccccattacatactctgaaggaatttagtgagtttggagtcacaatattttgtcctaaaattcccaagtgaacttagtttgcatctaaactgagataaacttcaaaaacatagcttaagtttatctcaataacacctttaattttataaatctttaaaatgtattctaaaaggagttcagattgaaccttttgtttaaaggggcagatggaagatagtaggagcagagcttccttctgacattgattcatggttgggtttatggttgagttcatggatctttctataatgattttccagctgattctaaatgttaagtaggactggcctgtgactgatatctacagaccttactatagactggcagtaaactcataataatctatatgatttaaaatcagttgtttaaccacagtataatttcaagactatacttccctttcagacattggtatttaacaagtggatagtctaaacctaccctgggactggaccttgggagctagttccagttttcaattaatgaaccacattatactagatgaataagatttaaataattttgtcaaagcgttatcccctcaactcatgaaataacctttactaggacaataatgggacttggtgcggaatgacctgaaatgacagctagtccagaaagattggtatttggttgtgctgtagatgacttccttatcctgaaactaattacagaaaggaagatatttaacaaatgccttggaaattgattaagcttcttcttctttttgcttatttcttcttctactactactactactactattattattattattattattattactgctactactactacttttaatgtgctgtgcaggtaccttagctcatttactactagaaattttgtgagcttatgttagcctggattatccaagaagcagatgctgattcagcattaaatgtgcaagaaatttagtagggtaaattcctgtgagaaaaaaaatgtgaagggatcccagagaggctggaagagcccttaatgcaagtctgaccctgaggaaaagatagaaagagaaggggaagaatggtgtaagcatttcagactgctgttcagttccatgaaaacttagcaaggctgttggggaatcctcaagccaaagccaactattagaggagtcactcatctcatgggattgggcctgcctttgtatttctgttgtacagtcattggccgggagcagcctgtgggagaatgtggacctcagtggatttcagaacagagcagctggggctttcagccaattctgccccctgcagtcaaaatctaggaggcatattgttatggccaatattctcatatttagacatgatgttctagagattccgggaagttactcttggatatgtgtccaagatgtgtcctttccagaataatttctctttacacattctttaacctggttattatcagtcttgtgctgaactctctaacccatgtggataatttttagtaaggatgcttagtaatttaaaaacataaaatccatgctgctagtctctaaatcttctacgaaaagtttaatgctaaacaaaaggggtgtgtgtgttgtttgtatcatgtatatgtacatacaaatacacacatacacatagtattgagaaacataaacttattcaactggttattatagaccatgaaaggaattgtattgccgtatctaaacaaagtgtgcaattgtttgggtttatgtactctgtgcttatgagtgttgtgaatttgtcacttgggctttcacctcagaacaagtccttttttatttctacctcttgaaataatagttgttcactcaaagctcagaggtggtagaaactggtagcagatatcaggaaaacaagaataattgtcatttactattattggtcagtttggttctttattatttccttggaaattatacacaatcagaacaactacttgagggttttttaaacctcaaatagtataaaaatagcattttatcctaatcaaagcaagttttattcagtgtttttctatgatcgaacaaggagtggacaaatatatattgagcacttgctgtatgacatgctgaggcattcgacattcatgatttcatttcttgtagcattataattattatgcttcacaacaagccaatgggctaggtgtcattatgcacatttgaaaagtaggggccagtcgtggtggctcacccctgtaatcccaacactttgggaggccaaggcaggcagatcacaaggtcaagagatcgagaccatcctggctaacacagtgaaaccccgtctctactaaaaatacaaaaaattaaccaggcatagtggtgggtgcctgtagtcccagctacttgggaggctgaggcaggagaatggcatgaacccgggccaagcttgcagtgagccgagatgcaccactgcgctccaggctgggcaacagagtgagattccatctcaaaagaaaaaaaaaaaagaaagagaagaagactgaaaaagcaaaactaaaactaacttgccccatggctctcaactagtaagtggcaaaactagcaactttacaactatctgactgatatcaaagctccagtttgtgtttctcagctatacgtgtctttttaaaaatgaaggaaattaaatttcagcatcaaattacctggctaatttagaaatgaagggttaaaagtaaatagaaaatgagaaatttaaaaatattttttggaaggaaatacccaaagagtaaagtgaattaaatcagcttcttttctacttgcttattaataacaataataatgctaacgtatcctacaaagcacatagcagaaatgtctaagaaaactgtgtacctagtaaatatgtattaacatgtttacatatgatttaaagatgactaaaatagaggacagaatgcccaaaacgctctttttctgtttaggatgaaaccattgaaaaaaatgcttcagtagtctcttctagaaattgaggggaataggctaggtcatctctaaactctcttcagttctaagattctttattctttctttactttttctaagcactttgacatagtactatccatttattttcaagatgttcattgaaaaataaatattatagggaatagatgaataaacatggctaattacttagaggatttctcacagattagttaacatacacccttgtattagtcagagtagataggttatgctgtagtaacaaaccaacctttaatgctcagtgatataagacaaccaaagcttatttttagctaattatacatatttactgtaagcacgggaactctgtttttgtagttattcagggacacatgctaacaagtgtatatagccaagctattcaagtttaccaattattgtgctatagggaatgaggaaatatggtgaatctaacactggcccttgaagcctctgcttacattccattgaccaaagcaaatcacatggtcacatctcacatggaaagaagaggcagggaagtacaacttagaagaggtctgaagtgaacgtatttgttgaaaaaccctaatggatgtcataaaactaatacaatgtgaaatgagaatctggtcatatcctggtcttacttaaaatcctacactgtagtgccttattatggcctttggggtaaatatgtatctttgacatggcccttgaggctctgttgatctgacactcaccttcaaaacttcatcttttgattcttcccttttcgctttcttcactgcagtcatgttggtcaactcatccaacatgttgttttcataaatatgttcttctccctcctgtttacacatctttgcacttctgttcagtctacccactattctataagctgaatcctacccccaccttcacaactcagtttaaacaggactaactcttggtaactgtccctgactttctaggaaaagatccccttttatgtgttctcatagcacctgatgcattttctcaggatataagctgtgtctgtttaactcaccaaccacagcacaatacccagcacataatcaaacactgaaatgtttgttggccaaatatgggttttagattagtgcccaaagattacattaccagatttcacagaaagaatagacagctttaccagcagagctgttaggaaagggaccaataccaggattgcttatataagaggatgcgtagccagatgcctcctaggtatatattttattgcaaaggttactctcaacatcagaatgtgttcctgcttagttctacttgtgggactttctgaatcttgttttctcctttggtaaaaatgagattttctggcaagaatatgtcaatttttttttatcctccttcaagagtctaggatgtatttctagataaagaacttattagatactagataagtcagaaaatataaactatgctttggagagaacaaaacaaaggagagaacagtgcaggttggggcaggtgaaggagtcctcctttagggaaggaggtgtattagtttgcttgcgctgccataacaaaataccatagactcagtgaattaaacaacaaaaatttattttctcacatctggaggctggaagtcaagatcaaggtaccagcagcattggtttcctctcctttgcttgaggtggccactctattgctgcctcttcacatggccttttctctgtgcatgcacatccctgatgtctctttcctgtgttccaattttctgttcttataaggacaccagtgatattggattagggtctaccctaacgacctaattttaacttaattacctctttagaggccctatatccaactacacttaaacattctaaggtactagggcttagcatttcaatatatgtattttaaggaatacacaactgagctcctaacagaaggcaaagaaggagtgtactaaggcgatggagagattgagatagagctgacatgctgcacatgtcagcaggcttgcttgtgctatgtgagattgttgaatgggtcactgaaacatgacttccttagaaaagcagttctgcaactcttctgtctctgctccatcttcctggtattgcttcccaggtcacactttcaaatactcatttaaaaaaacctacttatttatttacttatttgtttatttatttattttagagacaaggtctcaccctgttgcccaggctggagtgcagttgtgtaagcatagctcactgcagtcttgaacacctgtgctcaagtgatcctcctcttgagtagctgggactaaaggtgtgtgccaccatgtgtagctaatttttcatttttttttttttttggtagggatgggggtcttgctatcttggccaggctgttctaaaactcctggcctcatgcagtcctcttgcctcagcctcccaaagcaccgagatttgacaagcatgagctactgcacccagcccacaaaaactcttcttatatttacagttcctggccaggcacagtggctcatgcctgtaatcccagcactttgggaggccgagcaggtggatcacgagttcaggcattggagaccagcccagcaaacatagtgaaaccccgtctctactaaaaatagaaaaaattagccggcgcctgtaattccagctactcgggaggctgaggcaggagaatcgattgaacccgggaggtggaagttgcagtgagccgagatcgcgccaccgcactccagcccgggtggacagtgtgagactccatctcaaaataaataaacaaacaaatatttacagttctttaagtagtgtctgccttctcccctatactgtgtcataagggcaggaactttgtcttttttgttcactactgtacgtctagtacctgacaatcaacatgccgcaattttttcacatgatagtgtagcaggacgagccacagacaaaactcctcagacaccgagttaaagaaggaaggggtttgttcggccgggggcatcagcaagactcctgtctcaagagccgagctccccaagtgagcaattcctgtcccttttaaaggctcacaactctaagggggtgcgtgtgagagggacgtgattgattgagcaagcagggggtacgtgactgggagctacatgtactggtaattagatcagaacaaaacaggatagggattttcacagtgcatttctatacaatgtctgtaatctatagataacataaccgattaggtcggggtcgatctttaactaccaggcccagggtgtggcgccgggctgtctgcttgtggatttcatttctgccttttagtttttactttttctttctttggaggcagaaattgggcataagacaatatgaggggtggtctcctcccttaatagaataagtggaatatgatgttaaataaaagagatgaagacctggatgttcccaaaggtctgtaggcctcagccagcctcccagagggagcagagcctctgccactgagtctttagacaaacctttccttccccaccatccccaaaattacttctgcccccccaccccaattaaataagatttacctttgggacctgttgaataaacctggagtgattttttaggtttctgattgccttcttcctaaaatatatcatttcgttgatgcttaaagtaaataaagaaaaagtatttcattcctcaaccagtgataagatttaaatgcaaacctgtgattgaagctgagatttcaatttgttgaaatgtaatcagcccatgtgcatgtgtaaatgactctcaaccaagattttctgtttaaatatggagagaagagagagaagtggcagggtagaagagactgcagaataatgtttcagaagagtaacttcccagatttgacactgcactccatgtagagcaagttggagtgttagtgtagagagcatttttttgcttcctggctgtgggaagtcctcccctaaccacctgcagaaaataatttatccatgcagggagcataagggtcttccagaaaagagagctgatagtggttcacagtattttgcgctttactggtctgtgattatggaatcccagatttgcaacaattgaagtctggttttgttaatgttattctttaagatgtcagtggaaacatttctctcccagttcccttgtaaagtgaaaattacacatcagttgtaagccagcttttaaacagatttctttaaaatatgtatttttttcagttgtagcaatgtcatgtcatttaccttgtaagaaatcctatactgagaaatataagagctgaacatctttcactgtgtttcttcacgactgtactcaatcttattagattcttctactgttaagctaataattaatttggatttctatttttttattgagtagtgagattcacatttgacttgccagaaaaataaaaaacttttcagtggcagcaaggcagataataattacttcttggacattcgtttagcagccaggtgctatagtgtgctttgtctacaaatgtgcttttaaatgttcttatcgaaaagtgtgtccaggaaaaacctttatattattatgatctattttactcattttagttctaagggtaatggaatttcatgtcatttgatttgtaatgaacaacacaaagatttttaaatattctgaagaaagttttgaaaatttaaatctaacagaaaagtaagaaatatgtttaatagcatttcaggtataaaatatacaccaagagaaaaaattaagttggcaataagttatagttaattttgtatatggtttctataaggggaaaacaggtcattagcctgatcatgtgcatctttcctgatacctttcttctcattccctcttccattatcttccctccacttctaccatccttcttcagccaggatatatttttaatggctgatttatccaactcttctctttttttctgggccccctagtcaaacctgccccacatagtcaaaccacaactcattaacaaccctcagaggcaaggtaagaggacaaaagagaaaaggaagtgcccacctgtgagatctgaattcagcagttaataggtccccctcttacccctcaccccaggctccaaaggggctttcttcgtattaacatgtgggaaacacaagtcccaaagctatgtctgctagtaggctttcctgctaatttcaccatcattttattagacttcacttatatcttacttcatcagcttgccattggcaggtgggcagattttcctcagtttttggcctaactccaagatatatacaacagcaggcaagatccaggaaagcaaaggtattttgactatttttcccagtttgctttaatagcttaggacaagtaacctgctggaaggcagcagtttagattattgacaagaatatgagtttggaagtcaaatagtcacaggtgaaatcccaactccacccccttgtagctgtttgaattgactccatgagttttagatcttcatcaacacaaaggacagggaaagcacaattgctttagaataggatagttgcagcgtacgtagctttggaacctacatgagattctgagggttgtgtgcaggggtatatgtaaaatacaaagagagctggctttgttaaacagcaatggtagaacaacccaggtgacccggaagttcattatcccctctcattggtagctcgaggagcctgagttagcttaaggaaagaacaggcttccatttcaactacttctttccattgcattgatgttcactgcacttctctgttccttataatgagtagaatattatagggggagagtttcacccttttggggatgcatgcagtccatttctgcctgtgtgcactctcctatgtctgtgcttttaagttttctctgagtttatcccattttatatttgtactatgaggcactgataaggagtgctaatgactcctttgcataacagttggagattagctagggacacataccacccactctggggttaggtgtgttttgggaagcagcagagtttaactggttcacccagggtggaaacaatcctccttggaaaggctggaaccaggtggctgctaaccccgaatcatgtctggtggcatcataggagtccttcagacaccaaagcctccaaacccacaagtcactgggaaaaggtggattttctgcaaaagaaaaaccctggcgagtgagactcatggttgcctaaattttctaagtcccaagacctcactttcagatgtttcttccccatgtctggggtgaaaccatgcatgatttttgaaaaatgtccaccacaagttgtgatgtgcactccaggatgagtactgcatgatacataatctccaaagttccatcagctctttagttcttgaggtaggtatcatcagaaacatatgagctccttcccttttggattagaggaattgtacaaaatgatttgtttttatcttctatcttgccttcatccccagatttcttgcaactttcatcatttttttaataaaacctaatgtcctgtgttgcaactggagtagtaggtaggtgttctcctgccaagttaagatgtttatacaacgtctgtttgccatactaatgcatgctgtggaattgtcttctgccctccatgtaaggaccacttctaccttctcaaatacataacccatgtatagtttgctatctgacttatagcaagcattcagatattttcctggcctatcactatgtagcaggacgagccacagacaaaactcctcagacaccaagttaaagaaggaaggggtttgttcagccgggggcatcggcaagactcctgtctcaagagccgagctccctgagtgagcaattctcctcccttttaagggctcacaactctaaggggatgcacatgagaggatcgtgatcgagtgagcaagcagggggtatgtgactggggctgcacgcaccagtaattagattggaacaaaacaggacagggattttcacagtgcttttctatacaatgtctgtaatctatagataacataaccgattaggtcaggggtcgatctttaactaccaggcccagggtgtggcgccgggctgtctgcttgtggatttcatttctgccttttagttttatctttttctttctttggaggcagaaattgggcataagacaatatgaggggtggtctcctcccttaattatagtaaccagaagacaggcctcatcctagaggagctcagaggggaggacggcgggagtcctaaggagtcatagcctctagagacgaaaggaaaatctgaggcaagggttcttttcagctttttctttaactcccccaccccccaccaaaaaactttcaaatatcttaggagctgcttatgccaagagtgatgaaattttttggcagttactgtgatatttgtgccagttcacctccttagggtatcttgctgataagatttaaatgatgccaacataatgctgttggaccatttgtctcttttcactgttttgtgcatttatcccatgctgcggcaccaccggcgtcttctgaatggatactgaggcagccaaatcctgactcactacagtcctacactgtgtctctcttgcttggccgagaaaactgttaggttctctcttcatctgtcaaatgtaaggatattaggcactccctgaaacttaactgctgaggtacaaagcatgaatttaggtgaagacttaatggaaagaacagcaaaatgtatcaaaatctctaaataggtgaaatagtatgtaagggcaaaatgaagcagaaaaattactagagagatgagaatgtaaaatatttttcttacttcattctagtagaacaatctataaagagggaatgcctaagttaaaaatataactgtaagtagactcttcaaaatgattaggcaggcagttagattttcatgttgcttcacatttattaaccttcacccattaggctgttgttggggtcatttgtatgatcttcaaatattcaggccttctgtagaagccttctaactcgagcggaaatggatggctttctcctagagggaaattaaggggtccaaagatacttaacagtgcatacagtaaagagagaaaaaacaggaaaaagtcgaggattggaatctccagcttatagagctccattctgctccagaacaaactctgttttattcagttacttagttacacagcacatcagagagactaaactattgacccttgaggtacagaaaagaagtgagccaaagactttacgagattatttcctagcagaaaattaaaataaaatctcactgatttctccatctcttccatcataaggtgaacagtaagtaaaggaagtggagagtttaagggacagcgttaggaaaaacttctgagctcctacatgtgacctggataatcataactttaaccctcaactgcctttccaccacctatgatgttggggtttcagaaaaggtggaattggaggaggatggattttcttgtcaagatcttgggcaaatgatatgctgaaagaaccacagctggagtccaggggttacatagaagtcactggtattacaggatatttggaggtcaaaactttaaagtattatccataatacttgaatccaaactgctcttggtaaatatttctgtttgtttccggtgagcccattatttgtttatgctttctgcctcattggccattctacatattttctagaaaatgttctatgatatattttacctgcctaattttgagggcagttgaaaccattatgtgtgttactacaaaaactgtgttcttacacaagtaaatttagagacacaacagctaaaagtctttcttttagctgttgtggtattttcactacttttagtgtaaattcaggtctgttacttaacatggagcttccgccacagaggccagaggagcacatcaaagccaaaagcacagcaagtcatcggagttcagattcttttctgcttccctgcagaggggtcaagaatataaacatactcaactgctacagcaggagggaacattagcccatcaacagaaccaaacaggaagcaccaaatgggcatttcttctgtttattttgtgattattaagaaagacgtagtttagttccttcaaccaaatttgtcaatgaaacatagaaaacatacaaggtacagtcattttggttaggggagagtctgattgtgaaaggattcaatgctgttttttccagttatttcacttactacaatgtatacaataagttcttagggtgttggaatttaaaactaattaacatttgttacactcttttgagattcacattatgagtcacttagattttaatcaaatttctcatacgtttcctttctggaccgaggagactgtgcacatattgagcagaacaattttgcctcccttcagtttgagatggggtgcgaagagtttcagatacagccaggaaatacctcaaatggcactgcagaggtctgtaagactgaccaaaatttaaaatcttggtatatccattccattacatcaaagtaagttctagtactccactgccagtatcagcagataataaaaaatgacgcacattgtaatgattcaagcaagcccagtaaaggagcaagaaggaatgtaatatctatttttgtgaaagtttccagaaataaatcaacaaaccactttattcttcttataattacttggaatctcttaattccagaagactatctggcctgctgtttaaaaggaagtgagtgttccctttcagcttgcttcactatttttctcatccagtcagtggtatgggataccaaggatgggataaggagagtagttcacccctagtacaggcaataagggctgctttgtgtgtagaaaattgaaaagaaataaaaataaaataataataaaagccagttctgcttactacgcctggcagttccgcttactatgcctggcagttccaagcaatatcaacaatactactcctctttgaaaaataaaaaaacttttgttggtctaagttctaaacaactgctgcagttgctgaaatttaacaaaacaaatgtaagctgaatattacgtttttattattacttattatttaataaacattgcattctatgtggaagtaattctaactctcaaatgcacatggactcagctatacttgtttatttcaagaataagcagtcaagttctgtttcatttttataatcactctgctgtaattgtttatttttagtctgtgtttaaatacaggcttacatagtaccacagggactggagatgtgacctgagcctgaagcaagctcaaataattcacaatcattacaagctttggagaattttaccaaatatgatagaaatttatgatgaattttctggtgaagttattttagtggaaatttttcaacagcagaaatatttgaaaactgctggaactgatcccaaagaaaaaaggatatgggtagtactataatttctggaatttattgtgaaatgggatttgtatgaatctgatgaatgtattcttattttaaagatttcatcactatttccatatctgttatttcacgtgaaactttttgaaattaaaataaaaaatgttcttcaatcaactatgagtgatgtcaacacatctgaccgcactgattttactgaccatgactatataaagattaatttgacaaagcattgacaaatttgcaaaaattaatgctcaaagtcagaaaacataaagtgattattcttcactgaggcaaaccagtatataggtataaatatttttcttttcttttctttgagatggagtcttgctctgtccccaggctggagtgcaatgacgcgatctcagctcaatgcaacctccgccttccggattcaagtgattgtcctgcctcagcctcccgggtagctgggattacaggcgcctaccatcacgcccagctgattttttgtatttttagtagagatggggtttcatcatattggccaggctggccttgaactcccaacctcaggtgatccacctgcctcggcctcccaaagtgctgggattacaggcgtgagccactgcgcctggcccatactaatgtacttaaaaagtattaaaccttaactttttgcattttcagctaaaatatatactttattaatttattattagcatgattacatagtcaaaattgaataaatgaaaactttcactgcctgcatttcttttctggacataattattatttgtttcatttcaaaattattactgaaaatacttttatcatacagaggaaggcgtattaaaaatggtccctttcaggcatcaagtacctagctatgccactgcatgcgtctattcattttaactcaaaacaaaatgcatttttaatctttttggtattacatatgtttttgacaattatgccaaaaagcaatttattttaataagggaactcttaataatcaagaaatagaaagagctacccttaaatacaactctcaactaccaccgattttggtaataactatttctagttaatatatttgatgttttgattattttattataagcttagtaggataagaaaaatacaaaaaatacaactgcataaatctcaacatgatgaaatagaaattatgactatctccttatgactcaaaaaagctgaatcactcattttaaaccttccagtctagcaaataccctgattttatgccttttcagaaaacagaaaaacaaagatgttctccaacctagcttataaagtcaacacaactttgatataagaacatgaacattaaatgatgaggaaaaattgcaggcaacctcaatcatgaacagatatgcttaaattcttaatattagataaccatacaacatgtatatatgaaatgtcacaagttgagtttgttgcaattatgcaatgttagtttaatattagaaaactgagaatttatgacattaacagaataaaggaaaaaattatatgataattgtactagatgcagaaaagcagttggttaaagtaagcatctatttatgattaaaatacatctttgggcaaacgaagaatagaagagagcttctttaatcaaatacagggtatctacaaaacaccaataataaacaccatagaaatactgaaaactttctttctgtgatcaggaataagataatagttgtattagttcattctcttgctgctatgatgaaatacccaagactgggtaatttataaaggaaagagatttaattgactcacagttctgcagggctggggaggcctcatgaaacttacaatcatggtggaagagaaagcaaacacatccttcttcacatggtgacagcaaggagaagtgcactgcgaagtggggaaaagccccttataaaaccatcagatctcatgagaagtcactcactatcatgagaacagcatgggggaaatgcccctatgatctaatcacctcccacgaggtaaccccccaatatatggggattacaattcggattacaattcaagatgaggttctgggcggggacagagccaaaccatatcaatagttaccaacatttctaggctacctgccactgaaagtcctaattagtgtggtaaggaagaagaattgaaaagaacaagtaggccgggcacagtggctcacgcctgtagtcccagcactttgggaggcagaggcaagcagatcacgaagtcagggaatcgagaccatcatggccaacatggtgaaaccctgtctctactaaaaatacaaaaattagctgggcatggtggcacgcacctgtagtcccacctacttgggaggctgaggcagtagaattgtttgaacccgagaggcggaggttgcagtgggccaagatggtatcactgcactccagcctggcaacagagtgagactccatctaaaagaaaaagaacaagtaaaactgccattatttgctaagactatatatataaaaaaactcaaagactctacagatagttcttagaattgagtttaataaaattgtatcccagcaaccttgttaaactcaattctaatctcgacttgtagattttaaaaatttcatttctatgatgagcaacaacagaaaataaaactgaaaataatcataataggatcaaaaatatttaaaacctaaaaataaatattttagcagttgtaaaagaaacataaaacattcccaagagacattaaaaaagacaaatcaatgaatacttgtactacatttatatattggaagactcagcatttttaaaatgttaattttcctgaaactgagctttagatccaaagaaattcaaatcaaaatcccagttggtttgtgtgtgtgtgtgtgtgtaagagagacacagggagaaaaggagtttgaaactcaattctttaaaatatgaaaaaaaaattaagagaaacaggtatagacaagacactcttgaataggagggaaaaggtaagaggagttgctctactggatattaatacttatgtctgtgataattaggatagtacagtattggggtaagaatagacaaaaatcagtggaacaaattggagtttagaaaaaagacacatttgaaataaattaagtgtttatatattaagcaggacacacacaaaaaagtacttacagtaaaggaaaagactgatacttagagttaaaattaagagcctcagtttatgaaaagacacctttaattggtaaaaagtcaagctacatggtaaaatatattacatatgcaagtcttgtgcctggtataaagtacatctacaaagtaaatcaatatataaaaaaatccaatgaaaaatggacaaaaagacttcaggcatttcacaaaaatagataccccaattgccagcaagtataagaaaaggtctttgatttctttagtaatcaggaaaatgcaaattaaaaccacagttatataccatcagacttcctttagaatagctaaacttaagaatcctgataatctcaactgtgggagaaaatatagagcactaggaattcttattcactgctaatgtgaaaattggtaaatgtacttcctcaggataaaattttcaatgaaaacggaatagaatttacatatattcacataaattcatgcatcccagtggaaagcactgacctattttttgtcttgtcttagtccattttctgctgcataacagagtaccatagacttggtgatttataaagaaaagagatttatttggctcatggttctggaggctgggaagtccaaggttgagggaccatatttggtgagggcattcttgttgtatcataacatgatggaaggcatcacatagtgagacaatgtgagagagagtgagagcatgaaacagagaaaaagagggccaaactcctgagataactcacttctgtgataatgacaatccatgaagaaagtgcccccatgacttaatcactttgtaaactccccatctcccaataccgttacattggcaattaattttcaacatgagttttagaggggattttcaaaccatagcatgtctcaactgatctttatggtatgtacatatctactttacagatgagaaaagtgaggcttcagaaagagaaagatttttaataaatccatgaatctactaagtggaagagccaccatctaaacaagctctttctcattctcaaccacatattctttcaccatgtttataaaagcatcctttaaaaatatatcctgtttttccttatacatttataaatttctctttaaatttaaaaatatcactttaattacattacttgatgccttttgctccctactcagaggtaagacaatgcagtttacaaaatattgcaattcttgagtccaggagatcgaggctgcagtgagccatgaatgcaccactccactccggcctgggtgacagagcaagaacccctctcaaaaacaaccctccaaaatattgcaatatgtgaaagaagtttgactctttgctatactgatctctctcctagatgctttattttaatgtattgtacttagtgaacattgtcgtactaatctatttacacatttgtttcccaccattagattataatattcttgaggacaagttcttatctttgtgtctctgtatcttcagcatatcacacaattgtctgttgaatgactagatgagattttattctcaaggctttgactcagagtaggcaagtccccatttcaacccttttaaagaaagcttgaaatcactctgctaccttctagcagagttaaggtcaaatcatattctgaaagataaaggattctaccttatttttccatttgaagtgattcccaaataattctactccctgttggtctcttaattcacgcaaagcccacatttcacaaactatatccagagaattaggctctctttgccaaaaatactgtattcgaaaattttctcccattctgtaggttgtctgctcactcttaatagtttccttgctagatcccatttgttatttattttttttgccttcattgcaattgcttttggcatcttcatcatgaaatctttgcccattcctacgtccagaatggtattgcctaggttatcttccagagtttttatagctttgagttttccatttaagtctttactccatcttgaggaacttaaacaaatttacaagaaaaaagaaaccattaaaaagttggcaaaggatatgaacagacttttcaaaagacatgagtgcagccaacaatgatgaaaaaaagcccaacatcaatgatcattacagaaatgcaaatcaaaaccacaggaaataccatctcacaccagtcagaatggctattaaaaagtcaaaatataacagatgctgacaaagttgcaaagaaggaacctcccactgttggtggaagtgtaaattagttcaaccattgtggaagacagtgtggcaattcctcaaagacctaaagacagaaataccattggcctcattactgtatatatactcaaaggaatgtaaatcactctgttacaaagacacatgcacatgtatgttcattgcagcactattcacaatagcaaagacatggaatcaacctaaatgcccatcagtgatagatttgataaagaaaatgtggtatatatacaacatggaatactatgcagccataaaaagggacaagatcatgtcctttgcagggacatggatggagctagaggccattatccttatcaaactaacacagaaagagaaagctaaataccacatgttctcacttgtaagtgggagctaaatgatgaaaccatatagacacaaagaggggaacaacacacactggagtctatgcaagggtggagggtgggaagagagagagtgttaggaaaaataactcatgagtactaggcttaatacctgggtgacaaaaaaatctgtacaacaaacccccatgacatgtttacctatgtaacaaaactgtacttgtacccctaaacttaaaagttaaattttaaaaaaagatattttcttctcctttgtttgattgtactgttaaagacaaaatacaacaaatttagtttgaagatctaattggcttttatttgtgattctagaatcaggcaacacttcattctatgaaacagaagtagtgatccactggatatgatagaatggttggtttttgtaaggtgggaataagacaacagaacgataaataaaagtgcattgatagcataagttactacaagtcacttttcttgtaagagttaaaacagagaagacctctttattatgctgacttaggaagattgagctctttgactagttgctgtgaatctcctgttttcaggaaaaactgctctgtttggggctctatcagcttccttaaagttcagtttgattatgaggcactttgcatgagtgacactattttggtctggtctggtctgtgggagtctggtgcagaaggctggtccaaaacaatggattcccataaactgtaacagcacttagtcataaacatctctttcagaattatgttcagcatgtgaatgtccctgatgtccatttgtagtcagatatcaactcctttggaatccaggaagaattttattttgactacatttaatgtaaatctgttttacagaagaatttaaaatatatatcttgcagtatatgaacagaagatacactcctattgaaaaagttcttgatgacatagacagaatctaaatagttatctagcatttagtctgcaagcctacagaatgctagataatgtgatacagttaattttagccaaagtcttgctcatctgaatgtaacagttataatttgtaagagttgtgttaaagataaggcagtattatttaaaaattagtactataatgccacctacctgagtgatacatggtctaatgtatttgcttgcatgttttaaagaaaaaagtaggccgggcgcagtggctcacgcctgtaatcccagcactttgggaggccgaggcaggcggatcagccaaggttgggagttcaagaccagcctgaccaacatgcagaaaacccgtctctactgaaaatacaaaattagccaggcatggtagcgcatgcttgtagtcccagctactcgggaggctgaggcaggagaattgcttgaacctgggaggcggaggttgcaatgagctgagatcatgccattgcactccagcctgggcaacaagagcaaaactccatctcaaaaaaaaaaaaaaaaggtaacatcaaattctattagtacaattatattgtgctcaaaatatctgactatgtattttaggctaggttcatagtctttgtagcaaaaaatattaatcttactaaattcagctttcaagaatcattaaataataattttattgtcagcactatatgtaaggctacatttcatgactatagattcaaagcaacaaaacagcatgactataatgagaatagttaatcatagtgatttattaataatgccagtgtttacattttatctcttttaatgcaataatcccatgagctgtaagtacattttactatcattatccctattttacacataagaaacacaaagcacaaagagtattgaatattagctgaatatcacatagctgataagtggtagagctcgtatatagagctgactccagaaccctggctcctcactgccatactacagtacctcatatatatgaggaaaatatatataagaaaagttgctttgtgtgagatttgctttagctaacttttactacagtatcattatttgtcatttaaaattagaaatagctgggcatggtggctcatgcctataatcccagcactttgggaggccgaggcaggtggatcacgaggtcaggatttcgagaccagcctgaccaacatggtgaaacaccgtctctactaaaactacaaaaattagccgggtgtggtggtggatgcctgtaatcccagctactcagaaggctgtggcaggagagttgctttttaatccaggaggcagagtttgcagtgagccgagatcacaccattgcactccagcctgggtgacagagcaagactccatctcaaaaaataaataaatgaataaataaaataaaactagaaacactctaattgcggcattaatccagataaattgaaaaacattgatattactgatgattacaaagagtcttgaggtcaaataaaagatttagaaaaattatgttttgatgaagacagagttcagatatgttacagtaaaatgagtttacatacttcttatgaccattattagtaagcaaaaatgtgtaattttgtttttaaaaaatggcactgatgacattgactataagttcattctattctaatttatttagactttttattcctgcattcagtaacacccttagcagttttgaggggcattatgaaatttggtatgattatgaagactataacttcagaaactagaagaaatttgcagttaccttgattttgtcaggtaagagaaagaacaacaaccacagagaataaacttcatcagttctttgctctaacaggagctttgttattcttcatgtctatgtttgatactccgaataaccttcattttgcatcctttctttgtgccttcctttctgtctctttctctttctttctttctttctttcttcttaccttctttcttctttcttttttttttttttttttttttgacggaggtttgctcttgttgcccaggctggagtgcagtggtgcaatctcggctcactgcaacctctgcctcccgggttcaagcaattatcctgcctcagcctccctagtagctgggaatacaggtgcctgccaccaagccaagataattttttgtatttttagtagagacggggtttcactatgttgcctaggctggtctcaaactcctgacatcaggcgatccacccgcctcagcctcccaaagtgctgggattacaggtgtgagccactgtgcccagcctactatgcatcctttcacagtgaaattttttaaatgtggatctcatgaatttagagttcattataattcacagacagaaccaaagattacctttggcttaggcgcagagagagtggcaggctcagctaagcaatttgactcacacccaaccagcaactgcagtttttgttacctaatgtgcaaaatccacacagcttattctatttacaaagttgtaaagtgatagaaagctttttccattttccagtcaagtgttgtacagggtgtcagcagcatgtttattaaaacgaagcaacttcatgacagttaatcaaaattctccagctttccattgtcaagaatctctggacctctgagggcttgcccagacatttttgcccaggtccatgtggaactacaagttcctctatgcctccaaatagccaaacagtgtcccagaaatgtttgctccaatctttctcttatttgtctcatgcgccctgtgctagaagctctgttcatctgtatccatttactggtaacatgctcctgttcaacagataaatgagttggtcttcttgtctgtaactggctgaaaaagtgcagggtgagatctcctccaccccagtcctgtccgtctgttcatcatattccatgaccatgtgtcctgatcttttcatctcccatagctgatgtggctactctatgcttccaaaaacttacataatgttaaatcttagaacatttacaagttgtcagggaacatgtacccacccaaaagtaataacattccccccacttttcttcctttcttttttttttttaatctcatggtttatttcagtggaattgaaaaaagtagccaatttttttcacaattggaatttggggttgatgaagggaactggtaaatacagtttggaaagcaatgttctgctaagaaattcagattttatgagccaaggaaaaccatcatatctttttgttgttgttttaatgtgaaaagatcagagctgtgctttaggaatattaatctgactactatgttttgaatgaattaaaaagaggagaaaacagagtcatgaaatccagttactgctgtaggatcaatctgggtgagcaagtaatgaaagcctgaactagtgaagcagcagtgggaatgaagaggagggagacaatggtcagtggaattcgtatgacttggcaattgagtttatagttgaggaagaaggaaatgtcaaaggtaacaggttttgagatgtctattgcccattcctggtgctaataaaattatagaaatatggaacagaagaagaatctccattctgcatttaggatgttagtgaaacatccacaaagaggttattaaccaggcaatagaaatatagaaaccctattataagttttgaatgtctctttactgatggactatgaaaatagatggaatttctatatgcgagtgtggagtatacaaagatatgaattgcatgggattttaaaagtcactgagaaaaaggattgaggaaggaacaaagtaaagaaacagtcaagtagtgtgaggggactcatgagagtacagaatcacagagagccagagagaagagtttcaggcagaaggtttatctgcttgtggtttgttgagcttcttgaacctgcagattaatgtttttcgtcaaatttagtatgttttcagtcattctttttaaaaatatttttctgtctccttctctctcttgtttccttctggagctctcattatatgtatattggtatacttgatgtcccacaggtctcttttcttcagctgggataatttctgctcatctgtcaagttcattgattctttcttctgccattttgaatatgctattgagggcttctagtgaattcttcacttcagttttcaaatccagaatatgcatttggttcctttttctaatttctatcacctgagagtttctgtttattgattcattgctgtcattttttttattattattattctactttaagttctagggtatatgagcacaacgtgtaggtttgatacataggtatacatgtgtcatgttggtttgctgcacccatcaacttgtcatttacattaggcatttctcctaatgctatccctcccccagcccccaccccctgacaggccctggtgtgtgatgttccccgccctgtgtccaagggttctcattgttcaattcccacctttgagtgagaacatgtggtgtttggttttctgtccttgcgatagtttgctcagaatgatggtttccagcgtcatcaatgtcactacaaaggacatgaactcatccttttttatggctgcatagtattccgtggtgtatatgtgccatattttctttatccagtctatcaatgatggacatttgggttggttccaaggctttgctactgtgaatagtgctgcagtaaacatatgtgtgcacgtgtctttatagtagcatgatttataatcctttgcatatatacccagtaatgggattgcttggtcaaatggtatttctagttctagatccttgaggaatcaccacactgtcttccacaatggttgaactaatttacactcccaacagtgtaaaagtgttcgtgtttctccacatcctctccagcatctgttgtttcctgactttttaatgattgccattctaactgacatgagatggtatctcattgtgaatttgatttgcatttctctgatggccagtgatgatgaccattttttaatgtgtcagctgcataaatgtcttcttttgagaagtgtctattcatatccttcacccacttttcgatgggataatttttttcgtgtaaatttgtttgagttctttgtagattctggatattagcccttgtcagatgggtagattgcaaaaattttctcccgttctgtaggttgcctgttcactctgatggtagtttcttttgctgtgcagaagctctttagtttaattagatcccatttgtcaattttggcttttgttgcaaaatgccattgccatttgcattttggtgttttagtcataaagtccttgcccatgcctgtgtcctgaatggtattgcctaggttttcttctagggtttttatggttccaggtctaacatttaagtctttaatccatcttgaattaatttttgtataaggtgtaaggaaggcatccagtttcagctttctacatttggctagccagttttcccagaaccatttatgaaacagggaatcctttccccatttcttatttttgtcaggtttgtcaaagatcagatggttgtagatgtgtgctattatttctgaggcttctgcctgtaccattggtctatatatctgttttggtaccagtaccatgctgttttggttactgtagccttgtaatatagtttgaagtcagatagtgtgatacctccagctttgttctttttgcttaggattgtcttggcaatgcgggctcttttttggttccaatatgttaatttttaaaacatggtttattttagttatttgaatgaaatagagtgaaatagctgcttttaaaaatagctgcttaatatttttttgtctacaagtttagcatttggggacaaccagagactatttttgttcaattattttttttcctgaatatgggtcacgtaatcttggtttttgcacatattataattattttgttggaaagtggatatattagataatatattgtagtaagtttggattctaattttttttaactttatgaaggctattattgttgctgtttttttttttttttcgagatggagtcttgctctcttgcccagagccagagtgcaatggcgcggtcttggctcactgcaagcctctgcctcccaggttcaggtaattctcctgcctcagtctcctgagtagctgggattacaggcacatgccaccacacctggctaatttttgtatgtttagtagagatgggtttcaccatgttggccaggctggtcttaaactcctgacctcgtaatctacccgcctcagcctcccaaagtgctgggattacaggcatgagccaccgcacctggcctattttttgtttctttaagtaacttgcctgggcaaaatttgtaaaaacctttttctctgccatttgcacatgctgatatttctgctcagttaaaatatatacatacaggagaggttccaagatggccaaataggaatagctccagtctacagctcccagcatgagtgatgcagaagacaggtgattcctgcatttccaactgaggtagcaggttcatctcactggggcttgttggacagtggatgcagcccacggagcagggcggggcatcgccttacctgggaagcgcaaggggtcagggaattccctttcctagccaaggaaagccatgacagatggtacctggaaaatcgggacacttccaccctaatactgcgcttttccaatggtcttagcaaatggcactcctggagattatatcctgtgcctggctccgagggtcccacgcccacggagcctcactcactgctagcacagcagtctgagattgaactgcaaggtggcagtgaggctgcgggaggggcgtctgccattgctgagtcttgagtaggtaaacaaagccactaggaagctcaaactgggcagagcccactgcaggtcaaggaggcctacctgcctctgtagactccacctctgtgggcagggcatagctgaacaaaaggcagcagaaacttctgcagacttaaacgtccctgtccaaaagctctgaagacagtagtggttctcccggcatggagtttgtgatctgagaatggacagactgcctcctcaagtgggtccctgacccccaagtagcctaaatgggagacacctcacagtagtggctgactgacacctcatacagccaggtccccctctgcgacaaagcttccagaggaagcatcaggcagcaacattggccattctgcaatatttgctgttctgcagcatccactggtgatacccaggcaaacagggtctggagtggacctctagcaaactccaacagacctgcagctgagggtcctgactgttagaaggaaaactaacaaacagaaaggacatccacactatcaccatcatcaaagaccaagggtagataaaaccacaaagatggggagaaaccagagcagaaaagctgaaaattctaaaaatcagagtgcctcttctcctccaaaggaatgcagttcctcgccagcaacagaacaaagctggatggagaatgactttgatgagttgagaaaagaaggcttcagacgatcggtaataacaaacttctctgagctaaaggagggtgtttgaacccatcacaaagaagctaaaaaccttgaaaaaagattagatgagtggctaactagaataaacagtgtagagaagaccttaaatgacctgatggagctgaaagccatggcatgagaactacgtgatgcatgcacaagcttcagtagccgatttgatcaagtggaagaaagggtatcagtgattgaagatcaaatgaattaaatgaagtgagaaaagtttagagaaaaaagagtaaaaagaaacgaacaaagcctccaagaaatatgggactatgtggaaagaccaaatctacatctgattggcatacctgaaagtgacagggagaatggaaccaagttagaaaacactcttcaggatattatccaggagaacttccccaacctagcaaggcaggccaacattcaaattcaggcaatacggagaatgccacaaagatactcctcctgaagagcaactccaagacacataattgtcaaattcaccaaagttgaaatgaaggaaaaaatgttaagggcagccagagagaaaggttgggttacctacgaagagaagcccatcagactaacagcggatctctcggcagaaactctacaagccagaagacagtgggggccaatattcaacattcttaaagaaaagaattttcaacccagaatttcatatccagccaaactaagcttcataagtgaaggagaaataaaatcctttcagacaagcaaatgctgagagattttgtcaccatcaggcctgccttacaagagctcctgaaggaagcactaaccatggaaaggaacaaccgatatcagccacatgccaaattgtaaagatcatcaatgctaggaagaaactgcatcaactaatgagcaaaataaccagctaacatcataatgacaggatcaaattcacacataacaatattgaccttaaatgtaaatgggctaaatgctccaattaaaagacacagaccggcaaattggataaagagtcaagacccatcagtgtgctgtattcaggagacccatctcatgtgcagagacacacataggctcaaaataaagggatggaggaaaatctaccaagcaaatggaagacagaaaagcagggtttgcaatcctagtctctgataaaacagactttaaaccaacaaaatcaaaagagacaaagaagaccattacataatggtaaatggatcaattcaacaagaagagctaacctaaatatatatgcacccaatacaggagcacccagattcataaagcaagcccttagagacctacaaagagacttagactcccacacaataataatgggagacttcaacaccccactgtcaacattcgacagatcaatgagatagaaagttaacaaggatatccaggaattgaactcagctctgcaccaagcggacctaatagacatctacagagctcttcaccccaaatcaacagaatatacattcttctcagcaccgtattgcacttattccaaaattgaccacatagttggaagtaaagcactcctcagcaaatgtaaaagaacggaaattataacaaactgtctctcagaccacagtgcaatcaaactagaactcaggattaagaaactcacttaaaactgctcaactacatggaaactgaataacctgctcctgaatgactactgggtacataacgaaatgaaggcagaaataaagatgttctttgaaaccaacgagaacaaagacacaacataccagaatctctgggacacatttaaagcagtgtgtagagggaaatttatagcactaaatgcccacaagagaaagcaggaaagatctaaaattgacaccctaagatcacaattaaaagaactagagaagcaagagcaaacacattcaaaagctagtagaaggcaggaaataactaagatcagagcagaactgaaggagatagagacacagaaaacccttcaaaaaatcaatgaatccaggagcaggtttttcgaaaagatcaacaaaattgatagactgctagcaagactaataaagaagaaaagagagaagaatcaaatagatggaataaaaaatgataaaggggatatcaccatcgatcccacagaaatacaaactaccatcagagaatactacaaacacctctacgcaaataaactagaaaatctagaagaaatggataaattcctggacacatacaccctcccaagactaaactaggaagaagttgaatccctgaatagatcaataacaggctctgaaattgaggcaataattaatagcctaccaaccaaaaaaagtccaggaccagacagattcacagccgaattctaccagaggtacaaggaggagctggtaccattccttctgaaactattccaatcaatagaaaaagtgggagtcctccctaactcattttatgaggccagcatcatcctgataccaaagcctggcagaggcccaacaaaaaaagagaattttagaccaatatccctgatgaacatcgatgcaaaaatcctcaataaaatactggcaaaccgaatccagcagcacatcaaaaagcttatccaccatgatcaaatgggcttcatccctgggatacaaggctggttcaacatacacaaatcaataaacgtaatccagcatataaacagaaccaaagacaaaaaccacatgattatctcaatagatgcagaaaaggcctttgacaaaattcaacagcgcctcatgctaaaaactttcaataaactaggtattgatgggatgtatgtcaaaataataagagctatttatgacaaacccacagccaatatcatactgaatgggcaaaaactggaagcattccatttgaaaactagcacaagacagagacgccctctcttaccactcctattcaaaatagtgttggaagttctggccagggcaatcaggcaggagaaagaaataaagggtattggattaggaaaagaggaagtcaaattgtccctgtttgcagatgacatggttatatatctagaaaaccccatcatctcagcccaaaatctccttaagctgataagcaacttcagcagagtctcaggatacaaaatcaatatgcaaaaatcacaagcattcctatacaccaataacagacaaacagagagcaaaatcatgagtgaactcccattcacaattgcttcaaagagaataaaatacctaggaatccaacttacaagggatgtgaaggacttcttatggagaactacagaccactgctcaattaaataaaagaggacacaaacaaatggaagaacattccatgctcatggataggaggaatcaatatcctgaaaatggccatactgtccaaggtaatttatagattcagtgccatccccatcaagctaccaatgactttcttcacagaattggagaaaactcctctaaagttcatatggaaccaaaaaaagagcccgcattgccaagacaatcctaagcaaaaagaacaaagctggaggcatcatgctacctgacttcaaactatactacaaggctacagtaaccaaaacagcatggtactggtaccaaaacagcatggtactggtaccaaaacagagatatagaccaatggaacagaacagagccctcagaaataataccacacatctacaaccatctgatctttgacaaacctgacaaaaacaagaaatggagaaaagattccctgtttaattaagtggttctgggaaaactggctagccatatgtagaaagctgaaactggatcccttccttacaccgcatacaaaaattaattcaagatggattaaagacttaaatgttagacctaaaaccataaaaaccctagaagaaaacctaggcaataccattcaggacataggcatgtgcaaggacttcatgactaaaacatcaaaagcaatggcaacaaaagccaaaattgacaaatggaatctaattaaactaaagagcttctgcacagcaaaagaaactaccatcagagttaacaggcaacctacacaatgggagaaaatttttacaatctacccatgtgacaaagggctaatatccagaatctacaaagaacttaaacaaatttatgagaaataaatcaaacaaccccatcaaaaagtgggtgaaggatgtgaacagacacttctcaaaagaagacatttttgcacccaacggacacattaaaaaatggtcatcatcactggccatcagagaaatgcaaatcaaaaccacaatgagataccatctcacaccagttagaatggcaatcattaaaaagtcaagaaacaggctgggcacggtggctcacgcctgtaatcccagcactttgggaggccaaagcgggtggattgtgaggtcaggagatcaagaccatcctggctaacacggtgaaaccccgtgtctactaaaaattaaaaaaattagccaggcatggtggctggcgcctgtagtcccagctactcgggaggctgaggaaagagaatggcgtgaacctgggagacggagcttgaagtgagccgagatcgtgccactgcactctagcctgggcgacagagtgagactccgtctcaaaaaaaacaaaaaaaaacaaaaaaaaaaccccaaaagtcaggaaacaacaggtgctggagaggatgtggagaaataggaatacttttacactgttagtgggactgtaaagtagttcaaccattgtggaagacagtgtggcgattcctcaaggatctagaactagaaataccatttgacccagccatcccattactgggtatatacccaaaggattataaatcatgctgctataaagacacatgcacacgtatgtttattgcggcattattcacgatagcaaagacttggaaccaacccaaatgtccatcaatgatagactggattaagaacatgtggcacatatacaccatggaatactatgcagccataaaaaaggatgagttcatgtcctttgtagggacatggatgaagctggaaaccatcattctgagcaaactatctcaaggacagaaaaccaaacaccacatgttctcactcataggtgggaattgaacaatgagaacacttggacacagggtggggaacatcacacaccagggtggggtgggtggaggggggagggatagcattaggagatatacctaatgtaaatgatgagttaacaggtgcagcaaaccaacatggcacatgtatacatatgtaacaaacctgcacgttgttctcatgtaccctagaacataaagtataaccaaaatatatatatacacatacatatacatatatatcaatatttatatacactaatataaaatggatatgtatacatatatacatatatctacacacacacacccatatacatacatacacacctctaaacctggattcctaaaggttttcccatgccagtatggcttagtgattggatagaggttgtgctgaaacacttgagccaatgaagtttctgtcttttgccaaaggatctctgtgtggtaggggagctcactcagagttcaggtgctttcaagctgactcaagctccagcttttactgaccactggaccttttcttatctcttttatgcaaacaaattcaggggtagccgggattgagtgactagctcgggccttctccaggaaatatacacagccagagaagtattctccaactgtgactacagcctcagactagtagagcagttggctttccctgtttacccacctcagagatcagcacttttaccaaatatgctgctgggagtggtcatttctcatcactccagattgagtgagctctcatggatcgtgacagagaagctgcctgtcctcatggcctggcctccttctataaaacctctgtccttactgaagtgaggaggaagggagggcagatatgtgagtagcttcaggctagaatgccacaggttctcattattcttatattcagcagtttttcaagcctaaacacttctcaggttgtatgcctttggttgattttcagagtgctaaaatgattgtttttgtcaattttatccagctttatagttactttttacagagagaatttgtctcctcacttggccataaccaaaagctcaccacttactacctttaaaagaatcacttacatattaattatttcatgtttacatgcatagtctttttaaaaaaatacctaaatgtactactcccttttatagtgtttaggaatctgaacttataattttaagaggctaattagctcaaatccagtttcatttttaaattttatatcttgcttttttctatgtcaaaatgatttatctcataagagaacaggatagtaagaaaactgaaaagtgatcaggccatttcgtatgccttaataaaaactgcccaagatggtatggttgaggaagagtatgaagatcaatgggtatgggcctacattattctaggactgacttatttccctatagagtggaaatcttctacttctaacttctgtggcaataaattctttttttaaaagcatgattatatgagaactcttcagagaaaagaacttgtatctcttcttttcgtatcacaaaagcttactctagtgaattctgggtaacccaaactgaaaattaaatttagaatttgcagggtcatgagcttctacccagattatctcaggaaaaggtattaaacaggaccatcattaccccattaatcataaaaaagtccaactgacacaattgtctattctttgagggaacaaaaaacccagtcaggcagacattgttttgtactcatttggtaattttgatatttaagactattccttggacagaaaagtatatgactctctaaatgtcaggcaagtccataccactatgatgatattctcaaagatgagttatgttccatgcaagtatattcactaaacgtgtacggtaccaaatactctgactccaagtaataaaaaaaaatagcttttgggtcttttccatgcctttagacatgacgaacatagactatttaattgtataaagattttcctggcatatcttccttttggaaaaaaaaaaaaagtcctgaaagtccttctgttttatgaaatattctagtctctgttctgcattatattattttacatagaacttacagtcttaaaaaagaatgttcatttgttaaaaagctcccaaattgactaatattattgctattatagtttgtttttacatagtgtttaatagaacatttgttgtgattaagcaagattgcttctttgtcttcttttctcttttcttccaaatagttcaacgccattataactttcctgtaacagagatgggaatgttttccttcactgaatccccatctcatgaatctacagtcttgaaacccttattttaacagaacagtcatctgactcggtttggctgtctcataccaagatctcagggcagcaacagagtaacccttgctggtacctgtgagagaaaacaaagggtctgttttgagtatagtagaaggtaaaaaatgaacttgatacttcttcacatcttaaaacttttatttttttatttaagaagtatgctaataagttgtaacatgaacatttaaatccctaggaaccatctttatagttgattataatatatttttattggctgaatatatcacaactacattctattccactctattatagtgatgtttgttatttattaataactattatttttacctcattataaaatagctacataataggaaatgtttagtaatgttctgcaaagaggaaaaaaaagaataagggatattgaccatcttggatagtttttcatgaattcaaagtcctcagtaagtgattttagaaactcaactttatcaacttagttcaaataagcagtctttgctgattaaaatagtcttttctgtcatcagagtattccaattctaaactcagagaatttaggaatttcagtttataatcagaaagctccctggtgaactatgaatagtgacaaaggccttaaggaatatttatcccaactttggtagaacctggagagttgtcttttacattttatcatgcacctttctagtaactgcagttcttctatcccacagtggtactctttagtttatgggaaatttaaatcccgatattaaatctttattaatttgtgtaacctccttggttacactggcctgtaaacaaagctcatttcagtctctgctcaaacccttggaaaagttagttaatatctctgaacctcaattctgcctgtaaatatgtaaatgaaaggaaccaattagatgtctagctataacatttcttgattttaagtgtttatacttttttagaatcaccactctccatatatttgtgtgagctagtcaactattatctatctactcatggcctccttggtacaaccagtcctttcagaccttaacttatcctgttcctgcatccaagaatcaattcaactaaaatggctggtcagaaccattttttctcttgatcacaagggttctccaaacacaaggattcctcaaatgataaaatacctgctccagaagaatctctcaatatggtgctgaatttgcataggttattgatcctaatttctagactctgaatggaggctagttgtgcttggagcagtggttctccaagcataaggacttaaaatccacagggttagtgctgggtgaggcagaggtcagtagctcttgaactggatagtaaacatcaagaaattgagaaataaaaaacaggaactttgggatgctttttaaaaccaccacagcctcagatgtttgtgttgaaggagtaagatggccaagaaaaaaaaaatgttaggtctgagagtttactcattccaataacagacctggcagagaaatcattacccattttgcaacacagccttagggcaagtctgggcaagctctgggtgggcaaaaaataggctttccaaaactcacctagctttccagcccaccccacgtacatgccccacacgtgaagtcttcctttctttcctcgtttctttctccttcccccctcctccttcctctctctctttctctcttccagaatgaatgatttgtatgactgtggaatgtgtttgtcagacaagtccatcagggacttataacagtcccttaatagggtaagagagagatatgagtcttgtggtcataagtggttgggcttccccactacctcattcatttatgttagctaactattaaaatctaggtctttactaatttatagttaaaatatacataggagtaaatgtgtgtttgtgtgtgtgggtctgtgtgtgtataaacactgatggatatttttccaaatgaactgatgatgacctctaacttctggttcatgagaaggaactttatgtcctacttttgctctggaaaaatgaaaagactgctaagggggagtagtcatgatggaattgtgcatgtgtgtgttaggtaatattgggtggaaaattaagggatattttcctttgtagtattccaaataaatctgtttatgtgatagatagttacttggaataaatatctttcttcatgagtgccttcttaatttccagaaaaatcttataaaggtttctcagtaaggttctttaaataaactttgtttcaatcataataatactagctaccattgagcatttacacttcctagcattgtgtccaacactttacattctttatctctcatccttatactctcaaaagatgaggcattgatattcccagaaaactgagatttggggaggctaagtaaatttgcttaaggttatggaacaaatacattgcacagctgttacttgatcatagatctgactgtctccaaccattggacacttactgttgtcacataaggggattcagacagatatctagcttattttataactgttctcatttgatgagagattgtctataaagatgtttggtttttgtgagctttaatggctgatgtaaaacaatttggtaattattttaaatttaaaaaaatcttataatcaatctaaacatactcctatgtcatatactgagactcttagaaaatattttagagtagaggcaagcagtcttcagatactgaattataatgcctatctacttttaaagagtgatatgacaccactttcaaaaatctagacttcagatggcttccaaatgtacacctatatctacagcaatacttggatatagtatttcctgaaatatagtctttctcttaaagaaaaaaagaataatattagttcaggtccttgatatatgaggcaaggattagagatttgttaagtaaatgttgacccagactatataactctaatgagcaaaatccctttaaaatttttaaggagatgggataacagtaagtaatatttattgaaagcctgttgtgtgttatgtgctactaggagcttagacaacataacctcatgtggaccttacaactgctctggaggtcagtcattgttcttgagtcgggctcttttttctggtataagaaacagagtcaccccctcatgctgtctcaaaaggcatgagttattttaagggagagtgggtggagggtttgtacagtaagggaaccaggaagctcatggaattgtcatacaatctggccttacaagcacttcagttacaactctgtcaaaatgggaaggggctcaagaaacttgcttttcccatctaaggaaaggatggtattttctggcttttggtgaggtgatttatcttcagaatgggtctaatctgaaaacagaccccactgggcagaaacatgaaatccatgttcataattatgtaaatgaaatgaaaattacttgcattcttataacatctatataaaaattataattttctgtttattttcccacagtttttcctgtaattatattttttggttacattactttttataataaaatagtgacatgttttacattactttttataataaaatagtgacaggttttataataaaatagtgacaggttttataaaaagccaatctgtaattggctttttaatgaaatgtgctttccatggaaatacgccaaatttgacactggtgtcaatttcactgtactcattcacatatataatacacactacacatttttacatagacacatacatatataaaggcacacatacctatatgcgtaattcatttaagcatttttattattggacacttgagttgttttcagtattttgctaatttaaacaacaccatgttgaacaactttgcatacatacagtttcacacatacgtgcatatattctaaggagtggaattgctggatgcaaatttacataccttttaaagatttgttacatatttgtcctccgaatcctctctcaaagtattgtaccaatttatacttcccccagcattatatgagactcacaatttctgtgtaccttcctcaaaccttcacattcttctaatttgagcacttcaggtatgaccagactgtagagcctcaggttactgcttatttaccaattgtttttcagctgatacttttaagccttctactccaattaggccacagactcctatttcctttccttttaggataatgctggctagggctcatttagcctaatttctgttttgtgccctagtagagtagcttcctttgtccatgcttaaatgatttcagaagtctaaaagcgaattttccaatacatatacccgcttctttcatgtcagtaaaataaaagcattatgggactgctcaatttgatatgttatctcaactaatctgttaatactaaattgcagacactcaaaggtgagaatcagtcctaggaagattgtgagcaaccagtctacaatgcaaatactaagcaggctcaaaagcagatctataactacagctgcagctccatcaaggcaacaagtggacacatcctggcaaagtacaatctgacctcctttgttttacatttgctcattgttctttaacacattttaacttgaaaaagttaaatagccttcaataacaagacaattacactgtcatagaattagtgttgaaatcttccagctcacatactagacaaaacatagttcgcccaataactatctggaggatccctgaagaggatgctaaccacatgactattgcttcccttattcaacccacccctgaatggcatgaaggctgttagctcagagtgaagaggcttttaaacgctgtcctgtagattggtatggacaggctgcacttccgatttatctagagagatataagacatgatccatggccaaggtaatggggtgggctcagacatttttaagttcctccagtaattttggtaaatagttctagtttttggaactatggctcagagcatcaaagagaaatgtagctcctgctcccatcctgtgaactttacacaactgcctaaagctatgatatctaatatggtagacagtagccactaggcacatgtggctattggccacttgaagtatgcatagctagtcaagatttcaaagacttacactaaaaccataatgttttggacatagggggttacataaaagtattataagacctaatttcatctttttaaaaacatattttaatgtggcaataaagcatttaaagttacataagtggcttacattatatttctactggacaattttgatctagaaggcataggttccatagctcaggaactttgagtcataaaattttaaagttataggaatcttgtagatgaaacaattatctcactttgcgaatgacgaaacaggtaccccattggtaaagtgacttattctggtaacctgagttgttggtagagccagggtattcccgaatcccacaactctggatttccatccaatgctagcttctccctcccgtgctgcttgtctttggcgacagtagccacactgagtgttttaggattcctagaattctgaggcatagaaagcctcaccactcatagcccctgctgtagtctctgctcaccagattctgtttgcataactaatgcgtccaaattcattactacagaaccatagtcatgcccttaagcagatgcctcctcttttcaccatctcacattattagttttgcctccacacggagctatggtttaagtgaggccttagtatctttgcaaaatatggttccaaaaaacaaattctacttatttgagtagtgtgacattcactaataatatttctcccacccgcatgtttactaacattctggttttctctggcatccagagaacaatgtttcttcttctccagtactagttagaaggatcaagtgttgatgggtggtgagcccctccctggctcatgccctttagccacaaaaacaagttatcagccgggcacggtggctcaagcctgtaatcccagcactttgggaggccaaggcgggtggatgacgaggtcaggagatcgagaccatcctggctaacacggtgaaaccccgtctctactaaaaatacaaaaaattagccgggcatggtagtgggcacctgtggtcccagctacacaggaggctgaggcaggagaaaggcatgaacccaggaggcagagcttgcagtgagccgacaccgcgccactgcactccagcctgggtgacagagcgagactccatctcaaaaaaaaaaaaaagttatctttttgcatggcatcagcagagccttgcttatataacagttattttaagccaaaaaattgtttttcttctttctcatcttttaataaaatatgtaagaactttaatagtgttattggtaagcatccaaaatatttagaaactacttcccctaccacagaaatatttgctgctctgaagggtgcaaaggatctactttccccaatgattccaagccagttgagattcatgcatatatgtcccaaaatgtattaaaatccgcgtgcgcacgtgtgtgtgtatttttcaaagtcagtgcagatgcatagaaatgcccggcccatgtctgttgcattttgatgtatttccttctgaatgcctcaagtttaagctgatctgtcaagtatagaatttatagggagtaattaacccaagtcactgataaattaaaatgtccctaggcaaataagagtatgtgaataaatctgattttttaatgatttcttagaacaggtcacagaaatactttcaatttcagtcctttactgtctagttgaatccttgctgctggaagaaggcaggcaagtcttctttgcctttcttcaaagcctggtatccaatgcagcaaaaattcctgatcatgagtctctttcctacatgacttgtaggtgatttttttgtttgtttgttttttctgctactgactgtttctgatcatagagatctagggcaatgacattcactttgtgaatagtaataaatgaaaatgtcatgtttggagatataatatcactaccatctgtaatagcagactgcagcctacattggcataaatactagtgccatacaattatttataaatggagctttgttgaggggaagagttattctttaattaataaaaatctaagacaaagtggtgatggaatatgccaggtgtagggtagaaaatgcagttcttggaagtatccttcccagtggcaggaactgaagactccagatcaaccaggtggaccttttcgttgatgagctgatagcttctaggctgtggggaacctcaggtgccttacaactccaactactgcagaatttcttgttgtgcctcataaacaaatgatcttcctattggaagagctacgtggtccttggacaaacaaagatagtgtattgctttaaaccttatctatttgctacagtttccttctcctgccaatatgagcatgcctctaaatgccacaaggtgtttgaatttaatcaaagttggctctacttttgccttttgtttggctaaagcatcaagccatcttcttgatgctttattgtgtttatcagtcagatttatgtaggttagaaagcattcagaagtcattatttcagtttcatagttcttagaggtctatacccttaaactttgaaagtaaacatgaacagtatctctctacacatacacagtaacctcagtgcaatgtttttaagcttcaagttgcaatctattagtgggtcttgaaatctatttggttgatcaaattctctttcttttttaatgaaatagactgaaataaaaaatagaaacattgacttctgaaactttaatatatatatatttctatatctttattgtctatcttcctatttatcatctgcctatccatattagttttagtttaaagaaaaggtttgaagaaaatctgccttaagggaactctcagaaatagattattagagtacataacaattcttatgatttcatgctagactaaatagggaacacttactatacaagcatttgtaggtttgcctctatgatatctttcacaacttcctccttctaaacctccatactattatttttttaacggtagattagaaaagggggtaatcataagtcttaaggattttagtaattgttgtcaaccatctatgatcaaatttaaatatacttttcttcctatttataattttagttcagctactgtagttatatagcttttgtttcctatatatagcaaatactgttttaatattagtaaaattcagaagcttcttgtctaggtttaaatttcagagaacgacagctgatagatcagggataaataaaagttagtattattctttcacactcagaataaaaactgtaatacagatcattaatttcagtacagtgtataggacaggtaatatggttaagtggaaacagataggctttgcaatattattacaaattaggaatctataatacttccattacttttcaagcatatgctagctcatctatcgttctgagtgttgatgtagctcattttactcaccaaatggcatctgttgacttgtgaggcaagatctcttaggttagtttgttaagccatagtcattcttagtagcatccaaagaaagcacagttcatatggcaacattattttcaaatgattccccacaaaattgttttacttaaaaacttgcttaaagagaaggtatattacaccatggaatactatgcagctataaaaaggaacaagatcatgtcctttgcagagtcatggatggagtcattatcctcagcaaactaacgcaggaacagaaaaccaaacaccgcatgttctcacttataagtaggagctgaatgataagaacacagggaggagaacaacacacactggggcctgtgggtgacaggggagggagagcatcaggaaacacagctaatggatgctgggcttaatacctaggtgatgggttgataggtgcagcaaaccaccatggcacacatttacctatgtcacaaaacacatcctgcacatgtaccctggaacttaaaatttttaaaaattttgaaaaaggtaaggaatatttatctgcatctgcatctggaaaaaaagtcatatcttgacatgtattttaatatttcatttgtaatttcctggtaattttacttattgaaacatggggaaaatattcaaaagctagtttttaaaagacttgaaaataaaggtcacaccattatccctctttaaatagagcatgaatatttgaatgaatttaccaatttagtgttaactctcagtccctttgtaacattagtgtggatacttaatatgtacataaatttggaaaaggtcgccacgttggccgcatcataattctaataaagtcagatgctcaaataccacttttaataactttcctattaagccccagcactttaaagatgatagttaattttgattcttcagttacttattcctctgtgatgaatttgacatttttaatttttttttaatgccttgcatgccttggggagaaaagaaaaactatgagttgagttttctgcttttatgtgctaatatttgtgctgactgcatgacaattaaattcactggtcagagttctgatgatttgggatacattttttaagatgccattttttacagctattattgtaaaatttgaggaaaatgacatctataatttttatcatagagccatttatattctaatattaaaagagattttaaaattatgtaactgaagttttttgttttgtttttgttttttttgagatggagtctcgctctgttgcccaggctggagtggcgtgatctcggctgaccacaacctccgcttcctgggttcaggcgattcttctgccttagcctccccagtagctgcgattacaggtgtacgccaccacgcctgggtaactttttctacttttagtagaggtggggtttcaccatgttgggcaggctggtgtcaaactcctgaccttgtgatctgcctgcctcagcctcccaaagtgctgggattacaggtgtgagccactgcacccggccgaatataagttttaacatcaagaaatacccatagcttcttagtttatatggcttaatgagcttttttgagatttacaaaataatcagattgttttccagaattattcctggactcacaatttgtaagattcttttaaaatatctcaagagagctgggtgtgatggtgcacatctacagtcccagctgctcaggaggctaaggtgagagtatcacttgagcccaggagtttgaggttgtagtgagctatgatcctgccactgtactccagcctgggcaacagagcaagaccccatctctggaaagaaaaatttgtgtgtgtgtgtatctcataagcctctggctgctctccaaactcttatttagtcttatccagtagaaacacattaaccatcaaataaatccttgatttttactgaaaaataaagaagcttatatttagcaaatgtactatcacaatagtacttctcaaaaagttcctgtttaatgcattatgtcatcaactgattaatgaaaagggactcacaacaaacgtgagtcgtatctgaagctacaaaatagagctattctatcatcctccttctgatgaaaattatctagactatgtattgtattatatacatattttgtatatgtcattatattaaaatatataccgttttagactgtaaagaccctcagagatattctgcaccagtggttctcagatgggattcactttcaaaagctgtaaaacttgtttagactatgcatcctgcaacaggtaaactggaatctctgtgatagggccccaggtatcaaaggtttataaattccctaagtgattccaatatacagtctaagtgttaagaactattggcttaggccagtggtcttcaaactcaaaggtacataagaatcacctgcagagttttttaaaacatggattcctggccctcacccctagagaatctaattaagtagatctgggattggtctgaaaattttcaagatctcaagtgctatggactgaattttgttccccaaaattcatatgtaagccccaacccccaatgtgaccatatttggaaatagagcttttaggattaaagaaaggcaaaatgaggtcataagggtggtgccttataagagggagaaagagaaatcactctatctccatgtgcaggccacgtgagaacataggctactgtctgcaagcaaggaagagaaccctcatcagaaacagaattggttagcaccttgatcttgaacttcctagcctccagcaccgtgagaaataaatttctattgttttagccatccagtctatggtattttgtcatggcatcccaggctgactaatgaatcagtgatgctaatagcagtggtccatggaccatatttttgagcacctctagcctaggccacatcccccagaaatttcgctttaatttgtctggaggtagtacagggcatcatttattttcccaaagtttcctgggtggtcctaaagtataaccatacttgagaacaaatgaagtagaatggtttcttctatttatagctaaggacactaagactcaaaagaagttaagtgattttcccaagttatcatggtttatgctactgctgatttttccaaatgtacaggggaagtaaaaacagaatttcttctagggtcaatttagtcctagaacctagaactttcagtttccagaattaacccattaatttccccccagacaacattaaaatttgtcaatttcaggcagattcatttaaagtaacttttccattatactacaatccaagattgttgtatcctatatctatttctactttgtaacagttgcttttttttgccacgtttaatgactgatcagaaagtgagatatttaaatatatatatacacacacacatatatgcatatatgtgtgtgcttgtgtgtgtgtgtctatatgatagatacttgccacatgtttaatgactgatcagaaagtgagattttaaaatatacatatatatacacatgtgtgtgctttgtgtgtgtgtgtgtatatatatatgatagatacttagctgatcttcacaccacaacattaatctgcccaccatgaacagaagcactgctatcaagtatcagccttcttgtataataacaggaaattcagaaaattgattcatgcaataaaaagatggaaatttattagaacttttaaataccttaattcccaggtataatcagaggaaaaataactcaagatgggtgaaagtttattaaagatttcacctcaaggacaggcatttagttagatagtgattttacatatgtagtgatgtgaacttacattgttcatatatcggggagaaattacatcataagtaaaacaacacattaagcttaacgctgctaaatgaaaggtgccatcccctgcacattctgagtaggcacttgatttctttcaaaaatcaaccttatttcttcttaggcactgatattttgttaatggagcaaatgaatctacattttttcataaattgccagagttaatatgaaatatgcacttcccaaaaggagaagttagttgtacatttttggccaatgattcagcaaggagaagtgagaaaaagaaaatctggctaggaatcaggaggcttgacttctccttccacttctaactaattagcagcaaaaactggtaacagtccccatctatgttaaccttggtttctttgtaaaacaaaatggttagaatataattattccaagtttccttatacttttctcacttagatgacaaatacttctaaggaatgctgtgttttttgtttgtttgttaaactgttgttgggtttttattttgttattttaacatttttttaaaatggcagtgtttccatttggccaagatgagtaaaaatggcaaaatcaaaatgtcactattaaaaaatcaaaaatgaaagaaaacatggaaaaagaaccagtgtgtattctttggagtttggtgagaaaggacatagaaacatgtcactagactacatacttaagtttaacatcagcaaactgtcgactatttcccatctaaaagatactataaatgcaaaatagccaagattttctttgcctgacacgggtaatctcatcagcagaagaaaaggcctgagcagaaggagaagtctgaatggcctggctgttaaatgttttactggaattcactatgtgtaatactcaggcagcagaaacttgaagtgaaacattaactgcaatatgaagtcaacttcactagttcagccagtattgacatcaaatattatttttcccaaactgcatatccaacaaaagtatttagaaagaaatacattagtgagcttgagttaataaaaactaatcttcacaatattttatataattaataaaccagaagaaatgtggcaaataaacatattctctaattaatacttcctttggttcaagtacctgtttagtaacacttttttttttttttttttttttgacaccgagtttcactcttgttgcccaggctggagtgcagtggtgtgatctcggctcactgcaacctctgcctcttgggttccagcaattctcgtgcctcagcctcctgagtaactgggattacagtgtgcgccaccatgcccggctaattttttgtgtgtgtttttagtagagatggggttttgccatgttgcccaggctgatctcgaactcctgggctcaagcagtttgcctgcattggcctcccaaagtgctgggattacaggtgtgagccacctcacccagcctatttagtaacactctataaaacagtggttccaaacttttggtacattggaatcacagagttttaaacacctcaaactttctaatttggttggtacagactataactggggcatcggaagttctttttttgtgggggggatggagtcttgctctatcgcccaggctggagtgcagtggtgcaatcggctcactgcaagctccgcctcctgggttcacgccattctcctgcctcagcctcccaagtagctgggactacaagcacccaccaccacgcctggctaattttttgtatatttagtagagacggggtttcaccatgttagccaggatggtctcgatctcctgacctcgtgatctgcccatctcggcctcccaaagtgctgggatcacagccgtgagccaccgcacgtggccggaagttcttaaagctctccagatggttctaatgtgcagcaaagtttgggaagcaccactacgtagcattggttctaactctggctgcacattggaactatctcgtacctttaaaagcatatggggtatctggacttcatcctagaaggaattaaatcagaatttctaagagtacaactaggcattggtgtgttttgggttctcccaagtgatgctaatatgcacccaggggttagaattactattatagaatactgccacgacaatccttatctcctcctgaagagcacagaaggcttgatttccaaactattgcaaaaactggcatgacctcaactacttttagcagggttctgagaggtagggtatcactcaccttaattgcttcagatcctgcctgaaaaatgcccaggcatgttccagtccacacaagactgattccaaagggtgtatctctcattgacagcccctagaaccattctaagttatgacaataaacacctacttactgagttctcattccttggcaggtattttatatacaacgtttggtttgctccttccagaaactgtatgagaaaagtttgcatatcaaaatcctactgatgagaaagtggaactcaacaatgttaaatgacttgcctgcctaaggtcacacagttagtgacagagtctagatttcagcctagttttgttcaacttcaaagtccttgctcttatttgatggacacattaaattatccaccatggtatctagactgggacacagccacaatctgaaaattgaattctaatttaataaacgtgccctctgccaggaaatatgaggaatggctatagaaatgaagaagagtctctaccatgaaggagcttataatactaaatgttacactccttttggtctattaagtctaaggaaaagaataaacatctaatttcattcattcatgtaacaaatatcagtaatttttgtaatttcagagaacaatattataatttggaaggtgtttaggacaccttaggtagtttataataagaggtgatataaaatcatccatttcaaaagtcaattgtcaatgaatggagaatagctttcaactgaggccaggatacgcaaactgtaaatgaggctttagacacaaaaagttagtctaggccaagtggtttagtggaaggatcctagattttatgtcagaaaacataattgttatgtggtctgaaccatttatggtttgggaaattcactttaactttcagagcctctgtttcctcatcagtcagtgcctgtgaggataaaaggagacacgtatggacgtgcctggtacatttcatgacctattagaagattgtgaggccaggaagtatgtacctgcagaaatctcaaattgtgacttgcagtggaggtggaattcaattattattaagaatgtaggtcaatgtttcattttttttaaagatgaaaactaagcccacgaagcttgagtcatctggagatgaagcagtcgcagcggagcagtcttggtaatggagaagatcatgtcagcgctgagaaaggcagggagggaggcctgagcaaggaagcttggagaagcctctggaggatgcctggccagggctgaatgctcagaaatggaagggaaagctcaggagattatcactgaatcagtaagtacaagtacagggcagtatggcttgagcaaaccaaaatgatcttacttcttctgtgatctgaagatgagagaatctataggtgcagggtaaggcagttttacaaatagaataattttggcctgaggaagaaaaacaaaaagcatttcaagaatggaagcagatgtatagtcatggaccagactgattagtaaaacataaaaggcagattaaaatttagtttaatgaattaaactcaagaggagaacagaagccgcatacctgtaacagccctgtaatattgttactctgttattttaggctaaagccaagaataaactaaggacgacaacaacaaaaaataacattttgttttgttcagacaagaagaacatggaagggatgcctctgcttgagataaaatggatgactaaacaaaactaattcccttttttttgtcttctctattatgtaaaaataaaccattaaatgtaagggataaaataagctttcaaagagttaactgaaaagataggtgaagaagcttgtaagaaaatatgtcctagctgtctaaagcttaacttcttcttgcctagtaaatttccatctcagcaaggagagtttaccaataaggactctcagctagaatcagcagagggagatgaacactaaaaaactggaggtggacagatggagttccagtttttgccttagtctgaaaccgaggcaagaaacttttcacagatactgaacaaaatgaataaacctattattaaaatgacatctggatacttagaaaaggaagacacaattttgtagacatgaaccacaattcactaagtagtcatttcctttgttttttgacaatattacagtagagcaaagacatccaatagacaaagctcatctgctgtctgtttggagctgcatctaggcgtaaggggtcactttttcctaatccttcagctaaggtgagagtggggatacctttttctaattcttacaaaagtgccacgtacccatgtacacaggctgctaccctgggacaacagacaaaaataggacaaggtaacatgtgggtcctcaactgataagaatgttcatcagtagcattcaaatccagtgtcggttggcagaggaaggtacctgagaatgagaacttaaatgatggcatggcatacagaccggatttacagaggtcatgaaattgagaggtggaattactcagttatatcaatgatacccaatatgtcaacaagctaagaggcctaatttaacacaataaaattcagtagaatcacaggtaaagtgctgaacactgcattgagtgtagttgtttagttcagtgattctccaactaaacttttaacactttaaggttttatttggtagattgtaatatggagtcagctgggtaatattgctgccatggaagctccaaggatatacttagggaaatacagtaattacaacaaagccattaaacatctttctagtttgtcacttgggtgaaaccttgaattcaattcttggcatcagggtttgagagagatgttggcaaagtaaatctcctcctgagagctttcctaatggatgaagaaaagctgatggagttaatatgtacccaggtaaattgaagtattctcctgtggaatcaaggctaggtgtatcctgtagattccagagagcagaatagcagatctgttgagacttactgtaatggggtgggcgggggcggggggacggggggggctttgcacaaagtgaatgtcatccagaggccaattcgcaggtcactcaaaagcaaaattgtggggggtgtgagggtaaaggggagcaaatgacagtcagtactacctcctttgaagaattctcaatcctggttgtacattgtgatcatctaggaagagattttaaaatgcagatgctgatgcttagaccctaacctcagagattctgatttgttgttcttgcgtgggggtccccattggaaagaatttattatagctcccctgctgattctaaagttctaggttggagaatcactgaactagactactacttgctgagaggttacgtaaattaaaccagatgttttttctaaagtctctttcaaatttgagaagataaatggaaattaacacttacggattacataatacagctagacactttcacaatttattctaataattgaattagtatatgtaaatctcttagcacagtgaccgtctgatatggtgtagtaaactctcaataaacattagctatttttattatatcctctccataactgttcaaacaaggtattatattgttacactatagatgaggaaactgaggttctgatgttagttttccaaggcccacagtagtaaaagcaaagtttggatttgaaccaaagattagttccagtttccagagccctcttctctcctcgacaggccttccctaaagcatcaagaagtttatgcaaattagtggttcacctgagtgaacatttaaaaaatttaatagtaccacttcctcttgacctgtttgtaaggagttcctcttaaatgcaatttctgaaaaagagaagcataaactgagacatccacattttttccttatttggccaaatagaagtgagaacctctgaggatagaggaattggatggaggtgcccttcagaactcatggagaaaagcactgctcccagtaaaatatctctcattctaatgaatgggtaagtatcctacaaatctttcacttctgtacaatctaggtctggtaggttacttgcacacactgggtggaggtggaaggggcaaagtattcctgaggtgatggccctgatcctacctcacatctccttggggcctggttggacctggctgagcgtgtttgagcagtggctgatttttggaaaacaggaggactcttctccaggaggctgtgactaccaaggttgcaaatgctccacctgaacttgggtgcatgagggatctctctctctcacacacacacacccccccaccgcgtaagataaatttctgtttgtgagctgcctacattaaatgctttgctcctgaccttctgtgattaaaatctgttccgtttgcagggttcggtgcgcttggatttagtgtattttgttggtacagtaaaaaagagaactgcttctctataggtgacccccgccccaaagtcccccctcccactaacttctctttgagaagagagtaaaaccgaattcgagagaaaagaggcagtaactattcgggaggaggcagactggagtgggcaccagtcccggtagtaagagtcttaacgtcttcctcgctttcctctcgcagagtagtatggaagcatcagctcctccccctgggcctccaaaagttacctttcctttgggtgtgattctcgaacccgaagcgtttgagtcctaagaaactagaacaagttagagccaaagaggcctggcgggcgggggtgcgggtggagtccgggccgggtggcgtggaaggccgagcacagctgcgagcggcgagtcccgggagaggaggagcgggagaaagcggggcgggcctgcggtcggggttcggccgggggagggggtccccgtttccctctcctcatcctcgtctcctctggctctggtgacgttgcggtttcctcccccctccagcggagcctcagcgcccgccgcgtccctccctccgcccctttcgcccacacctacccgcccccgccggcccggctctcagtagcgtcgcccgaggctgcagcagcgcatcccggggcatggcgcggcgggggcgcggagggctcggttcggagggggccgggagcccgggcgccctggagtgaggaggaccgggagctggctctggaggctgcggaggcgacgccggagagaacgaagcctcggctgggagcggtaagtggaggggcgcgcaagggacgagctggggcgcgcggcgcaactttcttcgggagtttcgggcgggtagccttcggggctgtcccggcgcgggcgggagacggagagccacgtccccggctgagagcggagcgccgcgggttgcgcgcccgggcccggctcggctggactccgagagagcgcctgacgcgtgaagcctgagccacgggcttccccggcggcggagcagcctcgaggggcagcttttcgatcctccccacccccttgaacgccgagcaccgagccgggaacacgatgagaacctggagatcgcattccgtgcgtcggatctggccggcccagccgcgatttcctcgacggtccttggggcctcggcttcactctgcggggttgggtggcacaccctcgcgtcctcctttccctccgtaccccagccatttgggggcaggggaggtggcggcggcttgtgtgcagatcctggcgctggcaaccctactttgcggctgcagaagccgaggaagagctccccaagcctctcccagacgctggattccagcgctcctgggctccgccggcactcggagaaattgttagtaaacctcatccccgaggcagtcccggggaggggaggaggcgggggcttgactcacagactgggaagctctgaaagcgatgccacatgggctcaagatctgtcggggctggaatctgagctaagtttgtgacctgagaactttttcgtttatatcgctcctttaaagcagcagcctcctcttaagccggctggcattcagatggaaaccgaagcctttggttaaaatcaggaggtgaacctcacttacctgaaattctttaggtcaggcaatgacgcttttagttctaggaatcttcgtgtaataaagttctttttaaaaattttttcgttggtcatggtttagaaagtcatggtttagcactgttaattaaatgcatgaaagatctcacttatacatatttttagtatttttcacattatagaatttaaactttaagtaattccctcaagtttttaaaaaatttctcggccggacgcagtggctcacgcctgtaatcccagtactttgggaggccgaggcaggcggatcacgaggtcaggagatcgagaccatcctggctaacacggtgaaaccccgtctctactaaaaatacaaaaaattagccgggcgtggtggcgggcgcctgtagtcccagctactcgggaggctgaggcaggagaatggcgtgaacccaggaggcggagcttgcagtgagccgagattgcgccactgctctccagcctgggcgacaggctcaaaacaaaacaaaacaaaattctcaatgataatctctatgtgaaatagtgataaacaatattgtatagagtattctaactatattactaaatgggatcacaaaaaacctaatgtgcatggaagaaaataaaatataggattatctgagtatttgtttcatgcaaatacttagatttctgtattgtgacctcttcctttgacggtcacgatacagatataagttcttttctgaagtatgtaggtaaggtctgttctagtaaaaatggagaagataacagattgaatttgatgtctccatcacctagtgacccgtctgtgtgggttcagcaaaaagtgcaagatagtgctggttacctaggttacatacacaggtatatgagatcagccttagctctcttggagctgctaatgtagaacctgagaaacatcaataagcagcacttcctaagtttgagcttgggaagagttatttttcattgactagtatatgacgtcagtatccgtttttatgaagttttagttaaataaaaacactggcctaaaaagtacattctgacagtttaaaaaatactgaaagtacagtcaccaagtgaaggggaattaaaaaaaaaaaaaagggctgggtgcggtggctcacgcctgtaatcccagcactttggtaggccgaggcaggtggatcaccaggtcaagagttcgagaccagcctggccaatatggtgaaacccggtctctactaaaaatacaaaacaaaaaataaattagctgggcgtggtgtcgcgcgcctgtagtcccagctacttgggaggctgcggcagaagaatcttttgaacccaggaagcggaggttgcagtgagccgagattgtgccactgcactccagcctgagcgacagaagaagactccatctgaaaagaaactttgaccaagagatactttgataacagtacaggcagttgccatgatggggttattaggttccattctcaatactgctagattgaggctgtccttcctgatcttggggacctgttgaaaaagcactgggtgagacatcaactaggtttgctatgtgagatcaggaccatcttagtgactaatgtttgtgtgtacatctgctttagtatttacgaaattcgttcagaaacaagctaatacagttcctttcaatgagattttatgggctgtccggttcaatatctcgcagtgctgccctgagaggacctggtggtcatccatgagatgaagctcttaacttcgcagatgcttcccagtgcctcgttatagtctctttttaatttctgaaaaggtgctttaagatcactgatgaaagtgcattttgcgattaaacaataaaatatttatacatttcttaatgttatttgtgatacaatattttggtatttatttatacttgccttggatcacactgtgttgcatgaaagaaattgcatgattttcactcaatagtattatttcaataaataattgtagagaaaaaaagaaaaaatatttaaatttgagttttagtatattggtaatctttgttttcaaaaaggaactcccaaaagactagcattttgtggttgtagcatatattaaatattacataacctgaaactgtcaaaggatttttacctttaccgattgtgttgcttacttctgccatgtgtaggcaagctccaacctgttgagggtgtggattccagatcctctttcagaagaaactcccaaaagactagcattttgtggttgtagcatatattaaatattacataaccattagcatacttgaatcataaatatagtaaatattatcctttttcaccaccccactgccccttccccaaataaaaaaagagaaatactgttactgacttaggatgtgtttgtggcaggcctttgaggagagccagaatctgtggtagagggaacttcattatagtggatactattattctgtttgctgagggggctggatctttactattttgaaggagtgggtagggcacctgaagagatttagtgacataaccctactaaaagaatgtgcctgagaagaggataggacagttcttaaatgcttactctatttcctattgtttataacagaatacttgaatctgggtagcttaagaagaaaaggaatttattttttacagttatggagcccaagtccgaggttgaggggctgcatctggggagggctttcttgccggtggggactctacagagctccgaggtgatccaggacctcacatggtgagggagttgttcatgctagctcaggtttctcttcctgtgaaactatcagtctcattcccgtgattacccatgaatccattaacctattaatccatgaatggattaatcattcatgagggtagaggctcatgacccaatcgcctctaggtcctacctttcaatactgccacatccacattggaggtaaagtttcaacatgagttttagaggtggcagttattcaaaccatagcaaatatgttaaggttttctcatgggattatgttatcttcccctatagtgattgctagaataaaactctctgggagcaccaaattaccagcaaatgtttgggtgacacagcaaaattctttatacctcaagttggtgcccaacatggcaatgaggcaagttatatataagcccagagtactgaaaaggaaaattattttcctatgaaattcatatggtgaattagaatgggaagtagagattaaaatcccaaactcttgaggtgtactgatcgatgtaccatttgatgataacaataatgaagaatgtatgtttcacaaagtcttctcaactctaatgccccattctaataggaaatatgcttttaaaaattaaactgttcattaattggatagtatgtttaattgaaataatttttctttaaagaaaaatctttcttcctagctacttgggaggctgagatgggaggatcacttgagcccaggagttcgaggctgcagtgagctatggtcacaccactgcactccagcctgggcgacagagcaagatcctgcctcaaagtcttttttatgtgtatggtaaataaatgtatcccaaatttctatcatctcactttagtgtttcacaacttctagttatgtatagaagagtggcttgattagttgatgctgaagtcttgcagaaaagaatcaaactagaaagagaaatacaaggtattgtgcataggatagcaggaccattactattagtaaactctcacttataaattcatatgcatttagagaattgccgtaaaggaaaatccctgaacatacatctacataaatacttgcattttgaaattgcccagtacttttaacttttttttcaaagaattcaaatattttaatattttagtgtagtagaaatggacagtgatatagagctagtgtcttaccctcattttaggggtatggaaatggaaatactaaaggtaaaagacttgtctttcattttcaagtcattagtggtataccttaaatagaagattaacttaaattacacatttaatcctacttttatcccttgtgactccaaattcatattattaaagactctaacattttattttcctgttgtctactttattatcccttttactactcactactcctcatgaaccatcagctccctaaaatgcttatgtgcttcctagactaatgtaactggctatttacagaccccctttccgcagccccgtcctcttccacttctctctatctcttctcatgccttctgaggattccattgtggggccacttctaattcctgcaaagccctgggccgattgctcagttctcattagctggcttcaggatttttacctttactgattgtgttccttacttctgccatgtgtaggcaagttccagcctgttgagggtgtggattccagatcctctttcagatgcccagaagagtataaacctgctggaggaaaagtgttcagagagcctgttagagatcacaaagaagaagggaatgattttaatttggaaagagaagaaaagattattgaggcgatctgtttatttcttgaatggagtagtttgttcagtctttaattcagaataacatatgaaatttaatgtgtactgattaccactggatttccttctgtttgcttcagctcccttggaatattttgtaaacatgattttggtagtgttatcattaaatgttagtaaataagtcctgaaagaacagaatttgcccttcagtaatatgtagaagctatgaacaatactgacaaataagcataatttgctttggcattttatatttgggaatagttatacctattaggtaagtgtagtcttgttagagaaaatataacaaaagacatataggcagttggctttcaattacatatatgtgacatatccattgtagattatttatgttcatctgctttgtccaagacagagtcagaaagagtttgcaactgaatgtatgtgtctgcatgccaacccccaccttttgagttttatttctagacttaatagtttctctcctctcagtgcgaacgatagcagaataatcatatagaaatccccagtgtgtgtataaattagcattcatgctcttttagtagaaattgaataggtatacagtcagtttaagaagctgtcctttaaatctttccatttgaaatattcgtagagttttaaagttgtgtttgttgcttaagtcagggctttgcattttttatcatgcataacaataacaaacttagctactaaataataggcatttaatgcgtacaaacattataccgcaacaaagttgaatcagtacttcctaacttttaaaaaggaatttgtaaaggaaataggctcaccaagcttgtgggtctgtaatgtttttattgatgaagtacgaaggcaatatatcagccttattgttgctgtcaaatggctgttgcaagaaaaatgatgtttgttagcagttcctgaagtaggtagcaacattagtgttgtgtaagtttttttttgtaaaatgcagtaatctgcagatgatgtcgtgaatccatatacattgctcatttaaagaaataactgactagaaatggacacttgtttatagagtagtcctttagactggggtactgaaagggatttctagaatttttcagttttagaaatgagaaatgacagtttctgtcactgagaaaattgcctcagtgacaaatactcaggaatttcatgataaaaatcagtaggtcatttaaaaatactttacaccaaggtgcactcaatatccaacacggtgtagagcagtaatgaagaccaaggtacccgctgtaatacaaccttgtttaccttctagacagttctgactaaacttttattcttgaagctgtgctatttttgtcattttaatatatgtgaggacagactatatccaatgaatttctagaatttcacaaattctggggaaaaatcttttcctgggacctttgcagtttgatgatatcattccaggtggtatgaatgggggcaggctcaccaaccccatgggtaatcagacttgggccaactggattttggaatcacctgcagtgtttacatttctcccaaggagggtagggacctgtcaggaaggaaaaaagtagcctgaaagggaacgttgaacagctgttttccatcttccctgaagaaaagaagggggaaattaacttaaagcaagcatcaagaaggatttatggtaaatacagggaagtttttctgaatgcttttatcctttaggatggatttctgaaaaaggcctttgaattcttttctgtttagaaaggtttaaatggggttgccttgaagggatgttaaatttatcttctggggctctaatttatgacttctgcttatttaaagttgaaaatcttagaaattagaaatgatttaaatatgtgaatatagaagaaaatattttaatgttttacatagaagatgcctttacattttctacttggtatttttataagaacaaagtatttattgactggttaaatattgatcatatataagatcaatctttcattgaggtaaacattgcaaaactcctccatcccctgcttaatctgttttctcccaaacaggtcatttttcctccatatttctcttttttatttttaaaaattttgaagaaacatttaattaataaatatctatattccaggtatacaacctaagtatttgatattcatatgcatcatgtagtgattgtcacaatcaaattaattaacacatccatcaccaccttactgtaccttaagtccccacccacatttcttttttattctagataaccttgttttttttaagtcttgtcttttaccattctctacatcattttctatggtagaaccagactggtagtgagagggaaaggatctcagtggttgcatgaatgtagggggcattcatcagtcatgtgattaaaatatgggtgttgcccatgtaggaaagaacctggaaacttctgtcataccatgcttcttattgcagtgtttatggttaaaaacaataatggtgtttttataaatagaatgctaactttattttattttgttaagaagatgcaatctccagcagaattgatcccatggttttaggcctgtggttctgtttttttctcaatatcaagattaggcttattgaaattaagatagaagtatcttaaaagcaagatcattttgatgcagcataaggtgttggaaaatgcactctgagctgataatgggtcagtgggcttgaaggatgccaagaaatggagctcagcaaagttaatgtcttaggcatttcgagttctgtttcaggttagtcttatagactatagttttaaagcaatttcaaaatacttttcaaaattacctttctcaaaagaaactgattcttgggaacattgaaaacctccaaagttatcttaggtaagaatgtcttttgctggcccctttagtttccagattactcctagttctcttcctcctctatctttactttaattcttccgtaagttagagcttttggttttaatgagaacccaagagaaatagggagcaaaacaggaattgatctgttgctgttatgcaagttcagtttattccttcttaaactattttgtgaaaatttaagatccacctttttttctaaggaaacaagtactgttcagggtggattcatcccattatctatgtgctttgttacagtcccaagatattcaccattaaaatttttagacttcatgtggcttgcatagaattattctgtgtaaaatttaaattaagaaatgtcatttgaatgtctgctgtggtaactttaaaagttgaatttcatctcaacttgttaaatttcatcttgcaaatttcagattgttggaccacttccaatatctctttcttaagaaaggttatgtatggcagtatttagactacaaattgccataaaatcataaaccctgcacataaggaagtggagttagtggtgttagggtggttatattacagatcctagggtggttatattacagatccttctttatgtgcttacacctttttttcttgttggtgaagccactgatgtttggttcagtgattgcaagttttagaaaagataaatctgtgttacttgggaatgaatgttttaatatataacttttcccaatgtacttttgaacttggagagtcagatgaaaggatattttactttagtgatagacatactgaaaggatttagtcattgagtaagtatttgccaggtacttctgtgtttgaggggatgtctaggtggagggaagaggggaaggcatgcaaaataaatataacatagtttccagccttgaggagctataaaatctggttggagaagaataactgaatatgaaactttgtgagaacaattaggtgccgaatggacataaatgcagtaggattgcaggaaggaagaggttccaagggcagaagagggggaatgaattgggtctcagaggattttatacaaaaaagaggaaaggagaaagcactacaagcagatcagccagcagagcaaaggcacaagaagaggagcaagcagatatggagcagctgccaggtcaaggagaacttcagggaaaagtcatgggaattcacttatctccattgatgacattctctttttctccttcctttctttgtatattctttattattttccacaagggtgtttgacactacaagaaagacaaagaagtctcagaccctgcctcccagcagtttatacctgagttggtgatcaaatcccttttggatacagagaggactgaaataataaatgtgagacaggaagataacatgtatattcacataactcagtatgcacatagttagtactaagtgtatagcagagacagtgaaatctgtacacattcttaccgacccttttttaatgcccaattcagatactacctcctcagtgcatccttccttcttcaccttagccagaagtgtcagctcttctgtaaatttcagttgtactttgtcattcttatgcaaacttcattttattttagtgtttgtataaatatttattctatcattttataagatgatataagcaccttcatggctggcaccgtccctgaattctcaaagaatattgagcaatgcatacatgggttcccaggggagattgcttatggatggagttgccaagaaggcttcattaaagagtgttgtgttctttgaatgaggaaagtaccacgttggatgtggagcagataagagagagtaacatagggaataaaggaatgaaatgtgagtcatgctcaagcaatgatgggcaggtaagtctgaagggggagtttatgtagagaggaaacgagggatgagattgagaagataggccagagctagattatgaaagctcttggacaagactgttgctcattttgctgagggaaatacaggctcttgagtagggaaatgatatgaaaatggtgactttatgatttgtaaagatagttatttcctgggtaatttgatcagactgcctgcatttatgtcttggcttcttcacattctatgggaccttgggtagcttaattgttctgtgcctcaggttctatcacctcaaaaggtgaagatacaaattatacaagtaactgcattatggggctgtggtaaggattaaataagtcaatctacgtgaaatatgtagcgtagttcttggcacttggcaagcacaataaaggcactttattgttcattggtgtagatactgtaagaattacaatgtttactttagaaatgagaaaattctagagctaggactctattagttatctgctgtaacaaagtactgcagacaaggtggcttaaacaatagtttattgtcttacagtggtggaggctagaagtctaaaatctaaaaatctgtcagcagactgtttccttttgaggctatgaaggagaacctgtaccaagccttttaccaagtttctggtggcttctaccaatctttggcatgctcatcttgtagatgcttcactccaatctctattttcatcttcacatggcattctgtgtgtgtgtgtgtgtgtgtgtgtgtgtgtgtgtctccaaatttccactctttataaagacactggtcatattggagtaggggtctgccctattccaatatgacctcatcttaactaattaaatctgcatgaccctctttccaaataaggtcccatttagaggtttgggggttaggacttcaacatatgaatttttgtggaacaaaatttaacctttaacagactgtaagtcagatatttcgagcctaccataacatggccatgatatgccaaaaggattgtagaaaagaggaggaatctgtaggtttatatgataatcagttaatgaacttgttgtctcttctgtctcctttctgcctgggcctacaccattcccctacgtagccacattaatggacattgccataaagggctttgggattttgctgtgccccctgtttcctgaaaagatattttgttttcttccttctttccagcatgacattccctgtgacttatttctgtctaggattagagataaggatattaagataaatgagacattatgcttataccacatagtttctgtcttctctaaatttgggtgatatgtcactgtccaaatgtataggtgacaaaggaagaaatgaatgcttgtggaaaggggcaaaaactcttgaagtgtcaatggtaaggattttactgaggagtcagttggagatgataagtgagtaggtatgcagctgtgtggcaagagagaaatttttccccgccctacccccaggcttatggtgggaattgaggtaagtgaacaaataggatcaagtttccttaagtcactgagaaagttagaaatatccccagagtgatagaaattaccagtgaaggtttaaaagagtatatggacaaatggtgatttcaaatgataaaagtgccaggagagtcacacctagagtcatttagagaactaggctgtctcaggaattgaagaggctgcctccatgttgcttgtgaattggtaggatgtgagatttggcctgcatgggagagcacaactggagacaagttgttattgaaagactcagttgtttcataaaatctgtaatttggaaggatcttaggtgttccccaaccccaccttatttaaattctgaatcacctgacaggtgatcatctagtttctgcattcatttagggctagacataagaagagagtttgaaaaataagtttactacaaaagggagttttttttccagcatagacaaacaggaattccattaggtttgatcaaaagagaagtagctagggggactcaggctgtgaatagacatggggtaaaaatgggtagggtgggtatgaaagtttgggtggagaagtatacaagcgagagagaagtatatgcctagattaggagatgccaagaatggggctaacactatgagagcagtttgctaagacagaatgaaataaggacaacttactcacctagataaggatatagactccgcattaaacattcatgaacttgtgcatgcacacagacatgggcattaaatatctggccatatttcaggccctcggagtttttaatttttttaaataatcatacctattaagcacctttcatatgccagtcattgctctgggcacctttctcatattatcattcatcttccttacagtcctgggagatagatatttctatccccaatttacagatgtggaactgagttggaatatttctgcagcagcatgttatttgtcctgtgtatccatggccagcaattcagaaattattctcttgttctacataatatatgtagtctccagcagtctactagagctttacttttcctcaaaaattatttcctgactggtaacatttcatagacttaaatatacaccatattaagttttttttagcaggaaatactagcaattgtgtagatgtagaagaaataataattacagagtattcttttgaattctctagataaaagttaatagtacagaaagattgtttaaatttacaaatagtaacactaatcaagtccttataccaaaccattaaataataattacaatccttgggcatgtgattagacatggggacatgagggaatcactttaaatttcaaaacagagcaacctaaataaaagtcagcacagaaacagtcattcagcagaaaggaaggcttggctggtctggacatggatagactagggagagtgtgaggtgcctaatcccatgcaagatgggccgaaaattttgagatggcatttagaaaaagacccatagaggactcatgaaatctatccttggaatgtcaggaaataatgagagacattcaggcagtggtctgcgattagaggcatgttagttaggcatgctaataatgggatggcgaaagttgggggtaaagcaagtcacctagacctagcagcctgaggtggacttagtgggagctttgtgccttgggggaggctgggaaggcactggccgtgatcacggctctcagtaaactctgtgataatcactcagagtaacctttagagttcaaacattgtagtacattttatctccatatgatttgtcttcctacacaaatttttattgtttcttttaatgtaattatatttatgtagctgtataactatatgtttagttatctctgaggatttaaaagtttacctcttgacgcagttaaatttatccaactaatatatattttttaagtgtttactaagtgctaggtacacttttatgtgctggagatatagcagaaagcaaagtgccctcctgaagcttacattctagatgggagagccaagcacacaaaataaataagtaaattatatagtagattagaaggtcataagtgccatgaagagaaataaaacccaggagggaattagagaatggtaatggttggacttggtaatgatgtcatttaaataaggtagtcattgcagacctcactgagagagtgacatttgagcaaaaatttaaaggggatgagggagcaagccacatggatatcctagggtaggcatttggggcagagggaacaaatgtgcaggcgctgaggagggagctcacctcatgtatacaggaataatagaggccaacatggctggagcagagagagactggacagtcggacatgaaggcagagaggcagtatggccaggctgcttagccccttgagagcaatgcttaggagtttgatgcttatctgaatgaggtgggaagccattagagtgttttaaatagagtggtgacatactctgaattaggattgaacaggatcactctggcttctatgtggagaatgatcttagggaggtaagagtgaaggcaggtagacaaatttggaggctgtcgcaggcaagacatggtatggctgtatggtggtggtaaaagtggctggattctggacggatttggagtagagccaacagaatatgctgatagtttggatatggagagtgaaatagggaagggagaaaaggagggggtggggttgagtccaattactggcaggattagttgccagtaactgagttggggaagtctaagaaggcagtgcctacgtctttgggttaactacatctatgtatcattgttttacaaaccaagtctgtggtattctgagttgattatgattcacaggaggacatttgaaaagtatgctgggattttaatgccaaagaactcaaaggttttcatctgtgtgataaaagtgagaatcaaaataagtacatataaaaatgtttggaaatgttaaagacagcaaaaaaaaaaaaaaagtaaattttatcactgatgagtacttgaagtctggaaaaatgaggaatgcttgtatataagtaaagaatgtaaaagaacttcatgtgtagtaataaaagcaccactccatatatactcatccaatatatacaatttttatttcaatcagatgtactgcagttacaggtttaatgcccataaattactttccaatgaacttccttttagccctttgcttaccatctgtatgtttcatttttggaatattcccaaagccttttaaaaaatgtgtcagtccagtgtattctgctttgtcctttgcttcaacagcaacattcttagtcatttttctgggtgtaagtcagagaaaaatagcaaaagttgactaaagagaaagatgtggtgaaagtatcacattttcttttataatgggacaaagtattatggcaagctactcataattctaacaggaacttagatgatttaactaaaaagaagataaagggcatatggatggggaagcagtccccaagaccaccatcagccttggcaattcactagaaggacttacaacatttgttatcatctggttatgctttatttaacacagccaaaggatacagattaaacttagcaaagggcaaaggcacatggggcaaagcccaggagaaaacaggcataagcttctaggtgtccactcctactgaagttgtactcaaaacaacaatgtgtgccaatacatgcaaagcgttgctagccagggaagctcacctgagccttggtgtcctgggcttttattgtagttagatgtgactgacttcagctactcagactccagcctctccagagcaaagataggagtttatcatgagtcatctagttaactaaagtgttactgccatgtaacccaaggcctcgagtgtataaaaacctctttatcaggcagaatattccaagggctcgtctctcatgagctggtaaagggccagtcctgaagacttctcttgggaatgtgtatggtttgagcaattcaggtctgctaatataaccctttcccatttaacatagtagatccttgaacattgtattagtgcttcttagaggcattattactattagagagtaaacttatagtatcttatcctagaagatatgatataaggacataccaaaaatacacataatgtcaagaacggtttagctaaattcataaatgagtgaaccagattagattgcataagtgaggttagtagtactttttttgtggggcgcttcccctgaaaatctgtaatcagtgtcatgactcacccataggagtttgcagacaaagggctagaggaacagagaaactaacccacaagtatatgtgatatttattgggttcaggaaaaaggtcaaaaggaggaaagttaccctggaggttgatgttgaattctggaatagtctcaggaatctgttgaaaaactgcagagtaatgaaacagtacttaggaaaaaaaagcatgactttggtgagaaaattggaatgaaagaaaaaggatagggaagaaatgaagatgatttccaaataattggtttgagaaaatgtagtgaagaagttaagaaagttctgattggaagaatttagttttaggtgtataaatgagcaccttagacggcaggttatgaggaaggaggtgggagtgagcaaatgaccacgtgcagccatgcagccatattcttgtgggaagtcccaggattgagacactgcaggcagcttgcagggagaaaggaagtgaggcataatggctaaaatcttgactgtgactcagacacacctgaagtcaaaaataaacctgaccactcactgaataatgctgggtaggttatttcaccattctaaatctcactttcctcatctatttccaacaaaattacccataaaataattttggggattaaatatgataatgaaatacacgttctttgcacagtaaaagcagtaaaaattttctgggaaaaaagcataagaaggattttccacagaggtattaagagaagcaggagaatacggtatcccagaaactaatttcccaaagtgtcagggaagaggaagagtgtggtgtattatcctaggtggggagattctggagagtgagtactaggaaagggatactgggtttttctaatgggaatttgaaaaagggcttggcctgagcagctttaattagtatattagggttctccagagaaacagaaccagtagatccatgtctacacctacatctgtttatctatctatatctagaattggctagattatgggaattggccattatgggaatgggcttttgtaatttggaggctgagaggtcccacaatctgccatttgcactctggagacccaggaaaacaggtggaataggtccagcctgaatataaaggcctgagaactaggaccactgttggtgtaaatcccaggcaaaggacaggagaagaccaatgttccagcccaagcagttaggccgagagaaaatcttccctctctttttgttctgtttgggcccacccacattgggaggacagtctgctttactcagtttagtctcttctggaaacaccctcatagacacatccagaaatgatgtttgaccaaatacttgtgtaccctgtgattctgtcaagttgacacaaaactatcacaactggtaagaaaagaagtcacatatgtaaacatcaaagggggagaattggtgatacagaattaaagatatttaatttacagattcaaggagttacattgccagttgaaagataatatacattggcatttgtggaaagtggaaaatgtattttgattaaacatcaaaattttaaaaaattatatttaagtttataagtaatttttttcatctgttgcatttcatcaggacttatatttctgcatttaggattttttgtgactgtgtaagcatgtttttattagtatggtgaatcagttagctttatctgtatatagactttggttgatgaagaagtagattggtaattgcttttttcctcagatctgtttggttacttggaatatttagctgaaagttataaatgtgcagttgagcaggaagaagaagaaaacttttggcatcaaatattctatatttctcaaaatatttgatatttttagtctcctgaagagactgcaaggttgagaataaacaatgcattgtacatattttaaaaatagcattctctgagtgatagttttgtgagcgtttcctcctggggtcatggtgcacttcccctcagttggactgacctcgatgttctcattgagaagatgatgatggctgctagtatttattgagcactttctaaatcctaggcaccattttaatgctttaagtatatcagctaatttaagcttcacagaaaccctatgagggaggtactattatttgatccattttacagaggaggaaacaggaacgtaggtaaggatgtgatgatgctaggattcaaacccaggaagtgtggctccagcttgcaccctcaaacactgatagtgttttgaggtgaatgataactagcttttttttttttaaacacttactatgaagtgagggctttaaaggtgctacctcatttaatctcccaaccagtcagtgagacaaatagcattttattttaaatgaagaaataggtttagatagcttgtccaaagtcatacagtgacaaacaactgtgaccccatgccagccctcttaaccatctcaccagtctgccttcaggaatgtattgcaggaagaaaaattttactttggttttcaggagcattttgtggtttagtttaactgttatttgaaactgtatagggttgagatttagctgttggcttcattatttttattcatcctcttttctatactttattttttagtcagtaatgctacaaaagtgttttcatggttaaagctattgctgagagagccatagcttgtccttcagaccattacagaaaatcttttactctttagagaaagtttttaaaaatatattgcaaattttctttagtggccaagttcaataggttaaataaattgttttggactaagggagactgactattcatctttattttcaggcagagtaatacagtactacagttttttaaaaaaaaaaacctcagagacatcattttcttatatttttgtttatagttatttagggaaggtatagattttcttgcccactttgtattttcaatgcctaacatagttccaggattttattttattttattattttttttttgagactgtcacccagactggagtgcagtggggtgatcttggctcactgcaacttctgccacccagcttcaagcgatcctcccacctcagcctcccaagtagctgggaccccaggtacatgccacaacacccaaataatttttgtatttttttgtagagacagggtttcaccatgttgcccaggctggtctccaactcctgggctcaagtgctgcaactgcctcagcctcccaactgctgggataacaggcatgagccactgtgcctggcccataattcctggatttaatactttttcaatacatagtagaatttattggtatttataagaaattcttatccccaacttgggtaaggaattgatattccagtactggatcacaatgcactgcaaagcataacaggcaaaaattactactttttaagtgattcagcataaaaaatacacttaattatgctcaatattaacttctgaaaataatattaaaataaaaaattctgaaaataatttagaatagtgtattctaaaaccatcattaagaaaatcaactaaaattgtaataaagaaatactaatcagaagatcttcaattgttagactgctagataagctagaatttatttatagcttatcttagaaagtgtaaccgtttcattttctcttttggccttctgtaagcaaaattagatgccccagtactctcataagtgacgtttgtacactcgtatctctaccctcgtttccctttgcctccatgaaaataatacagattttactttttttctacatatgaaatgataaccaatctctgaaaagctggatactaatggtttgtagtttagtagtaacatgcaccaggctaacctctaccactaaattatgaatttagttagatagccactacatttctcactcaggtggtctctggtggatgggggaggaacccttcagacttgacatcagaaaatgtttgtgagcactttaaacatattttacatgaattattctaatataaggaagttatacaattatcatcactggtataacaaagaaagtgggcttcacattatataatgaaaaagtgtgctgtcttcatgaaaacctttcaggggacaatgatagaaatgttctttgactgtacagagctgcagttaataaaagcctgacctaaagtttttttttaatgttgtattttaaggtggtgaacaccgttattatacatggtgtggttttgctgtgtggcctcaggtttctaattactccttcagcagcgtgtgcaaattcttggaggttccatatactatcatttcatattgtggatttttgtttggaaattaccttttagggagcaaaagtattcttgattttgattaagagctctcggttttggccaggcactgtggctcacgcctgtaatcccagcacttagggaggctgaggcgggcggatcacgaggtcaggagatcgagaccatcctggctaacatggtgaaaccccgtctctactaaaaatacaaaaaattagctgggcgtggtggcgggtgcctgtagtcccactgcttgggaggctgaggcaggagaatggcatgaacctaggaggtggagcttgcagtgagccaagattgctccactgcactccagcctgggcaacagagcgagactccgtcttaaaaaaaaaaaaaaaaaaaaggagctctcagttttaagattttcctttttgtctgagtccacgggctttacacatcagggagtataattttagggaacgattctgcagtaccaaagccataggttttcttaggatttgacatatttaagaataaggttagatttatttcactacaaaaatttaccaaggacatgtaaggttttactttggtattgaggaaacattcttcaaaaaattattttaattatgcatttaataaaactgaaatagaaaagtgaggagaccttttaaaatatatgcattttattactatagttaaaatatgtagcaacagtgaaatagtatgtgagaccacagcaaggtgttccccaaagcacttggaaggtttctctgagagttaaatcctaaaatggatcagagaaggcaatgcagccctgtctagtatatcctaatgctctcaggcaatcagggttttcctaaaacttcaatggaggcctgaaggaggagggaacttggacttaaatggaagcatgagcaagcgagtcacagtgcctaacctcggcaacatctgtctgttttccacgggagagggtgcaacgtcaggaacattcatttgtcgggtctgcctgttcaatcttgccatggatatgggcacactggttctagtgtgggggattattcctaatcatgtaactaactatggggcccatccattaagttgagcaaactggagcagctgctcttaggctgagcttggcgggtgtggtggcaggagctataggggatgtacatttcactcttgttttctaaatatgattacaactcagtttttaaaattttgtctttaatgatacccccaaggacatctgtgacagctgctggcaatttcagcagcctccttcaaatgaagttatggtagcgatcttaactggtcaagttgccccaagttcagggcctttcccattgcctttgttctgattctttacttgttcaccagacagttatctaataattcacttcctgtgttggtttcctgtgaagtcagaaaatatttcccaatctgcttgacggtaaacgaatatgctgacattctggtttttcatatgtgagaggtagggaagcctaacattaagtagcatctcatctccaggatgatcagctgagatactgatggcagtgatggagccaggaccagaccctgtactgaggttaacctatccgccttgcagtggcagcaggtgtcccctaaattttaatgtactccttccgtaatataaatgtgttactaagaaacagctttccagccagggactgtgtttcccagtcgctgttagatcggcaggcctttctcctgacagaataaaggagaaaaaagaagtggtcgccttttgtatatgaagaattaaattactgaccctaggaagaaaatttagttaatagctcatttaatctattattcttttctttggggcaaaacctctaacaaacacttgaaaaatttaaagggtcgtatactttcctttccagtgagtgatgagcttactatgagtgatgtgttgaagagtgagaagcattgtgttccaatttcaactaagtctctaataagcagtatgatctggccctagtcagttaacatctatagttcttatatttttacctgtaaagtatgaagatttagtttctttcaaataaaatattttatcaataggttagtataatcttgcaggtctgaaacatcttcctttttataaatattattgagctcttcatgtcatgttctatgctaagtgcatcacacatgtctaatcaccccatgaagcatatttcattttgtggatgacagaagggaggttttgagagtggacgtcagttgatcaaagctaggaggcagcagagctgagatttatgctcttgtctgcccaactccatgccccatactgttaatcattatgttgtgttcctcaaatttggcacatattataagagggttttttaatccatcttagtttggggcatgttttactctctacagggtgatttctttctcccatccttatactttctctgttttctgaagcctgtggaattgaaagaacttttgtactaccatttgtttcattctataaacagtcccagatcatttgaaacccaaatcttttttgaaacttgatgtactagtttagtgttcagttttttcttctcagcatattcttctgtgctttctttgtgtaaggatggcaaaaaaatggaacttttaatgttattgaacattctcacaaattagtttggttaaaggaaagaatcttggcttaggatttaggaggtgcaagttctagttctttctctgaaatttattgtggaacaaataatactattttgctatattaagttattgaagagtaaaagatcaaatatgtgaaaagcatttaggatcacagaaacgaagtttttctgtgtgactgctgaatcataatagctgcagtggattgttggaaccagaattacagcaaaataatttggggcctatctttgctttataaagatctgcttaaggtaattgtaattcataattcacgtggcttggcctacacgtaatgctaaacttggactgctgaatatatacaggcagagagatgatcaaattgctatctgaattatagcagtaacagcgtgattttttttttttttaaagacaaggtctcactgtgtcacccaggctagagtgcagtggcacaattatagctcactgcagcgtcgaactcctgagctcaagcaatcctcctgcctcagcctcccgagtagctggaactacaggcacatgccaccacatctggctaatttttttattattttattttatttttgtggatatggagtctcactatgttgaccaggctggtctcaaactcctgacctcaactgatcctcctacctcatagatttaagaatgttttactatccaagttgtgtgacataagacaaatgaatgggaagaaaaagtggatcatgaaagttgtagagttaaaagaggaaaaagagaatttcaggggacatgatgctcaatggaatcattcagaaacagcctgagaattgagttgtagataaagtacttattagtagcatcagctgctgagagtcgctggtaattttgccatgttgaaaatgctatgctcttgaactgggcgaagtgcaacttaaagatttaaagggcctgggagtgctctgctgtttttgaaacacaatgaagtagggggtgaatagcttgagagatcatgcacaaacatcttgaagttcagacttatttctccaggacagaaggcacattttgagatagtgtgtgtgtttgtgtttgtttcatagtgttgaaagtgggagggttggctgggcgcggtggcgcacgcctgtaatcccagcactttgggaggccgaggcgggtggatcacgaggtcaagagagcgagaccatcctggctaacagggtgaaaccccatctctactaaaaatacaaaatattagctgggcatggtggtgggtgcctgtagtcccagctactggggaggctgaggcaggagaatggcgtgaacccaggaggcagagcttgcagtgagccgagatcgggccactgcactccagcctgggcgacagagcgagactccgtctaaaaaataaagaaagtgggagggttggggctgaccattcccataaactcattagcttttaatgccctttgtttcggtaagcatttttggcatctctcaaactatagttattcaggtaccaccttcaacaatttttgccatatccatttactttttttttacttttaaatttaaatatattttaaacaggagttttgcatatctgtagaaatctcaggtttgatgtggtatagtttttcataatgcacattaaaataagtacgtaaaattaacgtaaagcctgtccatttttggtccacctaaaattatcttgaaacactcttttcatttaattttggctcttctctttgtacaatgagcacacacaatgtctagagtggaaggtcaaagagaaaactcaatgactggaaatagagatttttcagtgaaattttctagacagatttaaaatgatgggtgggtattacttcctcttttaggttatcagcctaaaacaagtttggtttagattttagttagatttaatttcttttctttttaaactagtggatagtttttaggctacataagtttctaggcttcatacgtgttttctcccattagtttcctagagggactttttttctggaaagttccacactttccttggcttcaaataagggggaacaaagtttctccatgcttattttattgatgaggtctgctctaccaacagctaagcccagggatttggttcagcacagccagcatgctgccttttaaaagccagattcagtgctaagctccatgatacatagaggaagaaggttctcaccttctgtgaggcattgcatgtaaacaaccgaaacagtccggtgtgatataggtatgtgccagatacaagagagatcaactctttgggtgaatcaacaaaagccttaatagctgggagagcactgggggctgagcacactgagtggggcatggggaaggtagtacaccatttgtggtattgagaatgccacggttctttctcctcagtcttcatagatgattgttctgcagaatctctatgggttctgcattggctaacgtggtgttctgacggaaattaatattttaaatgtacagtaatgcacaaccttgctgctctgactcccttgcacgaattcaaagtaatagctagagaaccttcaataacagttggcatgttgagatggcatccttcccaaaacaacatcttaatgaggttctatgcttcaggatcagcttttctggtttaaatatattcagacatatcctacgtaactggaagcaatgtggcagaagtggcaggggtcacattgtgagttttgctgagttaggcatgtaggccccacagtgtgagggactcttcggagcagtcctgaatatacagtgattctgtgcctgggtgggagtgtggttgcataggggaggacaaagaacatgatgaattaaccttacccacgtttggggaagtttgtacagaatgtgagatggaaaaattctagtttccatgtattaatgccttcttacccatatgctcatagctggagccactcccctatccacctgagctcccacacattcaaaagctggtagttgagggatctttcactgcatgtacgttgggtgtgtgtatgggggttcagttaaaggagaaagtgtctaaaacccccacaatgctgattgcattgatgagagcattcagacttagacttttagggacttaatatatacaggatttttttttaatcgttagcggtatattattctctttctttcttttttttttttttttttttgagatagagtttctctctgtcacccagcctggagtgcagtggtggatcttggctcactgcaacctccgcctcccaggttcaagcgattcctgcctcaacctcccgagtagatgggaatacaggcaccccccaccacacctggctaatttttgtatttttagtagagatggggtttcgccattttggccaggatggtcttcaactcctgacctcaaggggcccgcccgcctccgcctcccaaagtcctgggattacaggcatgagccaccgtgcctggccggtatattgttctctaaatggagcaaggaataagcccctggggggactgagcattacctcagacccagccatttctgtgtgctgccagagaccacacccctcctcaggcataaccacagaagactatttcttttggctgggtctctgaccttgaaggatccagcctgccagctgccttgagactttgggtgctagacataatactggcagagtccaagagttatttctatttcatatgttttatttagtatggctatattaattttttattcatcagaagttctgctgttgaaataaatgtaaaatgttttacaaaaccaaaaccactgccatcgagtttcatatataggtagaaatataaaaaactccagaataaggtagcaccctcaaatgatgtctcattgcctttttcttggaaacacacacagcaagttgaaaatgtggattgatctgccatatctgttaaattattagtttttcttcttctaaatatgatgaggcagtttttccttggaaaaacagtttgtgttcagcttgggaggttgattttccaccatcagtttctccctttaataattgaaaaccactgttcgttatttacataaaactgtctttttctggtctgctttctataacctttcccctcttaagaattttaagaattccctgactttcctctgagggattttctgcctgctttatcccagatgtgggacattgactaggctgaggttttggggattttattttattttttttagtgtttctacatttgaaagatgttcttttaaccagtgcacaaatctgccactgaaaaaaggggctttgaagaaaaatcaagtagttaagaaaatatgtgaactttgtttacatttctcacttactgaatgacaccaaaatcccatatgccaaatgaaaaagtagacagtagtttcagataataaggggaaaatgcacccgtgttatttcagccttttaattctgggattttattctctgaatgaaggcatgtcagtttctggtcccagtggcactgtgtttggtcttcactacatgcttgctgatgtcagcccaggaaatacacgggcttggcagatgtttacatggcctttgtcttctctctttccaccttctgctcacataaagaggatatttaaccttattcataatattttgtctgcttacagatgtattgatcctaatccctggttcagaaatgttaggaaaaggagataagttacagtgaaagaggctgtagtaagaaatacaggattttctggttttttgtaatgtctactcagattcccagatgattgttcattaccagcttttggttattgtggtttatgtattaatgtctaaaaaaatataccatgtgatgttttttgcatgatactatgtgagaagaataccaagaataattttttccttacttgaacaaatattatacattttcccttagtccaaaattctgttttccataatgaatacaattctgatgtagtatgtttaactctataaaatcagaactttagtaattttcttcctaattaaatttttttgttgtatttttaaaaatctaaattcataagctttattttcacatatggtttctacctcttatatgtttccacacctgtgccatgttcccttggctgacagacactttttttcctttttatctcacgtaggatctttcgaagatggtttggctgccttggagatttggagatctgatgccacgatgaggactcacacacggggggctcccagtgtgtttttcatatatttgctttgctttgtgtcagcctacatcaccgacgagaacccagaagttatgattcccttcaccaatgccaactacgacagccatcccatgctgtacttctccagggcagaagtggcggagctgcagctcagggctgccagctcgcacgagcacattgcagcccgcctcacggaggctgtgcacacgatgctgtccagccccttggaatacctccctccctgggatcccaaggactacagtgcccgctggaatgaaatttttggaaacaacttgggtgccttggcaatgttctgtgtgctgtatcctgagaacattgaagcccgagacatggccaaagactacatggagaggatggcagcgcagcctagttggtagatttttgtcttgttcttcttactgtggtaactctgcattagaaagaaacaaatccatatgacatctcagtggccagatcttcatgtacctctttgtgtatgtgtgtggggggaggtgttatttgttatttgtgttgccagtcttatgaatggcccttagtttcaaaagatgtagtaacttccatgtttaaagttagaaggaaaatatttagatgcagcctaatctaaagaaaaaataatttgctgaattgagtaaagagtatcatcgtgattgctgagaattctttcttccatattcagcatgtatatattactatcatctggtgttaggtttgattgatcccaagtagttaaaacattttgcagcaagacatttcaagtaattaagacttacttgcattttatgatcgtaaggaactaaatgtgaatgggatgggactgactggcaatttataaacacatcccctccaataaccagcagatttctgagacctgtaggaaaaccaacattattgtgtaattgtgtgaggaattctaactacataataatttagtttcgaagtttaagatttgagaacaaattcctgtcttttcgattagcttaaatttatttgattaatttataattaatgcttcatatgcttccaaacagatatgggatgagttgattaaacaagggattctacagatgtttttactcatgcaatttttaaatacacatttatggttcaattgcaataaaagaatttacagattgatgaaatttttttaaaaaattacataagctgcctcttgtcatagggctagagagagctcattttaaatgcttagaaaaaaatcagtgaatgcacctaatgctatgatgaattacatcttaacatatcacaggggtgaaggatggtggtttgcaagctttccgataaatttctggaattttgtaatgaaaagtattatgcaagagttggcattaaatccatatcagagctgatattttaggcctgttgctaagtacatgtagtcattttgaagtttataatattgtaggttgaaaagaattttttatttgatttatttcaaagcttagccatgtatgtagttgtttctgactttgactgacattaactgatcttattctattcttgacaccaagaaagaaaagatgtatgaaaacttatctgatatttgaattaccagattacattatcaaatgctacagtaactcactgattgatttgttcaattagtttaaaatagcaaccatatttacattatttagaaagaaacctttgtcatctagaagggtactttaaagtcctttttgttttagataagtagattttggcaaattaagaaattgatgtaaatgttccagagatagagcctgtagagaaccgtgtatttaatctcacaagaaagtaatggactgtgaaataccatttttgatggagattgtttagcacaatacagtaacatgagaattgtacaagactagtacagttttctcattataatgtaaaatatttgggtatataaataccaatgaatgaatgctgccattaggatgagactccttctatgaaaagagaaataaataacttgaaagaaatattataatttttacatagtttccacaagtccagatttattgatcactggaggtgtatagaaacttactaggggtctagtactttattcatggcaatattgatagaaataggtataactctaggccattatctagtaaactaaaagccaatttttgacttaatagagctgaacagttgacttctttctcttgaccttcaaggtaaaatcttgagaatttacctttacatctggtttctagttgcaaaagtgaacttggcttagaaagttgagctacttgaacattttgttttggcaggtactattattaagttgtgttgtttaataacttcacagaaattttaacttcttaaaaactaccacacccaacccttagacttttaaactttcatttagatttgtggttgaacacaattacaacacaattatgtgctgtaataatttaaaacaatgttcagtgattttacagttcaactacctctgtttcaattgctccattaaatcatattctcactatgtaccaagaagtacacaatgagtattgtcattgacttaggatataattcacctatatttgatttcagaaaaaacaaaaacaaaaaactagctgttacttacaaaagagatcaataattgatattatgaaagtaaaaaaaaaaaaactttctacaatagcttcatcaggctgaatgcattttccattttctttgaagagcatttttactcttttgaaagccagttactaagttatgttcattcactgattcatttgatcaacaaacgtttattgagcatctactgtgtatcatgcactgtgctagggtgctggggattcaaagttgaagaaatagcccagtaattttataatttttacctatggcaaagggtacaaacattgggttcttaaagcctaagctaaggatattttctctgctcagaattgagtgtgtggatcatttcataaggagtttccttagttttcattcatgacttaaacatttgtatcatgctgcaccctagtgtggtagaaaagcaccaactctggagtcacactgcctttgaatcccagctccctcactcttcagctatgttaattttcttaattaactttccagattaattttcttaatttgcgtgagcattagtgtcctgatgtataatgtggcagtaacaaccctatctaccttatagggttgctaggaagattaagtgcaataatcaatgtaaagtacttagcacagttcttgtctcatagtaagccctcagtaaatgagaataatgacaataatggtaattattgatgctgttcttttacctacctagtaattagaccctgtttggtttataatttggtatatgtaggctccaaggaaatagtatccatttaggattttactaatcttaattgctctcaaaactagaacatctgtttaactcataaaattttccccttggctttttccattaaaacgttcattgatgctcccctgggccctttttaaaatgtatacaagaatctaatgttaacaccaatgaagaaggtttagtggaaagtaacaatgatgtgtcatttgtctggtattaaaaagaagtgcctatgagatatacatgcatacaaatttattaatggggttcatttcatttgaatagtaaataaagaggttaaagttcacctctatagattcacttaagaattctgaagcagaaacgttaaagggaaaatattcaattgtactctgtccatctaatagcctacaaagtagaacgggaatctcatagatttataattataatggtgattgaaaaataacagcatgcatttttattgtgtgtgtctctgagtatccagacgactgggcaccgcagaatgatgagactaatctatatgctttatctactttttcagaggtgctcgcatcctatctcagaagctctcccccgtttctctcccttttgctaaggaacacacattcttcattacagtaaaagtaacagagtaatttgagcttgtgctgaacttagttttaaaagtaaaattaaaaaggtattattttaatccaatatataatggcaaaatattctttattaaaaattacaatggcaaagatatcagcaataataattttaatttaataaattttattaaattaataaaatttaataattttaatttaataaaaaatatcagcaataaagttctactgtaacttttcccctagaagattaaggaagcataaaatattgtgcttcaaattagaagtagctgagaaagaaaagaggggggaaagactggagacattgactggacaaggaatgtgacagttgctaaaaggcatctaaaacgcaccatgagtgggccacaggtggacactgaggggtttggttggttggttggttggttttcgtagcaaagaaagtaggcttagtcaatattgaagtttacagtgactatgggatcagttactctgtagaactgactactctcttggcccaaggatcagaaggaagtttcccatagggcttttatgaagaaccctcgcagccttctcatccttgcagtgtacgtatgatgaattgcacagtgttatttctttacaccagactgacctgagagcgggaccatgcctgttttgctcatatgtgtatccctcgatggaggatctccaaagcaaagtttactaaaaccttgatcagggagggagtgggggtggtgaaaaggatggatatatggggtagcccaggctacttttttcctaatctagcttaatcctttggtagaattttgcatgtgtagaaaaatgaaatgactgcctgtccaccaggcagcctccctataccttatgaatcttagccaagctcttggtagatgggttgctatgagcttaacattacactcctcagcaaattcttagtgattttccggagctaaaaacaaacaaacaaaatgtactcaaataattattggaaaacattacagatcctgaatcacttaagaaaggtgcagttaagtttaccatatttcacttaataatatgggaagatgaatgcatttaaaagaggtttaggataggattgtaactgagatcacttattgttcaagccctggttgataacatagaattatacagcatccatttccaagcagcaggcttttcatggctccttgtcttaatttgtaaaccctgaggaacaggtctggcccagtggtctttggatctgtccttgcatcttggctctgccattgtgttagccacatgtcctttgacaggttccttacactctgtaaacttggttcttcatctgtaaaatatgggttattcctcccacacaaggtcatcccaaggattgaatgaagtaatgcatataaagctcttagcattatgtgcctggcacatagttttactaaaaagtttgttattattacacaggaatagttacgaatatataactttattctcgctaggtttcttggtacacagtactccattttagctatgttgtcactctggagttgtgtttttgaaaagtatttgttgtgactctttagttctctctttatagtatttttccttacttatcatcagacagaaaataaatcacagaggaaagaaattacttcactcttgcattggagccagttagctacaggaaatcaggagaactggtgagggaaacaaagaaagttgaacttttggacagagaagtaattgtgttttttttttttttttgcaacagactgagtattaaattcttgcctgtgattgcaaacttctggatggtgtcatccgagggtgtatttgcaaaaataaaatataattataaaatataaagagagaaaaaaggtctctagcatattgaaatgaaccagtttcattgctgtacgtatgaaaatgaggagtgtgcctgccttgctcagcattgcctgctgggcttcaaatgcagttctctgcagctgtttctcgggtttttcacttctcaaaattgcaagttaaaactgaaaatcaaaagccgggagaatgtagctgggcctcaaacatgtggagccacagccctgtgagtaaaaagatcaggttttcttctcatgaccttacagtgaggaaggctgggcggcttagcccagaatgcacctggaatccattaaagtggactcgtggagacaaatgctgggctgtcagaaaacccagcctctaattcccctggctttttctcattcatgtttttccctttctcttacccttccccctcactctttctgcctctctttttctctgttcttttcattctgtgacctaagggaagctattcccttttatgctgctgcagagacttaaaaatactatagaagggtaaaataacttatgaggctttttacaacgatcaaattatttaaaatttacagaaacacacagccattgggaattcacttcttgaatgccgtttattaagcaggttgttgccatcagtgttacaaatggattcttgggcaggaatcaaggtcaggtgccctgtggtgggaggaagcagatgaagaggacccgagggagaggcataggcaggtgtacagattagttgagcagcccagttacagtgccattggacagttgtgtggtgcacagtcacaccctaaataggatgttctgctcacctaaattgttaggactcaactaatttaaactcttccccatctatttcaaatgcaggtgaagataaagttactctaataatgcttctttctaacaataactttaaaaatgttatgacagttataaatcatacatgattgaaaggaaatccgaagttaattttctttgtaagatatgtttattgactctaagattcagtattggtatgaccctcaagtcatctctgcgatgggtgactcacttgctcgcctacctcccgccctttcagtgtcatttgatacctttttaaatgcaacatgggcgggctttcagagttgtcagagggaactgtgctcaaggccagaggagttctcgtccctctttaattggggtataaatcagtgcccctcaccccatatgaacaaaggcaacatgaatatattaagtttcatgtagtctttacaatctgggtcttaaatttttctaacataaaaatctggcaagcatgatgtttgaattttgtggatgtcttgcctcattatcataagggaaaatgttagttggcaagtgccgcatgtatgtctgtattctctttcattgatacttcataatcactttttaaaagttggctttattttttggatgaaatattcacgcctaacaccacttaagatgtagggtcttgctgacattaagttcatgctaatgataacttgagagtaataatgacatgagtatgttcatggagtcctttataaagctgggtagttccttttaccttaggtatcttaagaatggcttttttacttctttgtctccttctgccatgtccattaagggaacacatttcagtcatgcttaccacagtctctctcatccatctttccttttcctttccagtgtcaacatgcgagttctggacagcacaggaggagataccatagtcgggggccagatcattgcttatcccacataagcctgtggtttagaaagctttctgtttaggatggcttggaaggaatgactcaggaaaaaagaaacggttagaagcttataatattagtgtaggagggaaatgaagaccacagttaaaacagtgagggtggggagaagaaagtataaatttaagagacatataagactgaaaatctacacagagattgatcagatataggacactctttcttaaagtgtgagtctttcaccatattgggtatccttaaaaagacagattcctgggtttcgcccagactcactgaatcatatcttcttggagtaggccacagaacctgcatttttaacaagtcctctatatgattcttagatgtactaaaacttaaattgtaagggagagggaggcataaatgatggccctgggtgactggttgcatattgatactcaaatgagatggagaatatggggaggagagagtggtttgtgggagagaaaagatggttcacttttttacatgtctttttgtgtcactctatttcttctatctactttatttgtctcactttgttgatactgccaactgtatggacagatgactttcaaagttctctgtccctattacactgcaagggctcatagataaccttagcaggtatcttggtgtatagttattactataacttttaggacctcttggccatatctgctcattcttacaaattcactgtcttccacttcttcttgttctgtggcttcactgctgctactatgctcattatttacccatagtcatttttctcttccctccccttgctctgttcttcactcttgccactctacgaatgcattttgctattggtgattctgtcatttttgaatgtaagtgagctcttcaggaaaaagtacctttgataaataaaaaagatcaatctattttcacccatccagagcttagagattttttacatttttttctagaattttgtgatttttattgttttaaagcttttcactgataggtatttatgtgtggtcttcccagtggtccagttggaccatgtggcactggtattttcaactctgccttcagtttgggcagtaatgagtttgcagatcagccctgagctggcctttctgcctacagactgatttataccttgtcttccacctttctctccaaccctatccagactgtatgatccaccttaacttcttccaccattacatgttctctagcccctcatccaacccaattcctatagttactttttatttaattcattggtttgcagtcataactgggttgcctggttttctgaccaggagtgtacatcttctagattcggctccaaagaaacttctttctagaaaatttccagattccatcttctatacccaccctccagtgtgattcatatgttccaaggaacccatgcaaaactgttataggttgttttgcctgcactgcaattcttggtttatttgtctcctctactggcacataagcttattgagggtagccccagcatttttcggggttccaagagccacatatggtatacctgccacaaagacactaattaattatattgaatgaatggatggatgaatgaatgaataatctgtcttatttttattgagagtctaagcttactgagagcagaagtcctggatctgtatacaactttgaaactgatttggtgccctgcgtactgtggctgctcctacttatctggtctcactttcactctgaagacgtgcctgtcatcagccgtttgtctgtcagcctgtaatcacagagacactgtacctttgacgtacttggaggccagtaggaagaatgtcaggatttgacatcttggtgcatagctcagcagagaatctcagattacctggtctttgaagtattcctcctgcacctggccttctctcctccctgatcccttgaattttggtgttcatcttcttacatgcatgtaatgtccatgtgtgctccttatcaggtaactacaacagagttttgtttttattcactttaaagccacctgcttcagtctttgaaatgaatggcggtgctgttaagcaaggggaggcgatagtttgttggaattaagagcaaggactgtggagccagtctgccagtgttccaattacatttatgagctgtgtgaccttgagaatgttacttgacttctctgtggctcagtttcctcatttgtaatttggggatatatatgatatatacttcatactatgaaggattagttaatgaaacagtacatagcataatgtgttaactattattgttatctttattacttcacttatattttgtgttcttataaattgatgccaaaggcaattttcatttatcgataaatgtatgcacatattcactttatataagtttactgtatttgtttttttgtttttttgttttttggagacagagtctcgctctgtcgcccaggctggagtgcagtggtgtgatcttggctcactgcaagctccgcctcctgggttcatgccattctcctgcctcagcctcccgagtaggctcggactacaggtgcccaccaccacgcctggctaattttttgtatttttttagtagagacggggtttcaccatgttagccaggatggtctcgatctcctgacctcatgatccgcccaccttggcctcccaaagtgctgggattacaggcgtgagccaacacgcccggccaatataagtttattgtatacttgctctgttctgggtattttattaggcattggagatacaaaaatttcaagacgtgttatgtatctcttttgcctggagttgttggtctatggaagatataaatactaatactattagcatattaatactagtagtgggataagtgctgtgactgggaaactacagtgtgtaatgggaagatctaggaatactttgcccaacattggagtgtcagggaaggctttcctgctgagtcctgaaggacagataggaaccagccacgtgaaggggaaaaaggagccgtgcttgactgttcaagcacaagtagctgctgtacaaaggcctggagataaaagaaagcagagtgcttttgaggaactgaaaatttagtgtagggaggaaactagcaagtgttgaggctttgggtagagagccagatgctgccaggccttgtctactatataaaggagcttggacttttttttacaagtactgtgaagccactgaaaggtgtaacagggcagtgacatgatcagatttatgtatgtacgttaaccttttcattgaaaaataaaagtagaatattatatgaataaatgtgtagctgataaagtattttgacgcaaacaccctggtaagtacaacacaggtcaagaaataggactttgccagtcactccctgaagccccttcatgggccacatcccagtcccagttccctcccttcccacaaagactaccctgatgccccagtgcctacaggcgtcatgtccttgtgttcccttatagttcatccaaatgtgcatctctaggcattatcatttaatcttgctcattttttaaatgtcttttaaggcttcaaaaaaaatctacaggccgagcgtggtggctcacgcctgtaatctcagcactttggtaggcagaggcaggcggatcacaaggtcaggagatcgagaccatcatggctaacacggtgaaaccctgtctctactaaaaatacaaaaaaattagctgggtgtggtgacacacgcctgtagtcccagctactggggaggctgaggcaggagaatggcgtgaacccaggaggcagagcttacagtgagccaagatcgctccactgcactccagcctgggcgacagagcgagactctgtctcaaaaaaaaaaaaaaaaaaaaaaaaaaaaaaaaagaagaagaagaatcttgttgtgggagtagattgccaatgtcaaaccaggaagtcaagtaggcctttggtgtttatctaaatgaaaacctagaataggaaataattgacaagttccagtaataaataattagcattcataagacttgacagttgtatttgagggccaaaggagacaaagaattttctttatgggatggtgggatctctcagtgggcttctaatacttggagctattgaggaatgctataaataataaaggtttggatttggatatacagaattgaagtgcctgtgggcccaagaggagatatccaatttatatctctcaagctttatttttagctgcttcctgtttgccagtggtacactgtaacttaagaatgggtgtgtgtatgtgtgtgtgtgttgtgcgtgtgtgtgtctcagtcataaaaaaatatatccaatatgaaatatgctttcaggtacaatatatatcctttctgttgatgatagaaaaatgcagaaagtccaaaggagatcgtatttagttcaaattatcctgctacaataaataaatgaagaatagctggaagaatgagaaatcgaggtgctgatacagcactgcagccacgtgggtgtcctcaaatcactttctggagctgaagccaaagaaacattgtgcaggctgcactctgggaggagggcatcagcttgagtgagtcgtgctgctgcttctcaagttgaaaaagaaaaaaggttcctgatgaagtgtagatagctattagggcttgtaacaacttagtgagcaatttttagttcatatctgtgattcatttacagtgagttcagtattacaagaaaaaaattgggaaatgaagagataagaataaataaaatctgtatgtattgctaatattttatattaacttcagcatcttcccattctaaatcataatttctagaaaccacatgaagtttactattttacctttttccaagagcctgttgatatgagaaatattttaaagtattactgaaaccagtttgaatcttttgccttctgcttttctactataacctgtaacttggtcagagaagttgggacaatatgattacattcagcatttggggtcaacttttattttcagtatagcagtaactctagatctaaaactggggaatgtgtttaatgcctggggcatattgaagttagctcacaagtttggctcataattttaatttatttattctgtttttttggcaacataggagataactataccccacaacattttttatgattcacaaagaaaagttctaaattaacttttatccactgtactgccaaattactttttaaagacatattctttgaaactgtattcccaggacaaaaaataaatattatgggttcagggtgttgtcacaggcattatttcattatttctcttgaatgtaagtggcttcaaagacaaacaaaattgttttggaggtcaagggatgtttttcttgtttttttttttccacaccatgacaaattatgctttccttcctgaattgactgagcccatttagtgtcttcatgcctgcccccttcatacaacaccatctgccctctactttgaacattctgaacttctctgatctcctgggttcctcctgatgatctcacagtgagaattttgtcttagtcctggctccagaccctctgctgggaagtgcctgggcagcctggatttcaacacagctcctcccactgaagcagccctccatgccagcagcatgcctctgatgggtggcttattttggatcacatttaccctctaagacagtggctttgaaactttttcactgtgacctacagtaacaaacaacccagtacagacataactttttttatttgtttctagtttttaattttatttttgtttctaattttattacactgtttatttttatttcaacttttagatttagggggtacatgtgcagttccatagtatgtatattgtgtgatgctgcaatttgggattcaatttatcctgacacccaggtagtaagcataatactcaataggaagtttctcaacccttgtttccctccctccctcccccatctagtagtccccactgtcttttgttcctgtatgtccatgtgtacccaatgtttagctcccacttactagtgagaacatgcggtattgtggtatttggttttctgtgtctgcattactttgcttaggataatggcctctagctccatgttgctgcgacggatgtgatttcattcttttctatgcctgcctagtattccataatgtatatgtaccacattttctttatccaccattgatgggcacctaggttgattctgtgtttttgctgttgtaaatagtagtgcagtggacgcacaagctgatgcacacataacttcaactttacatatataaatatataaataaatgtttcatgagatagcccttgcatttaaattatgccttgtcctcattttctatttcattccgttaaaaatatgctgattgcaacccattatattcatttcacagtatatttatagtttgaaagccctgcctagcattctgataaatacaaaattttttccagagaatccctacccaatatcctttcttggacatctccactgtggagaccattccactctttaagatgccctctttattctataattctagtgtttagaatgcttattctcaaaatgtattgggaagcatctttatttcattaagaaacagtacaggcctgtgattaatgattatatgtcaggtttccggggctgaatggaataaactgtgcagagcattatttcctactgcacccagagtaaaatcagccacagttcattcactgttttaaaaaggcctctggattttatgaagctctgcataatttcagcaaaacctttaaaaatcaaattatcaaagaaaattattcataaaacattaaaagcagaaatagtgggtaaatatattaaccgtactctaagagacagcaaaatatcatttcacgtatgctagctcctccaggcctacctcactttggatttgatgttttcccaccatgagggcagcaaaaattggtgatttgactacggtttttcccattgtgaaaaagtgtccctcattattttgaaacttcattcctcaagtaattctttgcccttttgcctgccgtgttctcagaatattaggcaagtgctctttcaagtaaatgggagtaactgagtgttcaggcagcgacaggaagatgatggggagtgtacgaggtggcagcaatggccggtcaggttttttagtgtcggtgtatttgttgctagggctgctgtaacaaaataccatagactaggtggcttaaaccaacagaaatttattctctctcagttctggaagctagaagtctgaaatcaagatatcaataggcttcattccttctggaggctctctgaaggagagaccatcctaagctgctctcctagcttctggtggttgtaggcaatctttggtgttcttggcttgcaaatgcatcatctctctctcactctgacacagataagttatttcattacaatatagatctgttttattttataaatatgccataattttaatgagtggaatatcaagtgtttgctcatttttttttttaggtggagtttcgctcttgttgcccaggatggagtgcaatggcccgatctcagctcaccgcaacctccacctcctgggttcaagcgattctcctgcctcagcctccctagtagctgggattacaggcatgtgccaccacgcccagctaatgttgtatttttagtagagatggggtttctgcatgttggtcaggctggtctcgaactcccgacctcaggtgatccgcctgcctcggcctcccaaagtgctgggattacaggtgtgagccaccacgcccagcctgtttgcatattttaacaaggcaaaagttattgacaactgaactatattgtatactgtaatgacttttcaatgtgtgtacaactctttgttttctcttggattcataatagctttttgttttatttggtaagttttttatatggttatctctagtgaccagccagactctcactcttgtgtaagttttctatctattcaaacaagacattcttaataagacattttttaaaaataattcatctttttgaagaagtaatgctgcatctttttgacatgctaggatgtggattgcttgcagccaggtctgctgtacagccatctttgttcctttttctcttgaattggattccttgtgccatgtcttctttttgatatacatcctaatttaggtggagatattttccactggcttccagagaaagcatttatgagaggtaaattttgagaccttggatgtctgtatatgttttttcttccctcaagtttaaagggtagcttggctggatatgaaattatagtctggaaattgtctctctgagttttggagtcattgttttattgtatactagtgtctagtgttgctgttgagatgtctgaccccactattcctgatgctttgaatgaaacctgatattccactctgaagcatataggatcttttttatgttactagtgttttgaaattacgggatgatgtatcttgttttgagatgagtctgtgtactgtgcacttcatggattctttcaatatggaaacttatcccctttagttctagcaattttccttgatatatttggatctccttttcttcccccttttttcttttttctttcttttttttttcctctcttctttttcacatgtttaacctcttgggccagtcctcttttttttttttcctctgctgttttctattttattttcttactttttttgcattttcaaggtttcttcaacttttctccccagcccttttattgcacttaccttcctgctattttgttttccatttcaagagcttcttttgtcttgaaatttctttctgcctgcatggtttaatttctcccaagctgcattaatgagtttgttcatttgggtctcttttgtcctattatgggatttccacaaatctctggtagtccttgactgcctaaaaatgcatacaaatgctgtaacaaattaccacatactcagtggcctaaaacagcacagagtgatcttacagttttgtagaagtgtaacacagggctaaaatcaaggtgttagcagggctacattttattctggaagctctagggcagaatacttttctttgcctttttctagcttttggagttcacatatattcctttgcttgtagctccctgcctccaccttcaaagctagcaaccttgcatctctttgattcttcctccatggtcacatctctctccgactacagccaagaaaggttctttgcttttaaggacccgtgtgactagattgggaccacctgggtaatctagaataatctcccatcacaaggttttaaatcatatctacaaagtccctttgccccagtggaaggtaatgtatgcacagtttcttgggggactgttattttgcctgtcacaggttctaaacagctaattgccactgtgtgtgtgtgtgtgtgtgtgtgtgtgtgtgtgtgtgtgtgtgtgtagctttttgactgcactataaggttgatagtttgattaaatctttttcattgggaaatacttggtgttcagaatctttagatttttattcttcattatagacttcttgtcctccggagtcatgttatatttaaaatagatggtatatttttgatgttgtgtgttataaaatttatattaaatttttataagataaataaatgtgtcaactacatacagttattataactgctcagttcttgcccaagccaacatttatatattatattttcttctctgacaggactggccactgtccatcatcctggctattcttgcatgtttatttttttttttcttaaaatcatactgactactgacaattgctaactggcagttgtctgtatggcttctcacatgatcactggatgcttgcatagacattgactgagtgataacatcaaaaagttgtccagctgaactttttgaaacatattttacacatacagttgtaaaacatgttaggcatttaaaatatcaagctcctttttaaaatgggtaaatatcattaaattataattttcatgaacaatataggcagacctggttattccctcctattgcctttccaggttttaaaatttctccattataatagattctttaagaatttgtcattagaatttgatatgtaagtgtatttttaaccgtagtctttaagctatgccattctaccaaaatagaggtcttgttcctaaatttgaataatttttacttatcatgtttcttcctctcaccttttgtaggttgaatattagggcaaagtatacttactcagttaaaagggattacaattataaatgttgtttgattccatttaaatagattatgtttgggtggcatgcttggatatttgggtaataacacttcatgtcatggaagtaaacattgagataatgacatggaaatgccttttcccatttaacagtactactctacattttattttaattaacttggtatattccgacacttcgattctttttatttacaaatcatctagaatacttttcatttgagtaaaatgtgtttcttttaatgtctgctttggcataattgactcctcagtattctgcttgagtggggccaagttgacttaaattttatatattttagaatttaatatttgggatattgaattcacagcattaaaatgaaattaagtggtaatgtactgctatattaaatccagtgatttaattaatatagaaatatagattgtaagaggaaatagttttttacatttcagagctaataagttattttccctgaaaaagtcttaatatacaatgagttcccattctgtcataccgttcatccttctagcaattgtttccagaaagggcaagtagttttgttcccaaagtagatattgaaaaaggaaagctcattgtccatttctgtgtactctagccctggccagtgtcaaaggtaaacaataccggacactaaagtggcaaggataagttttaatcagtagtaagtatttcagtaggaaaagagttcagcataaactgaactgaacgtcaatttgtacagaggtgaataggcattttaaagggaggagggcaagcaggggcttagtagagccaggaaagagaaaaattacaaagggtagtcaatgtacatgtgattaggccagctaatcacacatctgctaagtggcaattatcgagggtagaattctatcctcccacagagactgaaagacagagaccctatcctcaaatgttgacaggaacaaacaaaatttttctggaagccttgagtttcttaggcagacactttcaacagggagagggtcatctcagggatatgaccttgaggtattggaaacttgttagtgtttactcttcatggaatgaggttgaggcctagccaagaaggcacagaggagcctggctagggtttgatcacgaagagagtgtttgttactaccttaaggggcccaaggttctgaagatgcaaaccagaaccaccatcccctggaccaactctaccttagagtagtacattaggtgtgcaggctcatcagggagggaaagagttgttcaggaaatctacatgattggtgtctcatgttccttgggtgggccctgagcaaccacatgagcacagaatggcagtatctcttcttctaatgtgtgccccttttctcagatctcatgccttgctctgtcttgctgtcatgaaaatggcaaggcttagaacccttggacccttctgcctagcttttggtagagccactgactctggcatgttctggctcagttcttattgcaaacttggtgacattctttgaaagcgccgttcttcccctcactaagaaggcaaaaccattctagattcagataattcagataattctggattccattctcagcttcactgtttaactgtgtggctctgaacaagtaatctcctatccaaattgctttttcacaacctataaaatggggacggaatacctaatgttgagttgagaagatgaaatgacacaatgtacttagaggcttgggcacataacatgtgcttaattaatatgaagtacactcccctctcctttccctccctgtgcattttgcttcacaatgccagtgctaacctttagccacctgatcaaacacttggaatatggacgccaagccaggccagagattagctgaacattccccttggactgctgactacccactcagagcctcctagatcaagtctctatctttcaggcttaatctggtcctcttggcagatgtctgccaagacccaatgtgctttacagatgaggcctcagaggtgagaaatccacttccctttagctacatttataggaattccataccaaatttaacatattactaacatttaacattcatggttagttttcacatttaaaatggagggaaaaaagatgaatcactactgcattagtcatgtttttaaaaggagtggtaatacatgactgtcttaacttattggagtttgtttccaaacacacaaaggtgtttggttgaaagttaaatggttttctatcaagttactgtgttcaggagacttttagaatgaatagaataatttacatttttaaaatagagttgacctaattctggcctattttaatggtgtgcccaagtgcacgtggacagaggtgtggcatatgtacagtagacacagctgcagcaaagctggcaaatgggaagctggtggtgcactaccctggtacttttagagtttgcaatttctaaggagttcactgttgtgttctgaatgtaaatttataatttttgtaaagcttgtttcattttaacttaaatttgtagttccataactatctactgtataaaatcagattttaaacgcaaatcttctactttatgaatttacgaagtaaatattttataggttggtaaaactatagttattctgaaaatgagaaaaagaagatggatcattttattggagttatcctcctttgttggaaaggtctgacaaatcataaagtctcatttaaatacactttaaaaaatatgtagatttgcctatactgtggatcaaattgtgatctttggagcatagctacatatggaaaagcctgctataaagttgttaggttctgaaaagtactaggaaataggattaattataaagggaattatgagttctattgtttctagtatttgtttcttgtatactgttgattaatttaaataagtatgagtgatctcttggcacatctttgttttcaaagacctaatttctttttattgtaagtgtttattttagcagtatttgtgtaaattaaatagacagttgctatgaactgaatgggaccctcctcaaaatttatattgaagccctaaccccttatgtggaagtatttagagaaaagggcctataggagagaattagatttagatggaggtcctaaaggtggggctctcatgataggataagtgccctgataagaagcggtgccagagagcttgtactcttgtgcactctctctcacgcttgccttatccccacaccatacatctaggacaggccaggtgagcacacagtaagatggcggcggccttctaaaagccaggaacagagctctcaccaaaacctgaccatgcgggcaccctgatgtcagaccttcagcttccagaacttgtaaaaaataaatttctgttgtttaagctacccagtctatggcattttgttatggcagcctgggctaagacaacagtatacaaatttaaataatattctgtgaaccttgcaatgttaaattttaatcttttcacaggcagttattttctatagactgtctatatcaaaactatatgaaaattttaaaaatagaagcatttaatcacttgcagttcaaatctataccaataaaaatagatagcaacattgtttttagggttccttttaatggttatttaatcaaataaactgtcacctttttagtgatacagacttcttcgattgccaactattatactccatacataatattttaaaaagcatttatgataatagaagcagtctatccctttaaaattggtacaaaaatttggattaatgagactgctcaactttggaaaaatagttatggctcattcttcctttcagaatcacaacttaattcatagacacagcacatcatgaccaaactctatgcctttccccaccaacattccacccttacactcagaaaatcaatagctctttcctgtgttcagattaatttatttcatataaattcacctttgaaaatattcaaagtatcagtttttaaactttttggacttggaagcactttgtactcttaaaaattaatgaggacatcaaacagctttgtttatttgggctgtatctatcaaagtttaccatattagaaattaaaactgagaagtttgaaacatttatttgttcatttactcatatttatatattgtcaaagctcatttcatattaacataaacatattttaggaaaaaataactatatatacatatatatatatatatatatattttttttttttttttttttttttttttaggtacagggtctcactgtgtcacccagcctggagtgcagtggtgcagtcatagctcactgcagctttgaacttctgggctccagcaatcttgctgcctcagcctcctaagctgggacttcaggtgcatgccaccaggcccagctaatttttaaaaaattattttgtgtacagacagttttgctatgtggaactcctgggctcaggcaatcctcctaccttggcctcctaaagcactaggattacaggcataagccactgtacccagccaaactatatttttttaaaacaaaaaatagaaggaaggtgttgttttacatctttgcaaatcttatgtgtctgcttctgcacttgatttgttgctatgtgtttttttggttgaagtatgtgaagaaaatccagcctcacaggaatatgtgattgacaagggaggagtattttaataatcttttcaaataattgtgaatattcttctttgacgctacactaaaacttgactgatagtggttccataaaaattaatttcagtatagaatctgaagccatgttaatgaactcttcatactcttttacattaaaatccattggcatattttacacttaggagtggctgtcttatcggtgcatggttttataacatcatgcctttgttattttgcatgtgtgttcactgagttatttcagtctaccgaatgttgacacatttaattatacaatataaaaatcatgtttgttgatgttcttactgatttcatcagaaaaatctttaagtattggtaagctcttaagctcttggtagtggatgcaaattttccaaaattcttatttccagttgaaagctccaagtttgtcattggcaacaaaggctttcagctttccttgaactggcaggccttccttgtttattttcaagaatatttctgtgctaacacccaaattgagataactataatttgtcagttgatcattctgtcatgtaaaaatgtttcatgaaaaaaccgagctagctcagctctcaactcagtgcatgacttcttttgtttgtaacgttcttgtactttggtactccgtttaatcacataggatattagaaagatgtatactcaaagagttgagattttataaagattaatcacttttaccacttcatcaaggacatttttaaataaaattggctttaaaaattaaacaacaacaacaacaaaaacctgagtgcatggcagtgcaaaatcatacaaggactactagggcagtttagtgcccctgcttggattcttgctaaggttacagcagttttacttaatactgcttttgtaccatcagtgcaaatatcaacatataacatctttacgttattatgaaaatgattcttatttgtgaattctctaaaatgtaatagtctcggaagcccctccctgggccttactttgagaacagctgctctaaggggtgaaactgtagtttacaaaagaggaatagtgtaaatatttcctcagttaacctcctcttaactaacttgccagtgaacccagcttccattccttgtgtaacacagtagctgaatgtcaggacttgtaggttgccctttactttacatttatttcttttccccccagtagagttaccggctgagcaagtgtcagctgtatttgttctcaaaccaggtaatacagtttccctaatacctgtaatgagacagttttaataataccaatagataaagtgtgagttcaaaaagaaaaagctaatatttctagaaccaacctaaaagctttggaataacttactgtaaaaaattgctgtcatgatatagtgtgattgagatttgtagaagattagggaaaaactcataaaaatctagaaggcttctgcgttccctcacaggtatctttaatttcttcctatataataaagaaaacaaagctggaaattgtggtgatgtgttatgtgtgttctttgcaggaaagaacaatgaaactccatctgtagacccatattcagagaataggttttggctcaccttcaaaagattggtgaatctgtgtacacatggatatattttaagttgaagcacaattcataaattaatgtctgtctgtttttttaaaaaataatttcccacttcaccaccattcacagtgaactgatttattactggtcaggatcacattgaataagatagtttctcagctgccatccatgaactaagagcaaatttccattggtttttatgactgtaaaatatagtctcttccattatttcactttgtatctaaggctgggtaagatcgtgttggtgaaagatttagataactttttagaaatacagctattacaggtcagcttttctaatgatatagggacagacctgaaggtgccataaacttttttcttttggggcgccagtgttacattgaattggaaactgtttgaaataaacaaactgcaggttggggcttggacattttcacagaaatttgcataacatttcatgaaggatgagaattatatcaaatgttctggttatctataaaaataagcttattggttaatcacacatgtgagggtttactggctggtagcaattcattgacatcagctttatcatgggtcggtgtatatagtgccatttatagatgcatcatgacatggtacaatgacacaagttgggaaacaaatgacctggcttccctgcctggcccaccagtcaccatgagtcagtgaagatgatattcccaactccctggcaatgagtgtgcagtatgaattgtttttctcctagaagtagagaattcattcacactctcatagtctgtttacaaacagtacacacactggcaagctgactggctagagcaagggagctttgtctgttactaaattgctaagaaactcatcaatctttttagcactagtctttttagcaccaaacaccgaatggtaaccaaatgctgaaattattactaaatataaagggatctctccaaattcctgattccataatgatcacataatcactgccagcagtgtggctgacagtgagttacaggtttgttccttcactttttccttctttctgaaaatatttattgagcatctgctgtgtgccacactgttctatgattggggatccaattgcgaatacaatagtgaagaaaaaagtcctgcccttgtagaacttaaattctaggaggggaaacatatacatagacatattcatacatatatttactaaagggaaaaaagaaaaggggaattaaatattattttgggaggatgatgaaattctgatagggtgaccagggaaggcctcacctaggccatttctttagcataaacttctaaaggaaaaacataatctggaagaggtagtctctcagaacattttaaagtatttgtaaactgaggtctatgaggtttgtttgagagaactaatacatcttaacttttactaactttaactgaaatccaacatttcttccaatcatgagtagagataaccaatcttgatggtattgggaggatctgtaacaaagttacaggtaggtatcacagatattttcattaccacattacagttgttatagacatctcaaaaattatgcttattaccacttacaaattatagtagttattatccctgctattaaatgttggtatttcatgccttaatttaaaaaagcctgtattattattttttaaatatgtgtattgataattatatttcaaaataatagatttccatgtatccttacatattatgtcttacgaattttaaaacattttgagaaagaggtcaaggcttcactagattgccaaaagaggttcatggcatagaaatgttaagctttagcttcatccctaattgctttcttctacctcccacaggtacagcacacttttgatttgtttccctcacttggagattactcaaatacatcctgaacagatgggaagggttttctggttaattccttagaattctgattgtgaaagatcctttgtttgcttcctgcttaatgcaagccacacactaatttgcagaataatatagctagtcaaacagaaatttggcttcctggaaaatgacaatgtaattcttttttttattttattttatttatttttattttattttatttttttttttgagacggagtctcgctgtgtctcccaggttggagtgcagtggcgcgatctcggctcactgcaagctccgcctcccaggttcatgccattctcctgcctcagcctcccaagtagctgggactacaggcgcccgccaacacgcccggctaattttttgtatttttagtagaaacggggtttcaccgtgttagccaagatggtctcgatctcctgacctcgtgatccgcccgtctcggcctcccaaagtggacaatgtaattcttaacagaagatcaacttttagacttcttagaaagatatttgaaggacctttaaggcagtgcagttcagtttatgggaaagagggatgtaaaaattctgagttagaatcagctcccactcacgtttgccacgcttcccaccatggtgatgaccaagtgggtctgtgcagattgagagatcatggattatggaccacagtaccttcgcattgaccagctatgggaaataagaggcaatacatatgttcaactgtcttagcaaggtggccgtaagaatagaactgagagcatcttattcaagtgaaaaggaggagtagggtgagcactggttaaatgggtattccagagaattttgccctgccaacacatgttctatgcttcagatctctttgaatatattctactacttcttgtcatgagtaaaaaaagtaaaaattctcaacatctcgatgttgccagaatcctgagagagaaaactgtttactatataatttttacattttagacaaactttacgcttgtttctaatgtggagggaagtcagttgtgtgtcattaagcccttggattatatcttcaagtgtgccctttagttctgagaaatagacactttagaagtgtggtgaaagctgtgagtctgatgaactcatttccatgatttattttcctttacaggttggtgaaagatgctccttgggatgaggtcccgcttgctcactccctggttggttttgccactgcttatgacttcttgtacaactacctgagcaagacacaacaggagaagtttcttgaagtgattgccaatgcctcagggtatatgtatgaaacttcatacaggagaggatggggatttcaatacctgcacaatcatcagcccaccaactgtatggctttgctcacgggaagcctagtcctgatgaatcaaggtgggtgtggacacagccaaggtgatgcctgagctgacggaagtcatagttgccatgttgtgagcaaagcatttttataaccattcttagtacatgttcatacttggatcctaactaaacccatgaaatgaagtagtccctacagtatcacttagttaattgagggacatctcctccttattttctgctagtatattagccggcatgttatctaattatggcttatgatgatcccagaacaaatcctcacagctcagggtcagtgataaatattcattttttccagagaattttgacagtgaagacagccatcctggaataagtgaaattttaaaaagctaaacacatggttggttatttgaaatgaagatttccagcacacagatgtgaatcataacaccactactattttttcctcttaatatttaaaacaaccaaactggattatttacatccaaattggaagcaatttttgtggattgtgtagctactttgctttaacatattgcataattgccaataatacattttctttgttcttttaactctaaattacaacttctgtagaaatctataaatgactgattaagattgtgtttaagaaaagcagctctgagatcacagggaattatcagaatattaaatatataattggagattggaaatctaacagaatttaactcgattatactccccataagaattattaagcattttgttgattatccagcatcggattttacccaaacctagctttctcccttgtcacatcaaccaaccgtcacttttaattaggtcttagaggaaaagaaactaacattaactgagtatatgacatgtgcaagtctttttccatattttattcaattctcacatcaaccatataaggcagctgggatttggacccacttctggccatccataaagttcaatctctttctgctgtattttgttatctctgtcagaaggggaattccatttataataacttaagcaaaatttaattatgagagtgaattttcatgctagctccccttgtcccctactctcacaaaaacctaaagaaaattaaaacatcaggtcaggcgtggtggctcacacctgtaatcccagcactttggaaggccaaagcgggcggatcacttgaggacaggagttcgaggccagcctggccaacatggggaaatcccgtctctactaaaaatacaaaaattagctgggcgttgtggcgtgtgcctgtaatcccagctactcaggaggctgaggcaggagaatcacttgaacctgggaggcggaggttgcagtgagccaagatcccaccactgcactccagccttggcaacagagtgagactcagccttaaagaaataaataaataaaatagaaaggaaaagaaaattaaaacatcaaaatgcaaacaatgtgagaatccactaacaaaccatttataaagccccaggcctgtgaaaagacaccatcatgaaatggtgaaaggatcccttaggtgagccaaatttctgcttcaggtcttaaatttaagctactatagttttatttccttaaataaatttttatttatttaagggaaggagtagagtttatttcttcagtctttgtaaataacattattccaaataataagcagtgacccaaaatactggtttggattgaatcaaaatatgtcattttgccctggcaggaattttcctatgcatttattttctgattaaagttatggtggccctggcagacactcttccagagcccccacataagtacacacatttatgacaagactagacagaaggaggtagaaatcagttggaaagaagacaggtgtgaaatgtttaaatgattacaccatagttacagtaaccccagagagtgaaataaaagataccatgaaaagcgttatggttaaatataaaatgagtatattaacttggaattcaagaaagcagtgttctttcagtaattttcttcatgtaactttgaagatggataggagaacttaaggggaaattaaaaaacattccaggcaaggtattcgggtggcagaaaaaaaatacagggtatagcttcaattaacagtatcagtaccttgtattcacagagagttgcagtttacaaagtattttggtagacattgcctcatgtcttctgaagagggttgttgtaaggaacaaataaggaaatttaggtaatgtggtatcctgggaacagtgatctgattttaggcatcagtcacattggtatctggtgggagatggaagacacacaggaaaaggatgaagataattagaattttaaaccagaatggtagagaatggaaattgaaaactatccagaatattgacatatcaggtatgatgctgggtggcagaagaggccagggtatgatgatcagtcacctctgcatacccaagcctgacagctgcattgcccccattagtcaggagccaagtcttagcctgggacctatatttaggcccagagctggttagatctgggcctctggaagccccacacctgccacatagtaggccatggtagcgtggtcaacatgtttgtggaagtaaagcaatgtggctacacccacaccaggaggcattgggcttaattttattctcaagggttgcgtgttttaaaggaaaaccttaaatctaaagacctaggttgagattaaagttgtgttcatttttagtcatgtgccagaggtcttgaacaagtcagcgtttctgttttggggcaatgatacataattgggttgttaaaaggattaactaagattctgttcagtgctgtgtaagttataaatgttatagaaatatgaggagttggccgggcgcggtggctcacgcttgtaatcccagcactttgggaggccgaggcgggcggatcacgaggtcaggagatcgagaccatcctggctaacacggtgaaaccccgtctctactaaaaatacaaaaaaaaaattagccgggcgtgatggcgggcgcctgcagtcccagctactcgggaggctgaggcaggagaatggcgtgaacccgggaggcggagcttgcagtgagccgagattgcgccactgcactcccgtctgggccacagagcgagactccgtctcaaaaaaaaaaaaaaaaaaagaaatatgaggagttgttattgtcaactaagtgcaacagttctagaaagctagcatttctgagttaaaaggttttataacttgttatagacttaattttcagtggggagattaaaatgtgacagatggaagaattgcttggacaaaatcatgtagctcattttttggcagattcaggattcctagttgatttttcattattagtttgcctttccagtggtttctcagccccactgtgctgccttttcagatcctgtggaaaagcacataaaggataagaggttaccttctaatgacaatacaaattgaagactgtccgtttagcgtttataatatgtgcagcctattacaaattctataaaataatgatgcaagtttcacaaagagataaacttttaaaaatattttcaagtattatatttttaggaacactgaataaaaatcttaatatacaaatcctctcttgccaacataaagttatatgcatttgtgatcttacatgtgatacagtttattaaagactggaaagtgactgatactcatttaagggtttctcttcatttatagagtcaataactttttttttttttgagacggagtctcgctttgtcgccctggctggagtgcagtggcgcgatctccgctcactgcaagctccacctcccgggttcacaccattctccttcctcagccccccaagtagctgggactacaggcatctgccaccacacccggctaattttttgtaattttagtggagacagtgtttcaccatattagccaggaagaacttcctaacttacatcatggactgtcacaacctggattacaagatgttatttatacactgacaagttggagttttacaaaacgcgatttgtaatataaactagttagataactcagagggttttattggccatatttttgtttatgctttgtcacaggctttagtcattgcttccatgtgttttcatccttcaggatatcttcaagaagcctacttatggaccaaacaagttctgaccatcatggagaaatctctggtcttgctcagggaggtgacggatggctccctctatgaaggagttgcgtatggcagctacaccactagatcactcttccaatacatgtttctcgtccagaggcacttcaacatcaaccactttggccatccgtggcttaaacaacactttgcatttatgtatagaaccatcctgccaggtatagtgaggagtcagaagtgtgaaaacattaaactattgtaattttttctgattatgaaaatgagctagactaggcagagaaattaggtccttagagtttgtcatattgaaattaaatagatttttttaatcaaagaaaaattgaattcaagagttgcatatagccagaacattttggaggctaatgtgagtatttatgatttaggtattataaagtttggagggttatggattaaatacaatttctaggcccctcaatactttttttttatatatccaaacttgagtaatatacgaactcatcttcatcattgcaagcaaaatataaacatttgtgattacctgtcagttttcctttatatgtgatccctgatcaatcctattttaatttttggttttcagttttttctttcaaactatacagacatgattcaaaatgaaagattacacctacacatttaagttggagctttagtattgtaatattttattgaagtaaatagtatagaaaagtaaacaaaaaaagtgctgtaaaacttgtaatttctttattgctgtgtcatttagccttctaagagaactagctctaaaaaaaatatatacatgatttaataatgtattcatttccagagaactttgtaacctttttttatttctaaaacaggactaagatgttagaacaagttataaaggaaaattttatcaggatagattcccccccttccccaaggaaatgcaatttttagatggtgattctagacctacaacaaataatatagtatttaaatcttttggctctggtagtatacatacagattaatagaatctccattattggactaattcaaaaatattgcagagcataagaaccattttaagatttagtttagacttacattcaaaaaaatactgctttgttgctttttcttagacatgcaggagaggcctgttttgcaattcatcctagtaaacaaaggctacctgaagcaagggacctttaagaggtttcagtgctttgtaatttaagctgagatctaaaggctaactacatcaggaattgtgtttgctgtgagctgtgtctgtggctacttcctaaagtggaaaagacagtatgaacatgtctaagagcagcatttatatgtttgtgttaattaaacaaacttttattgaacatctgtgtgccaggcactgtagtaggcagaggattcaaagaggaataaaacacatctcctgctttcaaggaattcacagactagtagaagattcagaaaatatcattttaaaataaggtatacttacaagatcatttactaaattattaggaacaaaaacattagctgtaaattacataaatataattgtggtaacattttagaagaggttctatgttaaagcaatctgttttcaacttcatttctctctttttttttttttctacagttgatactctagtagcaatttttttgtctggctgagttttctatcttgctgcttcttttttcatgaacacgtggagcatatccagtcttacctgcttttatttttcttccctattccaaaaatgatatatggctttatgatccttgcattttctgtcgtttaacttccagcagtacatactggcaggagctactccgggaattaaattttcttcctgtagaaactcagtctctcccctgaacttcgtatatagtataacttacactttattgaagccaaactgaagcatgttattttattatcttggcctagaatgcatgttgagttgtgggagagctagtgttcattccaggttcagaaacccaaactgcacaagaggatgtcccatgtatatatgcaaatataatcacgtatagcatgaacattggaaaatgaggaaggcagggaataggtgtagcactaatgttaccaaggacaggttaccacataataaatacaagcttgcacacaacatatgtggaagaccttttgagggattctgactaactggtctggaataaaatgtgaggattgtgatttttcttttattttatcccttccattacacaattctaatttgcaactagatttgaaaagtcattgtttagacctatataggagtgtgaagttttcaaagtatcttaattctttccaacttatttccctagggtttcaaaggactgtggctattgcggactcaaattacaactggttttatggtccagaaagccaattagtgttccttgataaatttgtcatgcgtaatggcagtggtaactggctagctgaccaaatcagaaggaaccgtgtggtggaaggtccaggaacaccatccaaagggcagcgctggtgcactctgcacacagaatttctctggtatgacacattgggctagctttaaagagaaatggtacccaagggtactattcatgctatgcacttgtttttttgcatttaaaaagaaaaactaaaacactttttaaatcttttctccatgccacctgagtatatgaagtttcaattcaactcatatcactgtttttgaaactcttagaaacttttcttttttaaaaaaaaatttcaacttttagatacaggggtacatgtgcagtatacccaggtagtgagcatagtacctaataggtagtgttagaaacatttctttatgtttaacatctaattactgttttcagtttttggttctcatattagagctgtcctacacttgcactatttcataaataagcatgttttgattttacatcattttttgaaagcatataaaacaaaacacaaaatttagactaggttattctgataatcacaccaaaaaaaaggtagtaaaatattttgttttggtaaatggagcattataatcttctaatagcaaagctgttactaaattttcaaaagtgtttaaaagtgtttgacagtatttgacagcttcactttgataataaaaggaccgtataaatttttttgccttaatcttttaagcccagaaagagaagcttgggtctcctttttaaagtattgccaaatatgttgttggcatccaataagttaaaatcaaaattacagggaactgattaatcattaatccctgatgtcttttcaagctgttgaaatttgcattcaactccaaaacaagctttcttgtggtttgcttctctttatccttttttttcaaaatacaaaaaaattaaggaggaaaaaatattagtaaaatggtgtctatagtttaaccaacaatttaagattattttcatagataaactaaacatattaagatgcaaccatccttgagttctctcaggagtatgacataattacttaatagtgtaacccataaataagttactcataaatattcaatgaagagagttctataaagctaactacaggattaataggtcagattaatgctaagtctaacttaaaaatctgcctttatagcaatatgcaaactgaccaaaaactgagagtaagatggccaattcagcttacatctacactttttaaatcacattaattaagccaacattatactagacctaagtagagatataatttctgatgtcttgaaactgagactctagaacaacagatgaaacagtcaatatcaaacaccaataagattaactctaggtgattgatttactttagggaaaagtacatagtgctaataataaacatttatcataaatgaaaataagaagtcatttattgtccaagaagcatggcatcatctgcagattaaaacaaaaccaaacctttggacctggctggtcagtagtaggcacaattataaatccctcaatataagacagtttgctgaaacttcatccatttatattctgagatgtggtgttggtgatacattttatctaatatgtgaagttctcctctatttcagtttattttttcaaggaaaaaaatcttgagggagaactcttttcaataccaaacattcaataatatcagttactgcagaactatactttattacaactcaaggcttgttagagtccagattctaacatggcatttctagaagaggagcccctcaaccagaaatttggatgaagtgcttaaatccatgaggcccagtagtttgaatggtcactctgacatcatcaagtgaagatagtccatgtagagattagagcagaaatcatttcgggcccaaacccaaggatcacaaatgataaagaaatattcctcttccagtcaccaagggtttccctttgtgcatactggttgtccttggatatttttagaattgtccctaatatactctgcactgccagtgctctgggtagcatttgtgtgtcgcatcttccacattaccatgttatgtgttattttcactgccatcagaaaaccatttaatttttcaaaattaatttcaggtatgatggcagcttgaaatcggttcctcctccagactttggcacccctacactgcattattttgaagactggggtgtcgtgacttatggaagtgcactacctgcagaaatcaatagatctttcctttccttcaagtctggaaaactggggggacgtgcaatatatgacattgtccacagaaacaaatacaaagattggatcaaaggatggagaaattttaatgcagggcatgaacatcctgatcaaaactcatttacttttgctcccaatggtgtgcctttcattactgaggctctgtacgggccaaagtacaccttcttcaacaatgttttgatgttttccccagctgtgtcaaagagctgcttttctccctgggtgggtcaggtcacagaagactgctcatcaaaatggtctaaatacaagcatgacctggcagctagttgtcaggggagggtggttgcagcagaggagaaaaatggggtggttttcatccgaggagaaggtgtgggagcttataacccccagctcaacctgaagaatgttcagaggaatctcatcctcctacatccacagctgcttctccttgtagaccaaatacacctgggagaggagagtcccttggagacagcagcgagcttcttccataatgtggatgttccttttgaggagactgtggtagatggtgtccatggggctttcatcaggcagagagatggtctctataaaatgtactggatggacgatactggctacagcgagaaagcaacctttgcctcagtgacatatcctcggggctatccctacaatgggacaaactatgtgaatgtcaccatgcacctccgaagtcccatcaccagggcagcttacctcttcatagggccatctatagatgttcagagcttcactgtccacggagactctcagcaactggatgtgttcatagccaccagcaaacatgcctacgccacatacctgtggacaggtgaggccacaggacagtctgcctttgcacaggtcattgctgatcgtcacaaaattctgtttgaccggaattcagccatcaagagcagcattgtccctgaggtgaaggactatgctgctattgtggaacagaacttgcagcattttaaaccagtgtttcagctgctggagaagcagatactgtcccgagtccggaacacagctagctttaggaagactgctgaacgcctgctgagattttcagataagagacagactgaggaggccattgacaggatttttgccatatcacagcaacagcagcagcaaagcaagtcaaagaaaaaccgaagggcaggcaaacgctataaatttgtggatgctgtccctgatatttttgcacagattgaagtcaatgagaaaaagattagacagaaagctcagattttggcacagaaagaactacccatagatgaagatgaagaaatgaaagaccttttagattttgcagatgtaacatacgagaaacataaaaatgggggcttgattaaaggccggtttggacaggcacggatggtgacaactacacacagcagggccccatcactgtctgcttcctataccaggttgttcctgattctgaacattgctattttctttgtcatgttggcaatgcaactgacttatttccagagggcccagagcctacatggccaaagatgtctttatgcagttcttctcatagatagctgtattttattatggttgtactcttcttgttcccaatcacagtgttagcactgaagctataaattacctggtcattttgtgatcacaagagtctatgcaaaaaaaaaaatttctttaccccagattatcagatttttttccctcagattcattttaacaaattaagggaagatattttgacacaagaaagcaggaacgtggagaaattggagcaggaaaagaaattatcaaagcaatagaaatagcttggtggtcctatggtgtttttggaagtatttggcattgctaattgagcagtccatatagtactacttttagaagaaacaaaaagtctattttttaaagtaatgttttttcttatgagaaaaaggtttagatagaattgggttttattaatattaatttaatgctattagcaatttccatatactatattgtggaaaagactgaagaatacaattctgagaaatataaaaaaattttaatggtatactcatgttgaaagataaatgttgctaagtcctggtatgatggtgtgagcttccttggggaagtacttcttgagttatgtaactaacaggatgttttactacagatctggatggctattcagataacatggcaaaaaatgatagcagaagatcattaaaaacttaaaatatattttattagaaaacatttatctatgaatgaatatttccttgatgctggtctctgcacacatatgcttggttacttgcatgcattcattggttgttcaataagtgagatgattacagataatactgtattttccttatatggaaaaccgttatagacccaataacaactaaacctttcaaaagaaaatattttctattatgaatgttgattttcataccaaagaagatggagagtctaaaatttggatatgattcttatgtttttttaatagaaaaccttcttcaagtttattttcctaaataaacatcataattgtgaattttctctagtattcttcttctttgttccattatattcaaaatgcattaacattttccaaaatttttgaagagagatctttatttggacgtgtattcattaaatatataaagtagtgtttgaatcaaaagaagtattttctctgcttattaaccttaattgttgtttaagcatattttaaatatttaaaacaatagccaattctgatatttaagtagcacccaacttttaaaagcataaaattttcaatcaactcctcagaaggtaacagcagcatagaatactagaaaaataatccatagtttctacttgagcataagaaaatgatatacttaaaaggaacttaataaattatcatacattcagcatatttgagtcatatatttctcctttgaaacaaaatatgttcagctcaaattttacagtaaggacacactcactgatttataggtgtaaagtaacaacagtaacctttcctcttacttgctcttttagttcacagcaataccagtatgtaaccaaaagacaagctagagaaacttttaagtacctttctgcagttctaatttgaaccttcttgcataaagaaaacacaagtttgacttttaactgtgcttcacttattatgcttggaatctagaaaacgacttctgaggaagtaatttttttcccctctcatggaaagtctctagggaggatgtcattacacactgtttaaaagaataatgttttcaaaagaataatgcttccgtttgtcctgcatggatgctcttactaggatttaaacttgctttatgtgacagattctccatttacttaacctcactcaacattcctctcttttactctttctcactcaaaaggatgaactgtctgaaatgatcaaaaggaaattttgaaagaaaaaaaaaaggaaaattattctttgaggttaccaagcaaacctgatctcagatccaaactgagacatactttctaacagagatgaaaagtgcaagtgagtgccaaactcgcttttcttttgttttcattaggttaaggcttgacaatacgttagtcgccacagcatgatccagtgtaacatattagttcattttaaagtagtctttttaaaatacgcatctttaaaacaaaatgaattaaaattatgtgttttttttttttcttctaatgaacctggtatttatttccttaaaaagaaacttcctcaggcagtgacttaagtggttaagtgaaaaaaaaaaatgctgaaacaaatcacccctcttcataatgaaacatgttttttttaatcagggatagtgcatatttgagtaaaactagggaactttttgtaacttgaaaacaaagcaatgttaaatctcccttgaaactgagtaatcagttatggaatctgtttcaatgctgctcactatgacaggaatgtttcaagttcatttgataatatgtgagctgttgttcaggggattggcaggactcttggtcctagccttaaagaaaa

SEQ ID NO: 171 - DNA, 401554 bp, Homo sapiens
  source 1..401554: mol_type = genomic DNA
tctcttctttcttatcttgtaacttaattccccctccttttcccccctcttgactgctttctcttctgccttttctctgaccattctctctttcatactatttgttttctttttgggttattagaaggctagttagctgctggagttccttatctacactgaacagaagctacccaagagtgttccttctgggaaattttacgacataaaacaatccccatttactgtttatgtgagtatggtgccagtgtaagagaagggcaaggttagacataattaccttggccatttagaaggtaggagggttaatgacagattgaaatatagggcacataggcaaatgagatgatttgaacatggaacagaaattaagtaaaaagaaaataagtgtattttgtactttctttgtgataactcacaccaccaaaataataaaggtttttatctgcagtcattcagtatatgtatcttgtttcaacaactagatgtaaactaaagacagatacttatattaaacttctttctatccttcaaaatgtagcgtagctcttcacatacaccaggtgaaaggggtttgaatgacatatacaaattatgaaattggtgactacttcagaaacattggctaaaattgcttgaaattactatctaaggatttaaacaatgcaattggatataaatgtatgcatatacatgccacattcctccaaaaagaaagaaaattatatgaaaacgtgaaattggaaatataatacaagagaaaattatatgaaaacatacatatagtaagataaaataattttcaatcttggtaacttaaaaataatcaacaatgttttcattattttcagtaaactaagtatctgggaattgatcatagtgaaaaagcaacctgtgagtagctatgcaattaatatttatagtgagatactgacttattatgtgtacttggataggtcatgttatcttacttatgcttctgtgtctctgaagtgacaatactatttgccttttcatccacctcctctgcaaagatgctctgcaaataaatgaggtaatgtttggggaatgtttgcagcttgggaaagaaacccactgcatacatctaagaatattccatattcaagccttgtatattttgcctctgttttaaattgaaattgtactgtttaagttcttgggttctgaccaaaatctgggtcaacataagagaataattatttttaattttaaacctgattctctgttccaatctcctgcacgtgtgagggaaaactgtaggaaataaacaaagcacataaatcaagctttggaagagaaaaatctctatctgaaggatttttttttttttcaatgacgagcgtgcccactatttccctagaggaatatttcggtccaggaaggaagatagtgcattcagcatgagtgtgtgtgtgagtgtgtgtgtgtgtgctgtgcgtgcgcgcccgcggagagaggggcgggggaggcggatgaggaggatgagatcatagtttcaggatcctcaggaaaccctggtactggcagcagccagcctctgctgtgcccacatgacccacaactctggcagcggacccggcacttccaacattattaaataataagaaagcggctcctactccaggctcaaacctccctgcagaccaatggacaccttctaagagtttggcgagtcagtgactgaagcgcccgtccattccaaggtgtgtgcacggcgttttcttctttgacagctccggagtgggggagggcgcgggggtggagggggtccgtgtgccgggcgaggagtgggcgcgaggccgggctgccgcgctgcccccggccgcccggtgcagaggagcccgccgcggggcgggaggtgcacatgacgcgcagccccggctgcgcagggaccgcagccgcccacggcgccggggcgcggacacaggcggctcggcgctggagcaagggcaggcgccgcgcaccgagcaaagtcaagagtggaagcgggcggagagcgccggcgggggcagggattcgcctcaacgcccactcacggggttcccacctgtgcgccggcgccggccgcggctagcgcgaagcatgtgccgggcgccgcagccaggactgcggcgcggcgcctccccgggcggcgggcggcgcctcaggcccgcggggcggcggtagcggctgctgcaggatgtccggcccgggggcgcggggccgcgcaggtaaatctcccccgccctcgaaggccttcgcagcgccgcagcccctgctgctgccgcggcgccgctcggggggtggctatggcagccggctccttcgcgtcgcgggttgagttgttttcgttgtggtcgctgccctcttggtcatcctctcgggctgagctggtgggaggtggagtgtctacctccattagggatgatactcacgtcggggaacagtctgaggggtactgactgggacatccgcgttgggttcctttgcagccagcggcgtcctttcgtgttgcagtgcactgcggtgcccgggccgatgcctgggtgggagtgggctccgggccccggggacggggggcggcgggggcgggtgggcacgggggtgagtgtcttcggcttttatagcctgttgcccacttcgaagttttctgctggacagagggcaggcgggaggttcgttctggtatccggagtgggagttgaagagaggtgtctgtcaaaagaccaaagccaaagagagaagaggggtggcgacggcgaggctgggactcagtggtaccactcctgggacttgaaggtaaaactttgctgtttagtaggcttggggtatggctttggaaagataactgtagaacttggccgtgaggggcgcagggggagggggcaggggaggcgcaaatattggatgtgccttgcagtgaagcttaccatgctttacatttattcttattctaaaaaaattgtcttttgagttgatgcttatgttttcctgttatatgtcatcacttggcatttaatgtgtttgtatttccttttgaacctcagagatacttgtattgttgaagtgtacagttactgatttctttaaaaaataatggttttttttttcttttgcttattccaaaggtggaaactttaggaaaaaagtgttccacatgttccacggttctatatggcttagatttattcactgtcttaattcttagaccaccaagggagtaggtaatgttattaaacaacttttgcaggtgagaaaatccgggcacagagagataaaataacttacccaaggtcatacatttattaagtgttaggagtctagttgggcttttcatgcgcccctaatcaactcattatacctaaagtcttctatactgaccacatctttctatgaagatgaaccttaataggtatgtgctgcatgttcagaacaattaactctttttctactttttcttcttctaactttcaatactaaaattatggcaaataacgtttgagtagtttcctttcagcacaattaaccaagtgtcctacagtaattaaagttgcatgtcctacaatgattaaagttgcatttcaccataaagttgagattttcagccgttaagatgtatcagcaaagtaaattattataaagcaaatggctaaagctatatgtttgtttgcacttaattttaaatttcataggttattagtctgttctttgttcagatcatgaccatcgttttcttcagaacaccatcttccagatttttgaggaagtttagttatatttaacccactcactctggcgagagttgggcggttttaaaagaagaattgtgcaattctctttcaactatcagtgattaaaagcaagctgtattttaagggcattcgagtctgtcatgtcatttagccaattgtatgtactttatacagaattgtgtagcggtgaagactgaaatcaaattttctcattagttctaagttgaaatacttttaaaatctccacttgttttaaatgaaccgtgatgtgaagaaaggtctcaatggggtgagctccaacttacttagagaattactctcacatatttagagaattactcttcatttgagcttatcatagagctttcacaatattcattttattgggcagatgtctcttaattcttcatctgttatttttttcaagtaaattttaattgcttcttcacataacgagtttcaaaattattttgacattcatagatttcctttaattctcatctttcactttaattaaattcaatatgtataatttcaaactcacacttactcaacattataagtaaaaagagagtggaatccaactaaacggcacggaaacatgatctgtggatatgagaaaaaatatttggctcttcagtggttaaccatcccctccctgcaacacacacacacacacacacacacacacacacacacacaccagaattatggctacatctttattttgggatgctacagtgcagtcctgtggtcagagtggttgtatgctatcagtcacaaatgtttttgatattgaacttgaatttgatttttccaagtccatttatatatagtgttgattgttatcaagacataaatcctgtgatacatacatatatcctttcttaactcagtgttccagttttctagcgtctgttacttattttagagacagcttgctacttttatctcacttggtagttttgacatgaccttttcctttcaagtcccacacctctagtttgaaagaattgtactgcttctgcttctacagagcctcttttttccaggtgtggggtgcaggagtggggctcaatagtgagcagaaagatctgtgagccctgactgcacagggggacaagttttaataaaataattataccaataaatgattacttgtaagttgagctaagtttcctgaatgaaagaagttctatgagaatatctattaaaggattctggactagacatggaggtcagaacaagatgcctgaaaagccacatatttgtgcaggaatgacacgtgagaaggtgtgtactaattccagtaatcttttcctaaatgcttgcatgttaattttctgaattatgttctgaatcagagatgtgtgtcactctagttacttctgtattcaccaggagacatactatttcacctcattatccatccatggacatggggaggtttacaaaactatcagtacttttttttaaagcacatggaacatgtgctacctttatgtggttacttgcctatttgcaaagagttatttaggtttaatgtaatatagtcattttctttcttttccttggcaactactttcaaactgaaagaagtagttctgtgtggtttgggaggtttttttgttgttgttgtttttgataaagtgccaggatgtctcaaaatagaactttaattgatttatcacacagtccctgagattgtctcaactacccaaaagaagagaagaggcttcatagtgatggagatgatattgagtgctgaagatgctggggaaattcatattaatgagttcaagcaaacataggagtgactaaatttattgaacatgtactgtatactgagcgtcattctgtggtctctatataaattaaatgacgtactcttcacaaaagccatgtgaggcttgcatatcattatctccattttatagaagggaaaaatgaaacacaacggggagagtaaccttaaccactgtcacatagtttgagatggtgtttaagacaaaggattctgattctgtatttcatactattaaatattgatgtataatacctggctcagaatcttactgctgaattaaatttccattgctgttgaaaatcataacaccccctaatctgatatttccattgtttaaaaaaaaaaaagtggaaaaaatagaacttcctttatatgaatactttttgccccatattttatacgtgaaaaatatacaaaacatgaagatatgtgagtgctagacaaaaacagatgactaatagattatgagaaatgtttcattatattatgtattttttaattcaaaaatggtaaattgagcaccatttgaaactattaaaatttttaaaatcaaaagtacaagagtatctatattagcatttcaaatgatcaggaaaatatctttaacagctaaaggttctgtgatcattaattaatgtaagaattttaaggctgggcacggtggctcaagcctgtaaccccagcactttgggaggccaaggtggatggatcacctgaggtcaggagttcgagaccagcctggccaatattgtgaaaccccgtttctactaaaaattcaaaaattggctgggcgcagtggctcatgcctgtaatcccagcactttgggaggcttaagcgggcagatcacaaggtcaggagatcgagaccatcctggctaacacggtgaaactccgtctctactaaaaatacgaaaacaaaagattagctgggggtggtggcaagacctacaggcgggacctgtagtcccaactacttgggaggctgaggcaggagaatggtgtgaacccgggaggcagagcttgcagtgagccgagatcgcgccactgtgctccagcctgggcaacagaacgagactccatctcagaaaataatataataataataataataataataataataataataataatttaatcacctaaaaatgatttattcctcaatttaaaagtagacttatcaataactgatgctctcactcttttccagtgagagttgtatttagtcaaggaataataaaagcaatgatttatttttgagtgaatgcatgtggtagcctatttgacagcaagtgaaagtctagaacagtgccaatacctgcccacagcaaccaaattgggttttctgaacagatttgatagtatcaacatggtacagaaatcagaacagctatgtgcgtatcttttcttgtcacataccccaaaatagacaaaagtataatttctgctatcacacattgctataaaaagtatgcaaacatataaatcatactatacatttattttgcattgccaaacataatctgcataattagaatatattcaatcaatacttttaattaaacattttattttgagataatttgaggttcatatgcagttgtaaggagtaatacagagatcccatggtccctttacccaggtttccccagtggtaaattcttgcaaaatgatagtacaatatcacaaccaggatgttgacgttgatacagtgatgaacaaattccagcaccagaaggataattcctattgctcttctatggcaacaccaacttggctgtaactaccacccacctccaaccccttaatcccttgcaatcattaatatgttctctatttctataattttgtcattgcaagaatgttatataagtggaattatacataatgggaacttttgggattggtttttccactcagcgtagttttctggagatttatctaggttgttgaatgtcccaatagcttactgcattttattgctgaatagtattttgtggcatacatgagctatagcttgtttaaccattcacctattgaaagacatctgggttatttttttccaattttttggctactacaactaaaactacgatagacgttcatgtaaatatttttgtattaatgtataatatgtattaatttctttgggataaattcccagaagttacacgtttacttttataagaaattaccaaacttttccagagtggatgtgccattttacatccccatcaacaatatatgagaaataagtttctctgtatcttcgctagcatttggcatttggtgttattgctgtgctgtattttagccattctgataggtgtgtagcaatatttcattgtgatttcaatttgcatttccttaagactaatgatggtgaacatcttttcatgtgcctatttgtcatttaaatatcttccttagtgaaatgtctcttcattttctatttggattgtttgggagttttttatgctatgttttgagaattctttatatattctcaataattgttctttctaagatatgtggtttgcattgggaatatttgtttggatttattttggggttacttattctttggaaacatattacatagttttacatgtaaataactattgaactcataatagattgattcctcccactttgtttttctttttcaaaattgttttagctattctaattcctttgccttttcatataaattttagaattacctttagaattatcttgtctatattaacaaaaaagtcttaatgggattttgataggaattatgttaaaactgcttagcagtttaaggataattgatatttaatccatacatgtggcatgtttctccatttatgtagaatgtctttggtatcttttaccagtgatctgtaggttttgggattaagtctggtacatatattactagacttacatatgaataatttttaagcaatttaaaataataatgtatttttaatttcagtgttgaggtattcagtgcaaatatattgaaatttaattgatttttatgtttatctagtatcctgggaactcctgaactcacttattaattctatgtgtgtgtgtgtatgtgtgtgtgtatatagttgttgttgtttgtttgtttgttttgagactgagtctcattctgtcgcccaggctggagcgcaatagcacgatctatgcccactgcaacctccgcctccccgattcaagcagttctcctgcctcagcctcctgagtagctgggattacaggcacccacccccacgcccagctaatttttgtatttttggtagagagggggtttcaacatgttggccaggctggtcacgaactcctgacctcaggtgatccacctgtatcggcctcccaaactgctgggattacaggcatgagccaccacgcccggccagttctatatttttttgacgaatcatagttgagtatgttaatgaggtacaatgtgatgtttctatatatgtattcaatgtgacatgttaaatcatgctaactaacagattagctatgtagaccaccatcatgtaatctgaaaacagaaacaattttatttatttataatctatatgccttttgtttccttttcttgtcctattgcactggctagaacttctggtactatatagaataaaagtagagagtgcaagcatctttgccttttgctaatcttcagtggaaagcattcactctttctgcattaagtataatgttatctgtaagttttatgtaagtgttctttatcaaattgaagaatttcactttgatttccattttttcctgagttttaaaaaaaatcacaaataagtattgatttttgtcaaatgcttttcttcaccaaatgatgtgatcatatgatttttcttctttagcttctttatatgatggagtacattgatcaatttttaactattggaccagccttgcatccttgcaataaactccatttattcattatgtatgattaattctttgtatgaattactgaattgatttgccaatattttgttaaagatttttacatctatattcatgaggaatattgacttgtagttttctttttttggtactgtttttggtattagtatcaggataatactagctttataaaatgaatagggatgtgttccctcttctattttctgaaagagattacataggattcatgttatttttttctttaaacttttggtagaattctccagtgaaatcacctgggctgggagatttcttctttagggcttttttgtttttagttacgggactcgatttctttaatatctatattagtgtgctagggctgacataaaataccacagactgggtggcttaaacaacagaaatgtatttcctcacagttctggaggttacaagtccaaggtcatggagttggcatatttggtttcttctgaggcctctctctttggcttgcggatagctgagttctcactatgttttcacgtggtcttttcctcagtgctcaagcatccctggtgtctctctgtgtgtccaaatttcctctttttgtaagaacaccagtcagattggattaggccctaaacacaccctaacagctacattttaatttaaactcttttttatcttaatcactttctttaaaagtcctatctctaatagagtcacgttttgagttcctgggggctaggacttcaacatatgaatttgtgggacgacacagtaatgatctgtttcatattgtgtgagttactgtagtttaagttgattcaggaattgttccatttcatttaagttgtcaaatttatttgtgtagaattactcctaatatttcaaattattctttggatgtctgcatggtctttagtgctatcccatgtttcattcctgatgttactaatttatgtcttctctcttttctgtcagttttgctagaggatttcaattttattcacttttaaaagaacacattgtttcattaatttttctctattatttttctgttttccatttcattgatttctgctcttataattgttattttctcctacttttcttggagaaagataataatatctttttctatattcttgacagggagctaagattattggtttgagatttttcctcttttctaatgtatgcatttagtgctatagatttccctctcagttctgctgtcactgtatcccatacatttttgtatattgtattttcatttttatttagttgaatgtatttttaaatttccttgagatttcctctttgacccattggatatttagaattagagtgttcaatttttaaatgtttgaagatttttcctgctttctttccgttattgacttttagtttgattctgttgtattcagagaacacatgctgtatgatttcaattcttttaatttgttgaggtttattttatgtcccaaaatgtgctatgccttggtatatgttccaagggcactagaaaagaatgtatatttggctgtttcggggtagagtgttctataaatgctgattaagtcatgttggttgatgttgctgtcaagttcttatatgtctttgctgattttctgtctagttttcctattaatgaaaaagtatatgccgtctccagttataattgtgagtttgtctatttctcgcttcacttctgccactttggctttacatattttatagctctgttatttggtgcatatgtatttagaattgttatgtcttctgttatattgactttattattaaataatgcccctctctgtatctggtagttttatttgctctgaagactactttgtctgatattaatatagacactcatttttcttttaatgggtgtttgcatatctctttttccatccttgtactttccactggcccatattttatattttatttgagttccttgtagataaaatataattggctcattttttttttttttttttttttttttgagacagagtctcactctgttgcccaggctggagtgcagtggtgcaatctcggctcactgcaagctctgcctcccaggttcatgccattctccagcctcagcctcccgagtagctgggactacaggtgcccaccatcacacctggctaattttttgtatttttagtagagacagggttccaccttagccaggatggtctcgatctcccgacctcgtgatctgcccacctcagcctcccaaagcgctgggattataggcgtgagccaccacgcctggcctagttggctcatatttttaatgcactctgctaatatctgtcttttaattggtatatttaaaccatttacatttactgtaaatattaatacaatactttagtgcttaaatctgccattttttgtttgttatctctattttggatttcactgttttttttttcctaccatcctgttatttacttgagcatttacagaattccacttctatatgtatagtgtttttaagtgtatcactgtacagagtttgtttgtttgttttttgagacagagtctcgctgtgttgcccaggctggccaggctggagtgcagtggtgcaatctcagctcactgcaagctccgtctcccgggttcacatcattctcctgcttcagccttctgagtagctgggactacaggcacccgccaccacactggctaattttattttttttctttcttttttttttgtatttttagtagagatggggtttcactgtgttagccaggatggtctcgatctcctgacctcgtgatctgcccacctcggcctcccaaagtgctgggattacaggtgtgagccaccgtgtccggccaggtatttttttgttttgttttgtttttttaatcatcactctaagtattacatcatatacacataatttatcactggctactcccattgtcattttatcaatttgaatgaagtatagaaaccgtacctccctttacagcctccatttataatatgattgtcttaaatatttcctgtacatacatttggaaccacatcagacagtgttataatttttgcttcaacaagcaaagaaggaaggtctgttgcatttattcatattttttgcttaccatgttcttttttcttgatgttctaacctttcttcttttattgtttcctttttgttttaagaactttctctagccaccctttgtgagcaggtcagatctgctggtgacaaaatattttgttttcctctagctgagaatgtcttgattttttctttcttcctgaaggattttcactggacataagattctaggttgagaggccttttcttaaagcaattgaaatatgttgtgttacttcctttggactctatgtattctgatgaaaatccattgtcattctaatggattttcttctttggtaaagtagcatttctctcttgctgtttataaaacttttttgtctttaattttcataaatgtgactatgatgtgtcttgacatggatatccttggaaggttttttagcattcagatttactcaggtgtttaaatctgtaggtctatgacttctgtcaaatttgggaagttttcagccattttttagcaatttttcagcctcgcccaatttttcctttccttcaggtctccaagacatgaattttagaccttttgttattgtcacacattgtattgatttcctatggctgctgtaacaaattaccatacagtgcatgccttacagaagtgcacatgtactttcttacagttctgaaggccagaactcaaaaatcagtttcacagggctaacgtcaaggtgttagcaaggctgcttccttctggaggttctaaggaataatctattactttgctttctttagcttctagaggcacctgtattctttgactacaatcccttccttggatcactccaatttctttcctctgtcatcgtatctcctacttacttttctgcggccagatttatctctgctctttgcctccctcctttaaggacactgtgattacatttaggagccacctggatagtgcaggccattctccttatctgaagagttgtagaataatcacatctaccaaatctcttttttccattcacagcttccagggattggagccattctgctgaatatctttgggagccattattcagcttaccacacacaggtttctgaggctttctttctctctctttttattctctaatctgttttctctgttattcaaattgagtgatttctatttttctatcttgtagctcccatgttcttttctgtcactcacattctgctcttgagcccacccactgatttttatattttgggtatttttttcaattctaaaatttctacttagtttttccttatgtgttctatttcttggccaaagttttatatttttttatttatttgaagcatgtttataatcattcaattgaaatgtttttcttatgactgctttaaaaactttgtcaaataattctaacatctctgggatcttgcttttagcatctgttgattgtcgtctttcattcagtttgaaatcttcccggttcttggtatgatgaatgattttcaatggaaacttggccattttcttatatgttaagagactctgaatcttatttaaactttctgatttagccgagttccactaacatcacctcagtgagcatcagtgccaggtggggggtagaaattaggttcctcactcagtctcccttgacacctgaggggacttcacattactgtagggcaaagtgggtcttcactgatacttccagctatgaagggtagaagtgcctcctttatgttccccatgtggtctctccactgacacactagggggacagaagagggggcctaatgactgctgggtcttagtgacagttctgactctccattaagccacctgtgacaccatcccaggagagaaggagaagggagactcagtactgcaaggcaggggtagaactccaggatcctcccaccattactattgacaacatagtgggggtgaggaatagggggggtctttattaccactggtgaaaatgaaagtcccagctttttacttggccttctatgacatcatcacggtggggatgggagaagttggggtgtcttgttacagcttggcaaggatggaagtgtaggtttcccacacagcttgtgttggcataggtgtggtggaaccacaattatttctttcttctgtggctacaatagagcagttattgcctaaatttgtttttttatctagctatgatgctcctttcctgttccttaggccagagagagtatggttttgttggcacccttttaaaagttgtgcctgatggcatttctgggtttccagtttctttagccccaagaattggatatgtgaggcaacacacgattccagggaactcaccatcatgtcattccttgagctctgaggtcccctagctgatttgtcttctcttctccagctttcagtgtctttgtatgtttatttaatatataaaatacaggggtttcagttgtacttagtaagaagagtaggggaaagtgctttttctccttcttcacagaagcaaaagcccaatctatatgttttatgcaagcataaactgaaaaaatatcactcccgttgattctcagaggataaacctcagagggttactgcttatctgtttctgaataatcaacagttgacaggtaagtgggatgagtgaatcctcaagtggtgttgcagatagatgggttcacaatgcagtccatcattgtaggattcatggaccacaggcaggtacccttactcccccaaatcaattctctctcccctcctggaaagccattactgtaggctgtggcatagttggagatttcccccactctcagagatgtcttttctggtgggatgctggaaccacaccatcccagctcttgctctactctcactaaatgctctttgtttccaggaatatcatccacctgaaatgtagttttggaccagtacgtgcatgggaaaatgtttgtaaactaagaaatagtgaatgcagaatctatatttaaatctaactgaggagcacctcctagaaattattattattaatttcttttgatgtaaaaattatgcattaaaaataaatgttctgatttgtcaagttgtttgatcactacttggtaggttaagtacaaaagatggagctaagaattctctgcttgaaaccaatatgctgagggattacagttgacatggaggagatcacaaaggacaacagtctagggaaattcatgaaaaagacaaatcaagttattgacattgtagccaaccttgaaattctcactctactagagcaatggttctcaaagtgttggcctcagcagcatcagcacaactttgaaactctttgttaatgcaaattctaagtgtctatcttggacccactgaatcacaaactatggggattgatcccacaatctgtcttatagccagctatacaggggattgtgctacacgctaacgttgagaaccactgcactagagtaatccctccaaccattgaaaaatatgctaaatttatgctttcagtgatccttgactgggtttttggaaaatgtatttattatatttaacattttatgtgctcatattataaatgtttttcaagtaaatatagtaaggaaattaaaaatgcattacctaaaactatctccttggttgatacatattaatgattatgcaattattttctatccttaacccagatctactccatgtctgattttgtggttgacatcaaaaaaatgagccaggcctacacttccctccatttgtttctcatagttgccaagtcatacattaatggattttgtagctgtttttatgttcttttctagagatgacacccatcattaggtatttggaggtgagagtgggggtgtctctgcattatttgaagaagatgctttttaggagatcttgtcacatagtattgttagagacagatgcgtatgtggatgtccaaattaatcattgtcattactacatcagctctaccatgggggatttactgtttactgtatgctggcatttttctctggggtcatgtgagattaaaggacatcttggctaaaagcctgtcctgaggaaagaaaagctgcatttctatatagatattttataactgagatagaattccaaaccccaggatagggtaagacaaaatcaacaagaagtaaaaggttaaaaggttttaaaatgttttatgatggtgctgaaatatagacagatgcagatttgagaagtagtctgtggcttccagccctgaatatgattcagtttcattgtattttaaggacagtattttatataattttacactttcaactagcaatttgctaaactgagagggcataatcggtattcacatagtatccacctcttctgatgaataatattttagcttttggattaggcatcacattttactgtgtataattttttaagctgaattttttagtttctgtaaatcgtatgtttcaattacatataccctttatacacttttttgaaaatgtctttttctgtgtgagctgaggaaatctgcttttcatttaagatgacacatattcttggtttagaaaaatattactttctatcctttcactgttcctcaccaccagttgtcttaggctctttttattccttctgtttcatttgtgcattcaatttgatactatttatcatttactcattttgcttgggcgtttaaatggttgtgcctctgcagtgttttggggataagacttttccaaaccttcattatacaatgtttgctcaataataccatttgggcaggttggaggaaccactcctttaggaacagatttttaaatggtatagcagatgtttcctcttacatagagtcatcctttctaaaataaaggcccccagccatggcaatactaatcagatgtcttctttcttataatcattacttggttgacattttttaaatgtggtaattaaatcagcaccaaaatgctttgataggaagtacacactgtgtcttctgtgggtagtggtccagattttcccctactgtgttcggtgctatttataaacacaaaatgtgtcaggtgattttttttccacatgcagataaattctgcctcctccttttaacccaaacactgtaaaaataatgtttatcataagagtgtatacaaaataatgatttttgctaatgatgctaaataccctttaggaagtgatatatgagtcagattgattttgaaaatttgatcaaaatatgaatcattttcaaaacaggaaaacatttcaaatcatctagctgttcttttattgtttgcctcagtgtcaacatagtgcttaaacctttttttgtttctgctttttgtttgcttgttttggatttaagtttttgtttctgtttgatgccttccttactttccaaacatatgatgtaacagctaaaaataaaagttctctaaatacctttaatatttcagattgagcttagatatgagattgagagttgtcccatggttatacaatttgaatccttgtatagacaaggaggaaaaacaactgaagtgaacccaaaggaaatggtattctattaccagtctgccatggagtggttataaaagcaaaataatctaacttcactcacccaatagtagtttaagggataaaaatagtcctgtggtttcatgtgagtgagtgtaattttgtgtgtgtgtgtgtgtgtgtgtggtttttttggttgttgttgtttttttttttttaagtctgagcttggtcacaggtgggagaaggtgacagatatcagcgtttcacttctttcttagctttgactgctcctgcccatttatgaacagtgctaatctatgccaattagattttttttcctacaaatttatctgttctctccatctattttgtttttgtgtgtgttctctgtttttctctgagttttcatccctcagtaccccgactagcatctagcatctagttggatggtcatgaaaggagatgtgctcctagcatagtgaaattgaaaacattttggttccttgcgtgtgcttctcgaagctttcaccaaggccgtgacaagactgcatatttcagctttccctcctccctgttccatcagtcattccatattatttactaggagtcagtattttataatcagtggcagagctagtcttcggcataggttatccttgccacgccttttatgagcccctgtggctcaatgtgactaggacactggccattcttttttttttttttttttttttggtgcttctcaaatatatttcaaggaccacctgcatcagaatcatctggggggtttgttaaaagtacaggtatctaaaacccattctagagccacacattgaatcagaatctatctttatgagtttagaattttaaggctaatagtaatgataggggctagtccagatctgcatgtcacaatccagggcaacttttaaaaaatcagaatgcatggatctcatcccctagtttcccacttaaatggccttgtgtgtttaaatcatgcagctgacggtaacaaccagaaatgtgctgtagaagttgaaatgtaagaatggagattggtattgacagaaaagcattactttcagtgaattcatgaaagtccatggatttatcctcatttataaattcagaacccagatccttctctgaaagacaaagccacattaagcttatagagactgagctataaataagaatttgcttaatcacaattagaattgtcattgttactaggatcagcatgagtaaggcattcttaccctactggctgatccccacggaaagaaaaattattataagttttctcttgaacctggagtcagactaaagaaagttatttgaataaaaatggtgaatatatacttaagacccatctgttatgaacaattttaaacatttcatctgtattatctcaatcctactcagtaaccctttgtgctagtattattagctctaatttctagatgagaaaaagataggaaaagtgatcctatgtaacttgttgaatatgacagagccaccaaaaggtagagctgaaattcctgggctctatgacttagttattagtaaaaaaagaagataacttgagagttggctgggccttagcatctaagtaagcaatcaaatggggccagcatagctcctagttggtgaagaagaaagaaatgtgcaaactgccattcatatggataggatgctttcaagtcatgtgtaactagaatgaatagcccctgggtggatcaagggtgatatcatggtcagaaccttgtggtttgtctaacttaacctctccagaactgtgattaagtgaaagatatacagaatcagagtctgctctcaaagtcacatttggaaaaatgaatcacagtttatagaaatagctagtgtaaatattaatatataataatagatgcatatttaaatatattaggtgagtatgcgtgtatcagtttcttgaatgtccccaagtccttaggtcactttgactcagaaaatttgagtgaaattggcttgagcttccactagctccaactcaagcatattttctgttatttggggggatttttatggagcttgcatttctcctgtgactctgttctgagtctctgcatctgttgaatgcccaatcattactctgagttttatttcctaagcacagtgccaacttaggtcaccctgctggttatatgcccttgattcttttaatcccagaagtcccactggctctaggctgtgtgtttaggagactttgttataggtttaggcaatggagttgtgttatgggacagcaatgttagatatccctagtattgaaactccctcaaccatttttttttctaaaaaaatttatatagtttgcctttttaacttaagcttcagtaccttactgtgtgagaaatggggttatttataaatgtacaaattcatctcagaacagcaggtacacactagtaaatcatatttctggctgttttcctcagtctgctaggaactatcagattgttaactactactgaaatgtaacccttactctctcagaaaggaaaagtgaatggccctctcatctatgaaataaatgtctgccactagcagtccctgaaaactcctcagcataaacattaaccttccatcttttatggtggtgaatccagcagatggatggcgcagtggcagtgtgtgatattgcagttgatactatgggattcttttaagtaggagtgcaaccgtaactccacaatggtggtggtgttactgttctctgaaaggtatatgtgagaattacataaattgctgagcatagaaaactttagggccctagtcataaaaacatggtatatccttgcattgatatctttcagaaaacaaccctttccaatgcttacataagcattgtttgcatcttgcaggttatagtttaccagattttgcatatttggtcaaaaaataaaaataaaatttttccactgtgatgaaaagtaaccattgcattgtggaatacaaattagcaaaccagtatagaagaatactggtttcacataagatgtgaccactgctataatcaagatgacaacagtgaatgaagtttggttgcatgaatctaataatccatggaaaactttaatagttgcctaggattgatggtaaacctaacagcagcactgttttagattgtcatgtgttttcaaagacatagcttttagagctccgtttattttcccaaagccttttgcctcatatccattaaaactgccaaggtgcacattactgtgagctggatttgttatgctaatttccatgtccatgaatccagaaaacactggttgagattgatagaaatctataacacaagcagaaagcttaattaacaacacctatatgctaatagtaaacttgacatagaatagttgcaaaactaaatagttatggtcataacatgtgccagtctttacctagcgataggctaagaggaaaatatggcaaatttcaaatacaaaagtaatgttttattggtaacatcattttctttagcaatacctaaaatgtttctctggctctgccagatacaaagctgataattgaatgatttgctctaaattctcattagagaatccatcggtctgctgcaaggtgacatctcagctgtctaggtgacccaatgtgagactggaggaagatgaaggcatctgctcatcagtgtctatgtacagttggatcacactgagcagctggagacaccactcccttgtcctcagggagcttacattctacttgggaggtgcaattaagaaacaatgaaacaacatgagatgaagaaagaaaaaattgtatgaaacatgagaaaatatctaaacattctgagaagcaagaaggctatgaggagatatgtgacaacattttagtggctttcttgaatcaacaactgcatgaacaagtagattttaccattaactactacctgcaccctacttcaaatctcttcaatagaaacctaaacagaacttgagtcctacttggatgcttccacattgtaagttctttgcctatgcaggtaacgactctgacaagatagatttccctacctgtaggaaactgggagaatggaccagaaaaaataaaatctcatttaaattgtgcacagaggttctagtggtcagaattcactccacagtggctatttaaggactctaaagattgctcttagttatctgttattttattaggctgaaggatcaatttccatctttaaggaaatctatgattttattatctttgtcctaattccacatcagctctttgtgtgcatgtgtttgtgtatgtgtgtttgtgtgtgtgtataaatgtatgtataaaacagtagttcaagcttttagcatgcctaagaattacctggttgttggggggagtgaaaacacagcttgctgggcttcactgccagaatttctgattaatcagtctggactgggaaccaatatttgcatttctaacaggttgccagacaatgctgacactgctgacccagggaccaaactttaagagtcatcgatatgacacataaggctcatggtgaatcacagtgactttattaaaaagtgaatcatttaaatgcaatatctaaggcagtattaaagaagaaatggggtactgaagtgtggccaaatgagtgtgtcttagtctgttcagactatagcaaaatatcataagctggtggctaaggaagaacaggaatttatttctcacagttctagaggctggaaagtccaagattaaggcagttttggtgcctgttgaggtcctgtttactggctcatatatggcaacccttgctgtgtcctcacatggtggaaagggcaaggagtctctcttgggacttttttcataagggaattaataccattgatgaaggttttgtcctcatgacctaattacctcccaaaggcctcactcctaacaccatcaacttgggtgttaggatttccacatgtgagtttcagggggacacagacattcagaccatagcaagatgtgtgttttaatatgaaactcaccctgtgctggccttgaaattttgcagtgtgggtgttgggagggtagactgagtttttgggttgataaagctttgggggtttgtttagttcagctattagggtagactccccttgcttgatgccttttaaaattcttgctcagaatattgcaaaacagctggctcaactcattccacctgactttctctaccctaacgtcagctctgacccattccaaacaggatttttcacttctcttagtaagctcactggttttgtttggcttgttagatggcaaactcccttgagttttcttcccttgaagaaaaaactcccttaatttttgtttggactgttggtcagctaatccttacagttttaattgttgctcaggaaatctgggtccttgtgcatctccagttttaacttcctacacagacctttccttgaaaaatactattacaatgcaaaagggtgttagtaccttggtcaattatttcgaaaatacttgcacacacatacacacaaacacaacaaaaccattcttaaaaacatcttactattccatagtcatagttgtatttgtgaaataagccttgtattcgattgtattgtggggcatcctgatcgctgtaataaatgaaatatgttactgttgttctctactacttgtgttttaataggatggtgctgtgttacgtttccagttttgctaagaaagtgttcttaagcactgttcattgcttaatgtatcctgtttccagagattagattttctcgtaaccaacaaatgctgtcccaaaaccaccttggcgaccttaccaaaaggaaagattctgccattttcttctaaccaggtcccagtgatatttttcatattcttctgtcaaactcagctcttatcctctacttttgtcttaggatcatgacgtgcttgtggaacattaaaactgaaagaagcagaggtatcatttagccccaccctttcatttaagagagaagctaaacaaactgctcaatgtcacacactaaattagtcacacagaaaatgactaagggtcaagaccttttagccaatctttttctataaccatgcttgaaattttaactaatacagtgaatctcagctattgggggaaccacccccaataattcaacgtaggttcttttctattttccctaagtgttggccggtctgagaaataaagggaaagagtacaagagagaaattttaaagctgggtgtccggggaaggcatcacatatcggcaggttccatgatgcccctcaaactgcaaaactagcaagtttttattagtgattttaaaaggggaggaatgtatgaataggttgtgcatcacagagatcacatgcttcgagggcaataaaatatcacaaggcaaatgaagccagagcaagatcacaggaccagggcgaaattggaattgctgatgaagtttcatgtcccactgggcacgcgttatcattgataacatcttatcaggagacagggtttgagagcagacaactggtctgactaaaatttactaggcaggaatttcctaatcctagtaagcctggggactctacaggagacccgggcttatttcataccttatctacaaccatataagacagacactcccagagcggccatttcagagacctccccctaggaacgcattctctttctcagggctgttccttgctgagaaaaagaattcagcgatatttctcctattcgcttttgtaagaagagaaatatgactctgttctgttcggccccttaggcagtcaggcccaatagttatctcccttgttccctgaaaatcgcagccatccttttccttttggatgcccggattccatattgttcaaacacacatgctctacaaacaatttgtgcagataacgcaatcatcacaggatcctgaggtgacatacatcctcagtatatgaagatgatgggattaagagattaaagtaaagacaggcgtaggaaattataagagtattgattggggaagtgataaatgtccacgaaatcttcacaatttatgttcagagactgcagtaaagacaggcataagaaattataaaagtattaatttggggaactaataaatgtccatgaaatcttcacaatttatgttcttctgccatggcttcagctggtccctctgttcggggtccctgacttcccacaacactcagccatccacataactgttgcataagattaaccaaagcagctgctactgctcaaaaacttgttggaacgtcttacactgaagctgccctaaatttctttaatactcttaaatgccttctgtgtttaaaaactttattttcagataattacagattcacatgcagttgcagtaaataatacagaggtcccatgaacttgtcacccaatttacccaatggtaacagcttgcaaaactgtaataaaatatcataatgagaaaattgacatgggcacaattcacagaccttattcagatttaataagttttatatacacgtgtgtgtgtgtgtgtgtgtgtgtgtgtatttaggtacatgcaatgttatctcatatgtagctttgtataaatatcactaaaatcaagatagagaacagttccatagtgctgctcttttatatccatgctcatttctcttcccctctccatccctccatccctaacctctgacaacctgtaatctcttcatctctataattttatcattgcaaaaatgttatataaatggaattttgctgtatgtaaaaccctttgagatttttaaaaattcaacataatttcattgagttctagccaccttaccccctgtgtccatagttcattccttttaatttctgagtagtagtccaaggtatggatataccacattttgtataaccattcacctgttaaaggacatctcagttttttccagtttttgaatattataagtaaatatgctatgaacatctgtgaataggtttgtgtgaaagtaaactttcatttctctgggataaatgcccaacagtgcaattgctggatgtttagttttgtaagaaactgcaagctatatttcagaatggatgtgccagtttacattcccataaacaatgtgtgagggattaaacttctctgcctttgccagcatttaatgttaacactatgttttatgttagacattctgatacatgtgtagtaatatctcattgtggttttactaagcgtttccttaatgactaacgatgttgaacatcttttcatgtgcttatctgccatccgtgtaaccccttttttgaaatgtctcttcatatcttttgcccattttctaattggattgtttgtctttttactggtaggttttgagagtccattttatattctatatgttggatttgtggtttgcaaatagtttctttcagtgtgtatcttgtctttttttcttgttatctaagtctttcacagagcaaatagttttgattttgatgaggaccatttgataataatccatttttattttaatggtttgcagttttggtatcaagttttaagaattctttacctaaatctctatcctgaagattttctttttttttcctaaaagtttcattattttacatttaagtctatgatctatttggagttaatttttgtataaggtctgagatttaggttgaggcttattgttttgcctatgaatgtccagttgctccaacaaaaatgtcttcaattttgacttaccgtttttttttttaatttggcaaacgtgtgtgtgtgtgtgtgtgtgtgtgtgtgtgtgtgtgtgtgaagctactatgtgtgagacactattaggtagtaaagacgggaacattaatagaatgcagcacctgaaatatctcctggtatagtgggggaggtacatatagcaatattttcaaaattgtaggttaaattaaaatatagaataatgcacagaggaaaaggacttgaacaatacaagtggatgcaggcagagtaggtgtaagccattgcaatagcttaatgagagataattaaagcaggagcttacagacagaaaggagtgaatagatctgaggagtatttatcagagccttgcagagaatggtttagtgagaaggaagagtcaaaggtaaacaaagtggatggtgatgttatccaaaaggataaaacaaggaacaggtttggattgaagataatgattttgttttaaacttcttgagtttgagaaagccattaaacatccaggaggaactgtcctagtaattgttttccgatatgaagctaaagcttgtgggagaatttcatggcagacaatttttgaaaatcaccagaaatcacttacagctaaggaaagatgttataaatttaggttgtactgttttaagtcaaaaacagaaatcataaaactctagaaggaaacattaaggattaatgtagaggttgtgagctttggtgcacttcaggtatgaatctgaaatagagtgattctgattacaaacttcattaaataaataaataaataactcttctgagccacaatttcatcatctgtgaaatgggtgtattcatggccctagagcttttgggactgcattgaggaccaaatgagatgacaagcctaaaattcttgtcctgtaatgaaggtttagcacatgttagttcctttattcctacaagatacttttgagattatttactataatgtttttcaagctactttttttaaaggaagggaactcttttttcaaatgaagtctcatacagaactggaaaacagttaaaagcaaagcagtctcctctttacccaagttttcaattgaagcaacaatgtggcaacataagactcttgtaaatcacgaagataataagatcatccatttaaagttaagaacactgtgatctaagaaggtaaagaaagttttctcaagtcacatgatttgctggaggcacacccgggtttaagcccctaggttctcgtccctttttcatattctttctgaaataccatagtacctataactcacattgtaatgtttacttgcataggtgactgtaggtacagttctagaagaagctgatgtcttaaatgttctttgaggtacagtggcatttctgtgatttgtggcctccaatgcatccttctgaaaaagcctctttttgataggtaccttctgataagaaatgagctttgtgggcccacttgatataaaagacaatcatgatattctttctgtcctgctctcttaacagccagtgttgacaaacatttcccattttggtttagaagactgtgtccttgggtgttggtttcaaacatgcagttatccaaagaacacttttaaataatagattctgggatggatccttgaagattgagtcacttgacccaaagtggatctttactatctcatttaaaaaatcttcccagggccagatgcggtggctcatgcctataatcccagcgctttgagaggccgaggtgggtggatcacctgaggtcaggagttcgagaccagcctggctaagatggtgaaaccctgtctctaccaaaaatacaaaaaaattatctgggcatggtggcacatgcctgtaattccagctactagggagactgagacagaagagttgcttgaacgctggaggcaaaggttgcagtgagccgagatcttgccattgcactccagcctgggcaacaagagcaaaaaccccgtctcaaaaaaaaataataataataaaaaataaagttctttccaggtgaggctgaaacatctgagaaccctttctctattgtttatctcaggcctcttgaagttttcattgctgttctcctgccatttccttcctaggtaactactgcttttgaacactttatagttgtcctcagattttctctctagttcagaactagaacatgtgctgatagatgttttaaacaattcctaccctatctgagtcccccggctcccatatatcaaactccttcctaaagtaacatcttagaggcaaaagatggtgtcagtttggtagtaacaataacaaccacaacataaaagccatcacttattgagcattcactaggtgacagatgtgtctttagtatttggactgtattttctgatgaaagaagtctcaactatagacttttatttacagctgcttactcaatatttcaaacaactcttgattactccttttcctgatacatgctcctcctccaggcttccctcatcccagtatgtttccagcagtcatcaaatgctgagtaggtgttattcttgtctcccatttcccctgacacttcataaccagtccatcagtaagttctgtcagctgtgccctcaaaatatgtcccagtctaaccccttcttactccaccacgagccattcaatccaaatcactattatattattttggtagctggatgactgtatcccctgctcctccttcggcttccatggctagtccttcagaatgaaccaagaataatcatgcaaaagtataaatcagaggtaatataattcattgacttaaagccttcagtcatgtcccatcacacttaggttaaaaatcagttcccttgcaaagcatgacctgtaagtcctaggtgaccttgcttggacctccctctctagcttcatctcatattactctattccttgacttccgtccctctgcttcactgctgttctctgaataagccaagcttttgcccagctcaggaccattgcacttgctctgacccctacctggagcacttactccacatctccgcggcttactctctcgcttcacacaggtctctgttcacatatcctcagtgacgacttctctaccattctgcctagtagagcaccctgtccctctttatccacttttcttgctttacttttcctcatagccttctttactacctgacactgaagcatacatatattgggctgttcattgtctctctcccccactacaatgtaagctgcacaagggaagggatttttatctgtttcttgttcacctttatatccctagcacctggcacagagctgaggttcattaagtatttgttgaatgaatgaattagtaactatagcagttgtcactctcctgggttcttctgcagcagtgcctttgatgcttatacatgaaattcctaaaaatttagatgacatgtcttgatctctgtcagtcactttattcatgaccttgtttgccttttgtaactgcactttaatatttataaagaacggagccatgcctagatcagtttagtccttaaaatatttcactgttatccctttattataaagtcctgggctttgcatcctgttcttggctttggggctttcagatttaggttgaaagagggctataaagagggcatgctatattgggtcaacagtgatcccaaagacagggaaatactctgagtacacgtattgtctcttctagacttttatagaaccgtatgagatagggaaatgtacttttatgtgggatgacaaaatgctcacactgggactttcaagctaacattgcttcttacctctcacactaataatagataaatggatcattttcctcctccttttgtccatggcctccttgaccactctgagccatttcctacaggaagttttgcatgtgttctatgttaactgatgcctgatatattagtgcagctctgccctctttttattcatgctaggagcatttgttttatgacatatgagagccaacaagtgtggtcaagtgcaaatagacccatatgtatgttgggtggaagggctccttgcagaaagctagctctcaccacagtatacccacacacagacccctaagaaggctggccgctctgctgaagtaagatggaccagcttgccaatgggcactttgccatcagagcagatgggcccaagcaggggcaggcagcagagcacgcatgtctgttctggacacatgcatatttatcatttgtgtctttcatttacaggagacaaattcttgaacagaaaggctgagttataaactaagcgtcaggaaagatgagctttcagcccttaattaaaacattcaagcaaagaaatcaatgtttcagtcccactttagaaagcttatgaagtaacttgttagagaccctctttactcccaagtcactcttcactaaaggggatgctgtgtcttgctcaagcagtgttttcacttgtacatcatgaggtaacctaatattttccaaaaaaagaccagagatgtaggagaatcaccaatatactccttttttgaaaatattattagaatttttccaaaactattcttctcttttcaattttcttgttttaataaaatgagaactaaatttaatttcttttcctgctaactgctgaaggtgactatatatggagataggactcagcctgtagcacaggcaaaaacatttacaccttgaaaatctactttaatatcacctgtgtagtgttccatttgcccaagtggaaaacctgaaaaagattagaataataataattattaaaaagtgtgcagattaccttagataatttataagcatcatgtccatctaaattataaaagaaaacctctcacaaaccctacataagattcatgggcattttctaataatatttcacatttatatttcaccttgcacttcccacaattttcatatatattatctcctttgaacctctccataaccttgtgaggtaagtaaggcaggcctgttggtctctcttcagttgagggaaataaaaattgtgcaggtaaagtgactagagctcaaacttcaagatcatttgtcttttatcatattaattttaattcgaaggctattttataatgagacaatatctagtgatggcttttaatatcaaatgatcatagtcttttacaatcttgctttctatttttgattttgctaattaaatctggcaatggagacttaagggaaactcttatgtttcaagtgtcttggacattgatggaaattcagcatccaagggctgctggttgacttctgtttatggttttgacaacggtaaagtcctctagggatttgagtaggtcactgtgttgcctagtgtgtgttaaattattgagtaaacatgaagatggttgttcctgatctttggtttgctgtattctttatagtttctcttagagatattaaaacaatattactgctcttcaaaaactatgagttggaccatattacacataaacacaaatagtgacttttgtgtattaataaaataacagcaataaatagaactccatagtaaattgctgtgctctgtgcacctctgtatgaaaatataattgtaaaaatataaaagtattttgtactacttcgcatgtgattattttccaactggaaatgctatgttcttattttgacatgtgacaaacaatgtgtgataattgctatttatatttaccgttaaaaatgacagatttttgcttttggacataaggctgataatgaaattttccagtcttgagaaccaatcaaaaaatcttttggaagtcagctcacttaaagaaacccagaaaaccactctcctcatgaaacttggtaggatatcatctgacttctattataaatagcctgtttgaagagataagagtgagttaaattacaaactgttttccaagtaattgatatccattactggatttggacagagcaaaattattttttctggtgctggtgctctggtatgcaaacatagtatgtcttttctgttgtcacacgcttgcagagaaattataatttttaaaactttttagagacacaagaggatttttttttaaaaaaaaggtttatgtgtttctgaatatctaaaagaaaaatattcctggaagctgtgacaacccaaacatttgtgtccaaccgatagaggactaaatttaataacttgtgcagaaaaccaagcacttgaaagcaagtgagtttggggcatactggagctgtatataaaaggtgaattatttagcatggattggatgaaaactgaatttctaaaacccactaattccttaattctgctttgagattataaatggagaacaatattcaaaacaaatttgaaagaaatcagacaaatttttgaaagaaatcagaactatgtatgttctttacagtacatatagaagtgatcattcatctggggactgagatgaagttctttgttgttcaaccttggaaagtctccgtgactcccaaagaataatgagcaaagtgggagtgaataagtactccactctctaggacatcaggggccccagaggttcagggagatccatagtaattgcttctggcctccaaaatcaggggaaaatatgctgaacaaccagggcagaggtgccattcctctgctaccattcgtttctccactgcccttcagactcttccatctctcactgtactttctcgcacactgtctttcctccagctttaattcttcctttgccctctgctgccctttcagctccttctgtctgagccccacagttcatcagtacttgtcttatactattgtgagtgtgatctctccctgctggaggaaatgtttagatctttggttcataagttttgaaaatgcattgtaagaccagaggcttttctttgtccatcaggtttttctcttaaaggagagtatattccacaatagattgttttatagtgggaggttccacaattcaagtaaaactactcctctgacgctgagtggtagaactagaaataaataattcctcaattattttattgatccagaaaaagccaaacattttccaggaatccaaagagaatgtgacctatttggacataatgaaaacaaaacagaaattgattgtctactcaagatgtcttctaggaattttaaattatccacaaatctgtcttctcattcatgtatttaccctggctgtgaatagattggtatcatttccacatcacaaaactgaaacggggctcaagtcccctgttgcctagctcagtgctctttcttgtagtttacttagtgtcctagaattgtaagggcaggtacatccctgaactcaccactctttcggaacacgaagctatggtctttagcagaatatttgacagtagaaaggagtggctggtgttacatgataaaacagcacggctacgtgtgttctggttagaaatcaaagatccattattcacttgggcttttgctgttaggctcttgaaagattagcaaaatttcataaaatgttgtttcactcaaatgaagtgggagacttaaagaggaatcgttgtgatttaatgacctttgtcttctgcagtatgctgtccttacaatttttaggctaagattaattaatttaaaaataaaacactcttaggagtcagtatcatcattaggagtagggattctagacccacattgactgatctcagatattagtctcaattgcgtgcttttgggcaattaggttcaaacattattatgtctgaaaatagggataatgatggtacctctatcaagggttttggtgagtatgtgtatactaaatataaaatactgataacagttcctagcacatattacactaagtattacctattactgttattagaattaatgaataacagaaaacggccgtgtccctatacttacataatcaaataaatacttattctaacaggaatatgtaaaattatgatttggtggacctatacttcatagagggagtcagtcttatgcaaataatgtctgactatcctcagcataagaagttgacccttctattgtttaagaatgcatgatttgtgttttttgctcattcttaaaattttgatgttttctcaatgagcaagagatgagaagccatttttatggaggctattactttttttcagtttacgttttcatttaaagctgaaacacatcattttgcaagtgtatttggttttcatctgttaagaggtgcaggcaagaattttcaatgctgtgatgatttgtgggttccactactaaggaacagacactgaaatcttaggcagatcctcatgaaaactctctttgcttttcaggctatttttctcaggtttgatattttttaagcattcgacaatcattttcttcccactctgttctctctctctacaattgtcctttctgtaacaccttaaacctcctttacctcatgtgcaaacacacaggtatatgtgtgtatggaaatgtgcagtatgtgtgtttccatacttggatctagtaggtaatatctctctgctaaaagagtgcaacagtaaaacagattagactagagctcaaaaggtaatttagtcaaatccttttatctcaagtcatacttcccacaaaccaaagagaatcgcctgctcgtcaagaaatagatttcctatcttccctttgtcccatacaaaagcatattttagtggtgcaccagatgctgccaaaagttaataaagaatgacattttaatagtagacattccagatatagacagaaacttcagcaaaatgagacaatgtttcattttatttttattcaagtccctgtgcctcctacagagaaggtgaaattgtttaagtggcaaaacaaatctgtatttagagttccaaaatatgttgagatatcactgaagacattgttacttgtttaatgttttcagttttgttacttgtatatttgatctacgattttttagagttatttgtattctatagaacaaaaataaaagccagagaagcaattctgtggaggcaagtgcctagttccaggtcagagaaaatcattggtaagaccaattttcagttattaaactgttacttaaaccactaagtcatgataaatgagtccagatactgcagttaggtaaaatcctaagctttgcttgaacccgtatcaagctcaataaagtcacctatttggggaaattctctatgaattccttcttaaagtgaaattacttacacctctattgtccattgaaagtgcttttatgcccagcctttagtaaaggactgcaacatcagttgttttctctttttggagtacacaggaatgttaatatacctgctactgtggttgattttttatttaattctatttttatatcttattttaatgagttagagtctccatgcttctgtttttaaaactccatctgtttctaatacatggcttctgtgaaggcatgccgttgaaacctggatttcctgtacaactattatgcattgtgcaggaccttgaaattagacaattgactggactcaaggaacttctgccaaatctgttagaattaattgttaaagttacttggaactgaagaagagaataacttcatggcttggagcttgttccattaaaaattctagaattgtcacctcagctggtagtgcctcctacagacaatcatgggttattcctattagctcatgcaagagggtgtggctacaaaacaaaacatgggaatttcagtaaaaagaagccatagaggtagtgacctattattttcaccttcagcaatgcatatatatatacacacacatatatttttttccgacttaaataaggctaagcaaatgaggatatactccggataactgcgagtgtgttaggttgaaatgctttctaaagaggaaaaaaaagaaagaactacccagaactaatgcattagtgtcatgtttcacagttggctcaagcttctggggtacagggcctgctaagttgtctggaagaaaatgcctttccttcatttttttttacccctaaatcaaatcactaattgtgtaaatgcttctgttttttaaacatgagcctgcttttcctagaaaatagataatttgacttgaacttaaacttacagttgaaaatttgccatatttacatagttgataccagtagcataatttatgttttcacacccaatacctaattccaaccctactcactcacctgaccctgctctataggttgtaaatgttacagattattttttctgatctcccttataagtatgggtgacagtgcaactcaggcatagccattgatatgtaggtggctgtccactggcactgcctctgcccctattcctttcattttgctctaataaacagcaaaattagtggagctgcatagccattatgtcaacatgaggaaaagacgtaaaggatataagagacattaaatccaacttgtttgagcaacggaacccattctagtgactgcttatttttagaattcttgttatattagaactctatatatttatataggctgacatatgctctgccttttatcctagtaaatatcatggtataacttatttattattagaataattgattcattcattatgttacagtatgtgattgaagtcagcgtataatatggcaaggtaaactaaaattttaataaaaagaaatataagttgaagacagtataatggtagaagagtaaaataaagccaaaagaacacaaaaatatatctaaaagatttatatatattcttcaagatcaaacaaagatttgcctcaagatttccagcacccagtgcaaaggggaacacaagatgaattacacaattcacagtgtccataagagaataacaaacaaatcagttgcttagcagaaggccgactgctactgactaggaaatgatagagacgttttccccatggagagtcacaaagtggttattgtggattgtaatgaacaaaatctatgtaaccgttgtcatacagttatatttttatagttttttaatgtactgtctcttaatataagctgatattacagtgtcaaattgcatgttagtaaaaacaacttgataactcaccagtatgatgcagtataaattcatgattctctggaagtctggtttaatccagggtagagcaaagagtatttagaaaaatggaatgtgagaatatgcttcagaagtacctcagttctcttaaccaaagttttagtagttaagaaacactgtcataaaatattttttaataaatgcaactaccaggggctttcctagcttctttgaatacatagatatgatagtgtgtacctttcattctatgagattatatacaaaggccagagctgcgtagtccactgtaagccactttatccttgagaaaacacttggtggtgatggcattttgtactcctgctcatagctgatacagatgagctggtcaggcagcccactgtctgcccgggcagagcaactcccacagtggtcagtcaaggctgattcccaaactgaggatttaaacgtcttcatcaagtttaacttatcctaactggggactgtaatgaatggtgacactgtaataaaaatggtaaatcttttaaagggtccttttactcttagtcctctctgttcatgctccatcattctagatccccctgaaatttactctagttcttttttcttctcctttgaggaaaataaaatcattctgaaatcatgagcttatggtgtgttcattcctttgaaatcagtctccaaatcacttttagtctcttctcacaaatacttgtctttttctttagttacttatctccatccccacccaaaccctcgtttctcctttctatcatattatacatggaaaagcaaaattaataattctatactaccactaataataatagctaaattagtggggaattatcaagtgccaaaatctgtgctgagtacttttgcatatattatttaacccctccaacagtgctttgaggaagataactatttttatcccaatttgctcgtagggaagattgcttgaagtcacactaaatagtagagccagaattcaaaccaaagctatctgatccagttcctaccattcttaaccattctgctaatttccagaagtccagctgataaagtgtaaaacaaaagttgtttgttgctgttaccaagaaaatatcagggaatgctttctactaatacatcagcagcctctcttcttcttcccctctctcctcctctctccacccagttacaagctacaggtgcttcaagcatcaaattggacatttctgtgcagtcatagaatagctggaacttaagatatttatttttctggaaaaccactgatgtgaggtagaggtgattacacagtcacttaggtcaagagatttgtctgaatgggaacacaatattaaaagtgaaaatggacacatgagaaacatagttttcctggaaatctcttgctttagcatatacattctgtgttttaaccctgaatataattcatgacgctttgttggaggcatcatgacctaacactgttgagataggtagaggactgatgttcaggagatgtggtttcgaatctctctttcactagctggctgtgtgactttaagccagtcattgtttccttatctctctcatagatacgttcataactctgatagggcctcctggtgcattagtattttgaggacatgattacataagctatttttttcctttgaaaatttaaaactatctcataagtaaatgaaagcaaaagtattttactcttcttttgtcttgcatttgctcatccattatccagtttataactttctgttatctttttgtttattaactatcacttcattcattgggctacattctatgtaaattatttaactctgcaaagtgggaacacaaaatatttaataagactctgtagacagaaagcacaaggcagtgtgaacaccacagttagtttctgtccagttttttgaagtcatcttaaattcatttattattctctgtccactcaggcaggaattttaaaccctttctgacttttggtttcaaaacaatttttaaagcatctgaaaagccctgaaacaaagaatgataatactttatttgcacataatttttaagtggccaaacagaggtttttggcttttagttctgttaaaaagtcctccctcagagttgaaaaaagaacatgaacatcttctgccaaaaggttaaatcctttgaatagaaggcctttcagggaagtgcccaaagatcatgaagaatgaaaatgctttttcaatcattttaatttaatttaattcaaacagcattcacagagtacctcctaggtgaggtgctgcccattattgtaaaagcccctttgggaactacaaagatgaatgagacatgacatccgcctcctcttagtgcacaaggcaatgggagagaaagatgtatgcatagattagtttaaaacagggcacactggtcaagggaggaaagatgacataagttaattctgatgagggcattttagcagacttccctgtagaggtgggagcatttaacctgttttttgaaaaataataatggggaagaaggccactctaggctgagagaagtaaatgagcaaataagttggaaaaaatgtgctggtgcttgggctcttttgtggaactgtaaaaagacaagtcaggtggattatagagtgtggaaaactgctctaagttagctcagttgagatcattctatggagggttggaatgccagattgcaactgcagaatttggtatccaccacttgctgtaagaagcaattgaagtttgttgttttggtttttttttagcacttaacacccggaaggaagtctttgttcttatactcttgtccctagtccgtgctactgcctcttctctaatctcatacaattttatgcatgtcaacaaaaacagcatgtatcgcactgtgttaaaatcaccagctcacttggctacctccctagtgggctgtaagacctctgagaatgagaactgtatatgtatatttaaaacatatatatatatatatgtgtgtgtgtgtatgcatagaacgaatagattttaaaaattagaagccatgtggtcagggttgtgttttaggaagagaaacctggtgactgtatatagggtggaattgaaggtggaaaggtgaggaatggttggatacagggaaagtttttgtagctctcttgggaggaaggaagaaggaagaagcttggctctttacaataccattagtgccataatgcgagaatgcaggacacttatgttggcgaaataatttagaagactttgggagatgtcaaaagtagactcactatttcattatcaaaatgcagagagtggggctggatgcagtggctcattcctgtaatctcagcactttgggaggctgaggcgggtggatcacctgaggtcagaagttcacgaccagcctgaccaacatggtaaaaccctgtctctactaaaaataaaaaaaattagctgggcatggtggcaggcacctgtaatcccagctacttgggaggctgaggcaggagaaacacttgaacccgggaggcgaggttacagtgagccaagatcatgccattgcattccatcctgggagacaagagtgaaactccatctcaaaaaaaaaaaaaaaaagtacagagtgggacatgaagatgcttgccaagtttaatggccccagtgtctgatgtcttctacactggttcagtatcagcaagtaaccactgctaagtctagttggtagctctcaaatatgtgtaactggaactagaggcaaccatatggcaaaaacgacattttagtatgcctccgtagataatcaaagatttgagttgaagtgttgtaattgagtaacttatttgcagcgcatgttttctgaaaatttagtcttttttctcaataaaaaaatacatacacagaaatcattatgccgaagaagaaaaaaatctgaaaatgcatatagtgtgtatataaaccatacaagaaacaaaatatatgttctgtatgtaaatatcttatcctgttctggacactatttcaaaatatcttgattgaagcattctatggtacagatggaaatcttatgacaatcgttctaaaaataaacaagagctttagcttttctgtgttgcttaaatttggtgagacgtttttgtttggatcctgtaggagcaatttgaatggctttgagaaatgaatgaatttttaagagaataaggatttgctggttattagtcttctaagcccttaactatgttgaacctcacttttatcagagttggaacagaagggacttcaaaaatacattcttggctgggcatggtggctcacacctgtaatcccagcactttgggagtccaaggcgggcagataactgaggtcaggagtttgagaccagcctggccaacgtggtgaaactccatctctaatttaaaaaatacaaaaattagccgggcatggtggtgcactcctgtaatcccagctgattgggaggctgaggcaggagaacctgtgttttcaactactgttcttatattattgaggcttatgtgccagtcacttaaaatagtattttttaataatatttttactgagtaaattcattttgctattaaaatactttgaaaggtttaaaataatgtgtctgagagcatgaaaagtcaggacagctcttagttgtgagacattatcccatgcagacagacagggcatcaagcatcaagcattttatttttttttaactttaagttctggaatacatgcacagaacatgcaggtttgttagataggtatacgtgttccatggtggtttgctgcacctatcaacccatcatctaggttttaagccccatatgcatttggtatttgtcctaatgctctccctcctcttccctccaacccccctacaggctctggtgcgtgatgttcccctccctgtgtccatgtgttctcgttgttcacctcccactaatgagtgagaatatgagtgtttggtttactgttcctgtgttagtttgctgagaatgatggtttccagcttcatccatatccctgcaaaggacatgaacttattctttttaatggctgcatagtattccatggtatatatgtgccacattttctttatccagtctatcattgatgggcatttaggttggtccctagtctttgctattgtaaatagtgctgcagtaaacatatgtgtgcatgtgtctttatagtagaatgatttataatcctttgggtatatacccagtaatgggattgttgggtcaaatggtatttctggttctagatccttgaggaatcgccacagtgtgttccacaatggttgaactaatttacactcccaccaacagtgtaaaagcgttcctatttctccacagcctcaccagcatctattgtttcctgactttttaataattgtcattctaactggtgtgagatggtatctcattgtggttttcatttgcatttctctaatgaccagtgatgatgagctttttttcacgtttcttggccagataaatgtcttcttttgcaaagtgtctgttcatattgtttgcccactttttgatgggattgttttttcttgtaaatttgtttaagtttcttgtagattctggattaatatccagaatggatgccagatggatagattgcaaaaattttctcccattctgtaggctgcttgtaccctctgatgatagtttattttgctgtgcagtagctctttagtttaattagatcccatttgtcaaatatggcttttgttgcaattgcttttggtgttttagttattaagtctttgcccatgcctatgtcctgagtgatattgcctaggttttcttctagggtttgtatggttttaggatttatgtttaagtctttaattcatcttgaattaatttttgtgtaagatgtaaggaaggggtccagtttcagttttctgcatatggctagccagttttcccagcaccatttattaaatagggaatcctttccccattgcttgtttttgtcatgtttgtcacagatcagatggttgtggagacatcaggcattttttacctctgccccttaaataccagaattcagtattttaatttgacaagtagcacatgaatgtgttctcatgataaagatttaaaatacagaagtttagagagtaaaactgtcttcttttattcttctaataatttctctctcttcctgaaaaataagtttacctctgcttctgaaactttatgcttcttttcctaagaatttataaatacacacacatacataattttctgacataaaataaggtgtaaaatacatttttccatttctttctttaatttattctgacaatgtttttatacttcaattataaggacctttctcattttaagtggttacctaataaattataaatagatgcttgtaatttgtaaaataattcccctattgattggtatgtcatttgattctaattatttaagcaaactaaatgtaaatttgtcttttttgaggcaaacatcttcctgctcactgccaagtttttttttcttgtggattcctagaagtggaatttatctgatactatgagcctttctgcgaaatggtttttcaagtaaacttttattagatgatgagcgttctaggttcttattcccggaccatcaaaacatgttattgattcttttaaatactttcccagtctgatctgggaaaagtgatagctcattgttttaaattgtgtttactactgacatttagcatgtttttatattggccatttgtatttcctttcataaatctcctttttgtcctattgagttatttttctgtcagtttgatattagttttactataatgtaaagacatcctctatattttcttatatctaggaaacagttcacttttctatcatagtgaagtgtagctattatctaatttgcatctaatttggctttctttttaagttgcacatgagaaatatgtgctacccatgtgttaaattaaataaataaaaacccatataccaaattaccctcttttatgtgctataacaataatattcctagtgcttatgaaaaagtggccaaatatatcagagcaaaaatattctcctttgttgaatagcaaataatatgggaggagaaggaagaaacaggatacaggtatctttgttgaggttcaggcacagagataatgtaagtcagccagctgcttttatactagcagcatgacatggaaaaatgaaaataaaaattcagggacaataaaagatattttctcctttgctctcttgaagtcaaactgtgttctgtgaagtatcagtacaacttgctattactagctatacctgtctaaatctccatgactattagggcaaaactgtgtcctttttaattttttaaatgctggttgttaaactccttcagctaatgggggcttagataaatttttacatcctactaaagttactgttaactcaaaacatgactacctaatctattcttaaggcaacagagtctatttgtaattttctatcaactgtcttactctttcttgctgatatagcaaacgtaacaatctacagagagaaaatttgcagtgctgaaaataatatgaatatcacaagaaaagtcacagaagcatgactcaatagcatttttaaaaaggaaaataattaaggaaattgtattgtattaaggaaattgtagtgcattaaaatacaatgctgattaaaaatataaataacatgttttaaaaagcaaaaaaaaaagcacatttacaatcccatattctctacaaagaaagttgtaattatcagaaattcacctcaatgcatttaaattctgaaattttaggcatctcaaatgtgataaatgcagcaaaatatgaaggaatggcaatagtacaaaacacagaagataggtctgcagtaaaattaacaataacctggaactataatttcagatgactttagcacgtagttgggatctagtaaagaggaataagatggggaaatggaggaaatgtgtagtaatgcttttataggaaggaggagacagaggtagattagactttgatgaaatgttatacacttgaaaaaatatgttataaatgtatgagtatttattagaagattacaaataagatgcataactttaaaatcattagagggaaaataacaaagttttcaaaatgatagatagggaaaggcaacgtgaagcaacatgaaagtacaatatattttaaaaataagtgtaagaaataaattcattcactatacacttgaacacatcaaatgatctgaatttctcagtctgattaagtagctctatgctgtttaataagagctacgctccgcaaaatggtaaataaaagttgaaaacaaaggaatagacaaagttataccaggcaagtgctaacaaaaagagagcagttttgctaacctaactatcaaattgttgacgcagattctcaggccacaacccagacctactgaaacagacactgtggggttggggcccagcaatccagtttggaaaccactgttttatatatgtcctgagtcccaaattcatttctctaaattgcttgggattagaacaaagaccatgcaatcacagatttcttaaaaatggaaattgatcctttatcctagtaaaatactgtgagaactaagagcaacttttacctagtgagtccttaaatattcacagtggagtggattctgaccagtagaatctctacgcagtgagcttgcttgagttcaaatcatagttttctcatggagcgttatgaccttaaggaagttaataacctgtttgttttagtttcctcatatgaagatagcaagaaaataaaaaaatcttgtataaatgttgggagggttaaatttggtaatccgttaaaaataagtagcccaatgcctgatatatggtaaataccccatacatgttctttggtattgtttaaacaatatttacctcatgcaaaaatgaattctacatggtctaaagacctaaacataaatcaatttaagcatcataaaataatatataattgtatgtgtacagtctttgggtaggaatgatcttcctaagaacaaagagcaaaagcagaatccacacaggaaaattttgtccaatttgcttatttataaattaaaattttctcaacacaagagacactaatgaatagtaaaacaaataccacactcagagaaaaatagttcaacagaacaaaagggaaattttattaaaagaatatacaaatgaccaataatgaaaatatgttaaatgtcacaagtaaatgccatgtaaaataatgagttatcactgttcacagatcagattggcaaaatatttaaaatgatcaagaatatgcattgatggtccaggagtaagacagcacactgatctcttaatgcaggttttcttgggaaaactgttttagaggaaaggttcgtagaatcagtgaaattttacttctaggattccattcaaaaaaaaaaagttggcaatgaatatgaagatgtttgtccaaggaagacaaatttgcattttgaatttaaaatttgaattctaaatttgattgtagattctagtttcttaaagttaaactgaaaacaaaaaagtactctcagatgtccactggaaattttatgagctataagggtaatggtggttggctgacttgctaatttagaaaattaggggcaatctaaatttccaagtttctttcaagtaatctaataaagtgtcaggaatcagaggttccaggcaggctagtttagtgtgattactaaggtcattatgcttgggattccatctctgttaacctacctactgttcttttggcttgtggaggcagttatattgttttctgcattgatcttgacttctaagttaccagcagttaattgtatcattgtctatgtgaacatatcttttccttttagggtagggtgtttaaagatataaaccttggactaaagtgatttaggaattctgttaaagaaagaagtccatgaattggaatctgttgtctttatgtttttttcagttgcaatatataagcactagaaaatgttccttctattttatatattcttcaaaaagattttttctacttaaatttaagtagacattttgactggtaaaattaatttatgctatatgcttttaaggccacttatcaatatagtcactataattaaccaaaaatatataagtaattaaacacaatactaaaccaagtgacaaatctggacaacattaatctgatttttgaataattcatttttatgaactctcagatattaatattaaatctctttaagctttttatttaataaatcaccttcattgaaaataatattacataaaattgaggatgtccaaaaaatgtggaatatctaatgcctatattttcacttacttaatttctccctttattacaaaaataatttggcagagatcatataagaaaagggatttttaaaaattcaagaaccaaaaatattaaagttgtggaaaggaaagaatagaacacaagcatgcaagccataagattttatgtagctcctaatagtggatattagcatttatttctgggcttcctgttgtccacaataacaaagaaacatatcatttatatgattttcattgtatgaagcatagaaaatatactgaacctccatgcaaagaaaagtttatctcggaacatcaccttactggggactttctataacagacactcatacagtggatggacagtgactttattaacatctcttcaacgtacacattatcatagtccttaaaataatatctagtataatcttcaacaatatttaaggtgtgacaccaaagcatacaactaaatagaagaagatctgtgggaagtaaagaacatatggcccaaggttaccctttatgacagtctactttaatccacagggaaaatctagattatttaggcaaaacataaactatccagaataaaaaatagacttgatatcattaaaactgtgccctataaaaactgcttctctaaaccagacatgatgtgctggacaaccaagaatttgagattttattgtagtcattgtgcatgtttaacacactaaacatttccaatatccagattgttccttgaaggtagggttttcatcttgcacatattctgattctcttctgcatttataattgacctaaggacctgttaagccaatttaggaatccttgctggattcaatgaaattaacatttttatgggttgtaaaaattgggctatgcagtaagacataatattcttcagcggtgagaacacaatgggactttaaaggcactgtaaaatgttaatcctttttctatctcaaaacaccataaaattacctctataaaaagtttagttttgaaaacaaaattctacgtatgataaacacaacaccattttacaagttgggtaatgatacaaatgatacaaattgcatagttacaggagtctaggcccacagttgagatacatgttgtcaaaagagaaccatttcagctagagcaagaatgtgatgggaactgatatgatttggctgtgtcctcacccaaatctcacctttaattgtgataatccccacgtgtcatgggcggggccaggtggagataattgaatcatgggggtgagtttttctcatgctgttctcttgattgtgaataagtctcatgaggtgtgatggtttaataaaggggagttccccaacaagctctcttgcctgccaccatgtaagatgctcctcatttgcctgcaaccatgattgtgaggcctccccagccatgtgtaactgtgagtcaattaaaccactttcctttataaattacccagtctccagtatgtctttattagcagtgtgagaacagactaatacaggaacattcaggaaataggttagaaaataaaggatttttctgatgacagacacagaggaacagtctaggacgtattaaatagtgggagataaagtgagattagaagatatccagagaaatgtgaagagagttgtccttgagaaaagggatggcataggagctgtggacttctgattgtgaccagagtaaaaaagctgcaaggtgtgatgggtctagacctggtgattgattagaagtgaaggtcaacaaccctaattaatgcctccttcttgggaataagcaaatcatagaaagtttgtgcatggggaacagggagactccaggggcagtggagaggcagagaagagtggtatcatgggagcacacagaaatctctgggcatcccctcagtctagctgtggacagtgccctcgttgggctgggaaaggttgggggagagagagctcaccaggaacatgtactaagttgttccatttttactgatgctgatttctattcattcttttgccttatattgtagtaagtgtctactaaatttagatttagtgaatagtctaaatctaaaactctataaattcacttttatcattgtaatttgccactgagaacccaccattcagaacaacagtccaacttcaaattgcttcagtgattatattgttaatatttcctagcttccagaattgaatctcatgaaattcatggaatttggatcaatgtgtgtgggtactgtggtgatccattccctcctgtggactatttctcctttctgaactgaatgcttctttggttttatgtctactcattaatgactacatagtaacccacttctgacaaaggccagtctacactgccaaagtgtttcacttagcatgcctcccagtggaagcagaggtggaatccaaagttttcagttcatgttgctgattcattcaagttactgaagaaatgtccagagactagagactgtggaagttgtttctgttctgtgaaaaaaaaaaaagtgaaaaattaagaattaagagtggagatgtcacttggtgttgccaggctttggggttttatatacctgtataatttttaaaaatagaaaaggcacagaatcaacaaccatttaaacaaccaccaccacaactaatatctgcttacaccagcattttattaaagaattgctattttcacactttaaaaagcaactacatttcacattttgaaaaatgtatgtcctcatttttttttcttatttctacatcatactaatgaaaagtccagcatggatctccaagaagctgcagacctgagttagagaacctgaactagctgacctctgagcctttacaaatgtgatattctgtaacaatcttatttagtagtataatgcataattatgtatttggttctgtactattcagtctgctttattaatctcacttgtagctttaataaaatttccagaaataatattagaagttacatctagatgtttctctatgtatttactttgctgcggtgttgtcagtcattgcacaagacctgatactgctgttcagactgttcaataaatatataaaataatgaaatgtatttattaaatataataatttaattattttaaaccatcatgtgggcaatacataatttctccaaaaaaattctaacaaaaggaatctctgaaaaagctgtctttcagcacacaatagatcaaaatgtgtaaaatagcatgaagttctaaacacagctgaaagttcatacagcattgttaacacagtgcgtttgttcttggataggaaagctgtgctgatgaaagtactctatttgccttatagattaatacacctgcacctgttacaattctcatggatgttaaacagcatgtcatccaaaaggaaaactgagaatactgcctgttgccccatgctgtagctacctgctaaccacagtagaataaagtatatgaaaggtccttccacaatttctggaatatagcaagcccaaataagcatttattaattcagtcagtgtactgggtttaaaaattgtggacagtagatgacaacagaaaaatcccaccaaatggaaacatcatacaaatactgcatacacacatacaaagaaacaattggaatttaatattcgattcactgaaagtgcttttcaactttgtagcagggccagtagacatctgggaacccataaaaatgagaaaaataagcctgagctacagcaatcaggatagaaaggtgtgaaggaagggggctgtttttgcacgaaattttagagccagctgttaacttcaagaggcagttgcaaagagtgacagctgtgaaagcaatagattctcttacataaaaagccagttagtaggtgttagtacaggaaaatattgattatgcaaagtggaagtgagagtacttccttagtgagaagattgtgcagattagtattttctagccactgacctcatggaagccatcatctgtggcatcattaataagtacaaggactagcagaggttgggcaagcctggggtttttcatgtaaataacactactctccagtatgtcttaatttaaaaatgcctaatgtatcacactatagtgttatatatttctttcctaagtctatgattaaataaatatgtttttttaaaaaaaataatagaaactcttgctatagctgaagcctactgacatatttacatgtcttgtttcaaagggcactatcccctgaaaaagaaaataatgcaatgctcaacaaactcaagagaaccatacttgggaactccccttcaatcttaaaaggagaactagaaaggaaaatcaaggaattcagtctcaatggaattttccatataattgtggaccttctatggaacgttctaaactttagttgacataacaattttaaattagagtacatatatttataattacatctgcattgaagttttatttaggaaattatctttttgaaaaagctatttttcataacatctttagaatctagtgcctaaagttttaggtatctgtctaggcattcatgaggaagcaactcgcagtgtgtgtttggctatggtaattactcaaggtcaggtaattactgggcagaaaagagtgctggtttctcggtgttgaggaggaagcctggagacttgcaatgggtaaaactgactgggcaatatgtgtccattaccaaaaggggcccttaggatactgtcagaagcagttggtattgactgagttatcaacatttgcagttgtggcctcaagaaaagatgatgttgtttaatactgtgattccaacaagtggcagataaagttcaaaggtagctatccttgtccagcaagattccctacaaagtgaatgtggaaagcacaagtgcagaatcctatcaccggagagagactgatgtaagtccttggcaagctaccaaatttcaatttagagcttgtgggggctaatgggaaggggacatagggaagtatgagtccaggcagcgcttggaacaagggatctgataagtagcagaggtgatggtagtgacgtgagatgccctgcagtctggctagccaatggacactggatctggaagtcccaattaatcttgaatccctttgcagtaaaagggaggaacctctgctgggtgttgcagtcagtgggggacaaggatatgatgtaaatccaagtttatattcctactaggatatgtactccatggaaaattattacagttttaaaatttctcagttatgtttttgttatatattttctaatgtgtgattaacttaaccaggcaccatagtagttagcaacaacaaagaagtataagttgatttttaattatagaatgcataacttaaaaaatagatctagcaatttattttcatggtagcatgtaaaacattgaaatggttagtagtgtatctttatttcaacctccttgtttaaggaatatgagtaacaaaatgtcagatatgcaagtttggatttcagagcttcccactaccttcaattcaatcttctgcccaactctaagattttataaattatatttaatttcttaaatatttttattataaatggcaataggtagaatttaatgcagtttgttcagttgtgtccatttctttttctttttcaggtaagagaaaattattttatttgtttctccgcaggctgtaggaaacattaataattcatggagtcagtttcttctgtgtcaacactttctgagcacaccaccaggtcccaagcttacctggctttctcaaagcacagtgtgcagcacgtttgttcagagatcattcattaaggatctatgggaggctcggctctgtagtactcatataatcatactgtgggaagaatgtttaaaatacaatttcctgtaaattggtacaagagcataagaaatggccaagtgctttgaaaaatgaactaattggtacaagagcctaggaaatagccaagtgctttgaaaaaatgaacttactgacacacgataaaaaacatgggtctccccttcccccagcaatgagaatatatttcttctcatattgtcatactccctccttctggcctctgtctaaccaaaggcatacatgtcagctcatcctaactgaacaccttatgttcattctgcaactctgggtcagtaaagctggctaatttacatggagatctgccctatcaagtgagcccaatcagtatagtactgaaactctgaattaatcatgcctctttaatcaatgagaaggaagagtctcaaagattaattcagatcaacgaaaggatctagaatcatgcatgatttcctgcttgactgactctatgctagtaaatatgcctctgacaaattagtcacataggttcaatatcccaaggaaactaaaaaatgaagacataatcaatgcatccaacattatctcacaaacaccaagtcatcaaccaaacctttaaacaaagttgaagtgacattttgtggctaaaatgtgagtaatttgagtaagggccatgggggaggggaagccacccagtaattacctgcccttatttttttgtaattttctttctttctttctttcttttttttttatctcagctcactgcaacttctgcttcccaggttcaagcaattcccgtgcctcagcctcccaagtagctgagattacatgtgtgtgccaccacgcctggctaatttttgtactttttattagagacggggttttgctgtgttggccagactggtctggaactcccaacctcaatccacccacctcggcctcccaaaatgctggcattacagatgtgagccactacaccccaccctgttgtaattttcatgattataaatctgctgttatgatattatctaaaatgatatagaaagaataagtgtaatataagttaccatatactggtgatttactgcaaatataaataatttttgaaagattggaaatttgtataataattttttgaaagaaattattttctgctttttataagtttgatcaggccctcttgctcaccaacaaaagcaaaatatatacatatttcaacatcatagagagctattgttatattataatgatactttttaaaattattaaatttctaactctttatgccagggagcctcagtcaacctgtcagcttcgtgccttcatttcccccaacgttcatcataaagaaagctataagtagcaagaattgatctttctacggatttgctctgagctgcaaccagccaaggaattactctattgtatgtgtcactgtgagacgtcttgggagaagtcttacagggtgggaattactctgtgctctgacctgtgtgcataaggcctaactcaatgaaaattacacattgcccttatactggacaagtttatgaaagacatccattattattttttaaactatattgggttcctggagatataccttactgttatccttgagtgaattggcttcactttttctttgtcacagaacaaacctgtttacataaactgcatcttcatgtatagatatacaaggacaaattcaacatttgaaaatcacttctaaaaagacatacgactgagcttaaatgacaaaagttggaatagattgtttaggagaagactattggatattaagcctttgctttatgaatttgaatttcaatatatcctgggtgcaatctgtctctgcatatttcagctaaattgtaatcacagcaaccaactaagtgttaacccagccagaatctttcttggatgcttttgagataaatctaaaataaataagacaaaacaaggattaatggaagattaaaagattcacataaacatagctaaatgttaacgattgaagacaatatttttggaagctggggaaaccttttaccttctgtttcttgaggcttaggagatttattcttgggtagttagagactttgattttcctcttttaatgaatgacttcctcctcttccatgctgccttacatgtatttttgtgctataaattttgtaatagcacatttaattgaaaaattttaggcctaccctgtctcaaaagacaggactgtagtcttgcctgaaggtgtccctatactctggtaattcacacaggttagaggtgtgtcccagaccagaaagcaaagctgtaagggtaaaggtcaatagaaaggtaaaggtcaatagagagcctaaagattgacagctctatctcttttaggctgaattcttttcaatatttttctttctcagtagaaacaatctcatttgaggaaaacttgatgataattaacattttataaggcattttacaatcgaagcatttctttcagcatttagagtattgaaaggaaaatattaagtgattaaaaaggcatgtgctttgatttaagggcattgaaagaaatatctatcatttggtcatatctgtgcacaccctccttccctgacactaagattcctagtagactttgattagcctcctaaccatcccaagccaggagtcaaaattcctaaatatctgcctctacctcttggttctttaaggactttcactgacccctgaacaaaaataccttaagaccttaacagaagtatgttaatatcgggtaactgcataatggcattataatcaaaccttttgtctttttaatgcttgaccaattcaatactttacccttggaggagataatgccactggccaggaaacaggaagcaagtctgtgaaagtgttctagcccacttagattcaaatcaagtctctagaatgattgtggctaatactgattctttagcaatcttcacacaatggaatttctttcccttattcccaccttaataagtggtaccaccttttaacaagtccctctcaatccccaaagaaatgtcatctagagctcctgcctcctggtgttttcttcaccctctttccctttctctctctctgctcccactaacatggtcagcagagcattgtcatttctctctaagaagtgctaatatctaactggtttctgacccctctatgatctgtccacactagagccatcagaatctctcgagaacataaatcggcatcttctttaaatcccatcatacaaggattccctgtaggttacaaggaatttacattatataaagcattttataatcgaagcatttctttcagcgtttagagtattgaaaggaaaatatcaagtgattaaaaagaaaatcaaagcctgtgctttgatttaaaggcattgaaagaaatatccatcctttttaatgttaattaaaaagcttccctctcattcacaaagttcctggactgcatcctaactctctcacttttctgactctccttttaatctagtttacaggagtgcccagattaccattgctgtttatgttgctttgttccatagttacatcctacttgtaattcagactcaactcagtcctgacaaaagacttctgttttagctttcctatcttatttcacaattgcaagctttaattgttttatttcctttccttttgctgattttttctactttgtttctctgagcattattttagagccatattagatgagattttttattatttgtaacaactattgccttttattactaatgataatgactgtagtactttaaaagttagtctttaaatgggcctcataaagggtaactttgaaactgatctggtgatttgtacatttggcaaatgaatcaaaatttgaaattgaatgaatttgtcttgatgaattctggccattaaaaaaagatttagagtaactattatctgaatttagatatcagtttttgttccttaagttccttattaaagaaatgtttgaaatcatactctctgccttaaaaatcccaaagtgttctctgggaacataggtaaacaactctagaaagcttctaacagtgatattttatcctttttcttttatcctagtgtacaacctcagttggattaggccaattccctaaaatttcatagaaaggaatttgttttcattgttataaactagagggttttaggaattggcaggatgagagtgggattttctccgcgatccttctgtcaacatttttcatacactattttctaagggactagtgagcagagtactcctgagtccactagaaggtgcatggagtggttgattgatttattgattttcggctaggggatctatatgcagtgctaaactggaccttcttgctcacccaaagcaagtagaaacagttactggattatcagaaaaatatccagattttaacttaacagctgtgtcacatcagggtggtgagcaggtgaatcgacacattttttaatacattttccaaaattgcctagttaaattcttagatgccttttgagtctgagaattgtcattttgggcctgtctacattttaataaataaaccaaattaaatgcattgtcaaaagaacaataaaattaatctagttttgttctagtgttcttacctaaaatgaattaaaacatcaagtgatttcaactcttcatgtatattgcattgttattcagggatcttcaacttttttctattacttctaagagacagtagaactccaaatagtctggatgttatatttctaatcaaaaatgtctttaaaagattatctctttaaaggaaaaaaatttcattttcctattatattttgctttgtcctcactttttctgatcactatatttattcctataactattcagttaattgtacagctttcattgatgacattgcattctgcattgttcaatagagccccttcttaggcactgcttttagtctcatattaactccaatttctttaatccagattgcccttatttactttgatatgaaacataaggccatctgttgagcctgagcttttactatttttgtcatcactatgaatagactggcctccattcatgctctcctgatggatctgtcttgtcaaccataaagagaaaagagttttgttttagctcgcctatcttattccacagagattgataatttcccactcaaactcttacagtttgtgtctcattcatatgaaggcctttctcttcaccctacccatgtgtaggcaaaaaacaagtcaagtggttctgcctccaaactatatcccacaggtgttcgcctcaccacagccatcactcaaaccaagttcccaaaatcgcttacctaggctattgcagcatcttctccacgggttctaccactcagctaatgcactctccattcagcagccagaaaggctttttgttttactttttattggatatttttttttgtcaatgcttgttggcatttccaaagtagttgcttctccagtgcccaatctgggatgtataaggtgaaaagaaaacccagggaactcattgctgcattgttcctcagaggctgaggtccctagcagcctgtcttcatctctccagctttcagaggatacttgtgtttgctttatgtataatatctagagttttaggctgaacatagcaggagggctaggaaaaagtatatcttttggtctagatctgaaagtcctgaatgccatttaaaaatatatatcacattgcatccctgtaccaagcttaaaacctttcagtgactttctcttgctcttaatatacaatgaaaatttacctctgtgacgcataagacccaaataatgtgatcttggcctgtctctgcaatatttatgtgtcagtggctctcattctattcaactggccttatatttccttgaataaactaagactcttttcccactcagaatctttccccatgttgttccctttgtctcagccatttgtcatcaatgctgtcactgcttggctccatttcagcctctggtttaaatgctccctcctttataatgtccttcccaagccaccttatctcatattcttctcttactttcctatgtttaaattttcttcagaaattaatataactcatatttttccatcgttacttttcatagtctatatgaacaggttcccaactttgccttttaatcttttgaaaggtgcatttaatgaacacctcgatggaagatggtagtatgttgtaatcaaccatttcataaagaaatacaaaaaaagcccctgagttatagatcactatgtcatcacgggcccagttgctagttttggtttgcttatttttttttaactattttttttttaaattatactttaagttttagggtacatgtgcacaatgtgcaggttagttacatatgtatacatgtgccatgctggtgcgctgcacccactaactcgtcatctagcattaggtatatctcccaatgctatccctcccccctccccccaccccaccacagtccccagagtgtgatattccccttcctgtgtccatgtgatctcattgttcaattcccacctatggtgagaatatgcagtgtttggttttttgttcttgcgatagtttactgagaatgatgatttccaatttcatccatgtccctacaaaggacatgaactcatcattttttatggttgcatagtattccatggtgtatatgtgccacatttccttaatccagtctatcattgttggacatttgggttggttccaagtctttgctatggtgaataatgccacaataaacatacgtgtgcatgtgtctttatagcagcatgatttatagtcctttgggtatatacccagtaatgggatggctgggtcaaatggtatttctagttctagatccctgaggaatcgccacactgacttccacaatggttgaactagtttacagtcccaccaacagtgtaaaagtgttcctatttctccacatcctccccagcacctgttgtttcctgactttttaatgattgccattctaactggtgtgagatggtatctcattgtggttttgatttgcatttctctgatggccagtgatgatgagcattttttcatgtgttttttggctgcataaatgtcttcttttgagaagtgtctgttcatgtcttttgcccactttttgatggggttgtttgttttttttcttgtaaatttgtttgagttcattctagattctggatattagccctttgtcagatgagtaggttgcgaaaattttctcccattttgtaggttgcccgttcactctgatggtagtttcttttgctgtgcagaagctctttagtttaattagatcccatttgtcaattttgtcttttgttgccattgcttttggtgttttggacatgaagtccttgcccatgcctatgtcctgaatggtaatgcctaggttttcttctagggtttttatggttttaggtctaacgattaagtctttaatccatcttgaattgatttttgtataaggtgtaaggaagggatccagtttcagctttctccatatggctagccagttttcccagcaccatttattaaatagggaatcctttccctattgcttgtttttctcaggtttgtcaaagatcagatagttgtagatatgcggcgttatttctgagggctctgttctgttccattgatctatatctctgttttggtaccagtaccatgctgttttggttactgtagccttgtatagtttgaagtcagatagtgtgatgcctccagctttgttcttttggcttaggattgccttggtgatgcgggctctttttttggttccatatgaactttaaagtagttttttccaattctgtgaagaaagtcattggtagcttgatggggatggcattgaatctgtaaattaccttgggcagtatggccattttcacgatactgattcttcctacccatgagcatggaatgttcttccatttgtttgtatcctcttttatttccttgagcagtggtttgtagttctccttgaagaggtccttcacatcccttgtaagttggattcctaggtattttattctctttgaagcaattgtgaatgggagttcactcatgatttggctctctgtctgttgttggtgtataagaatgcttgtgatttttgtacattgattttgtatcctgagactttgctgaagttgcttatcagcttaaggagattttgggctgagacaatggggttttctagatatacaatcatgtcatctgcaaacagggacaatttgacttcctcttttcctaattgaatgccctttatttccttctcctgcctaattgccctggccagaacttccaacactatgttgaaaaggagtggtgagagagggcatccctgtcttgtgccagttttcaaagggaatgcttccagtttttgcccatttagtatgatattggctgtgggtttgtcatagatagctcttattattttgaaatatgtcccatcaatacctaatttattgagagtttttagcatgaagggttgttgaattttgtcaaaggccttctctgcatctattgagataatcatgtggtttttgtctttggctctgtttatatgctggattacatttattgatttgcgtatattgaaccagccttgcatcccagggatgaagcccacttgatcatggtggataagctttttgatgtgctgctggatttgttttgccagtattttattgaggatttttgcatcaatgttcatcaaggatattggtctaaaattctcttttttgattgtgtctctgcccggctttggtatcagaatgatgctggcctcataaaatgagttagggaggattccccctttttctattgattggaatagtttcagaaggaatggtaccagttcctccttgtacctctggtagaattcggctgtgaatccatctggtcctggactctttttggttggtaaactattgattattgccacaatttcagctcctgttattggtctattcagagattcaacttcttcctggtttagtcttgggagagtgtatgtgtcgaggaatttatccatttcttctagattttctagtttatttgcgtagaggtgtttgtagtattctctgatggtagtttgtatttctgtgggatcggtggtgatatcccctttatcattttttattgtgtctatttgattcttctctctttttttctttattagtcttgctagcggtctatcagttttgttgatcatttcaaaaaaccagctcctggattcattaattttttgaaaggttttttgtgtctctatttccttcagttctgctctgattttagttatttcttgccttctactagcttttgaatgtgtttgctcttgcttttctagttcttttaattgtgatgttagggtgtcaattttggatctttcctgctttctcttgtggacatttagtgctataaatttccctctacatgctgctttgaatgcgtcccagagattctagtgtgttgtgtctttgttctcgttggtttcaaagaacatctttatttctgccttcatttcgttatgtatccagtagtcgttcaggagcaggttgttcagtttccatgtagttgagcggttttgagtgagattcttaattctgagttctagtttgattgcactgtggtctgagagatagtttgttattatctctgttcttttacatttgctgaggagagctttacttccaagtatgtggtcaattttggaataggtgtggtgctgaaaaaaatgtatattctgttgatttggagtggagagttcttagatgtctattaggtccgcttggtgcagagctgagttcaattcctgggtatccttgttgactttctgtctcgttgatctgtctaatgttgacagtggggtgttaaagtctcccattattaatgtgtgggagtctaagtctctttgtaggtcactcaggacttgctttatgaatctgggtgctcctgtattgggtgcatatatatttaggatagttagctcttcttgttgaattgatccctttaccattatgtaatggccttctttgtctcttttgatctttgttggtttaaggtctgttttatcagagactaggattgcaacccctgcctttttttgttttccatttgcttggtagatcttcctccatccttttattttgagcgtatgtgtgtctctgcacgtgagatgggtttcctgaatacagcacactgatgggtcttgactctttctccaatttgccagtctgtgtcttttaattggcacatttagtccatttacatttaaagttaatattgttatgtgtgaatttgatcctgtcattatgatgttagctggtgattttgctcgttagttgatgcagtttcttcctagtctcgatggtctttacattttggcatgattttgcagcggctggtaccggttgttcctttccatgtttagtgcttccttcaggagcgcttttagggcaggcctggtggtgacaaaatctgtcagcatttgcttgtctataaagtattttatttctccttcacttatgaagcttagtttggctggatatgaaattctgggttgaaaattcttttctttaagaatgttgaatatcggcccccactctcttctggcttgtagggtttctgccgagagatccactgttagtctgatgggcttccctttgagggtaacccaacctttctctctggctgcccttaacattttttccttcatttcaactttggtgaatctgacaattatgtgtcttggagttgctcttctcgaggagtatctttgtggcattttctgtatttcctgaatctgaacattggcctgccttgctagattggggaagttctcctggatgatatcctgcagagtgttttccaacttggttccattctccccatcactttcaggtacaccaatcagacgtagatttggtcttttcacatagtcccatatttcttggaggctttgctcatttcttattcttttttctctaaacttcccttctcgcttcatttcattcatttcatcttccattgctgataccctttcttccagttgatcgcattggctcctgaggcttctgcattcttcacgtagttctcgagccttggttttcagctccatcagctcctttaagcacttctctgtattggttattctagttatacattcttctaaatttttttcaaagttttcaacttctttgcctttggtttgaatgtcctcctgtagctcagagtaatttgatcgtctgaagccttcttctctcagctcgtcaaagtcattctccatccagctttgttccattgctggtgaggaactgcgttcctttggaggaggagaggcgctctgcgtttcagagtttcccgtttttctgttctgttttttccccatctttgtggttttatctacttttggtctttgatgatggtgatgtacagatgggtttttggtgtggatgtcctttctgtttgttagttttccttctaacagacaggaccctcagctgcaggtctgttggaataccctgccgtgtgaggtgtcagtgtgcccctgctgggggggtgcctcccagttaggctgctcgggggtcaggggtcagggacccacttgaggaggcagtctgcctgttctcagatttccagctacgtgctgggagaaccactgccctcttcaaagctgtcagacagggacatttaagtctgcagaggttactgctgcctttttgtttgtctgtgccctgcccccagaggtggagcctacagaggcaggcaggcctccttgagctgtggtgggctccacccagttctagcttcccggctgctttgtttacctaatcaagcctgggcaatggcgggcgcccctcccccagcctcgctgccgccttgcagtttgatctcagactgctgtgctagcaatcagcgagactccgtgggcgtaggaccctccgagccaggtgcgggatataatctcatggtgtgccgtttttaaagctggtccgagaagcgcaatattctggtgggagtgacccgattttccaggtgagtctgtcacccctttctttgactcggaaagggaactccctgaccccttgcgcttcccaagtgaggcaatgccttgccttgcttcggctcacgcacggtgtgcgcacccactgacttgcgcccactgtctggcactccctagtgagatgaacctggtacctcagatggaaatgcagaaatcacccgtcttctgcgtcgctcaccctgggagctgtagactggagctgttcctattcggccatcttggctcttcccccctagtttgcttatttttaattcattgattaattcaactattatttaccaagtgcctgttgtgtgtcagacactattctagttgtcagtaatacagccataaacaaaaatacgttactgcccttatggagtgtacattctactggagggaaaataatacacaaatatgaaatgaatgcataatatattatgtgatgcaaataaaaaataaagccgttgaagagaagagaaagtgattggagtaggctgggaataggaaagtgaagaattttttacattcaatggtccagaaaggtctctttgtcatacagtggtatttgagcagggatcttaatgaaattgagagccagcccaagcagatatctaggggaagcaaagggaagactaaggacaaatattctgagactgaaatgtatgtgctgttattgaggaacaacaggagactgatgtggctggagcttagggaaggaggaagcaatgctaagagatgaggccagtactaagatagccagaatgagactattgatggagatggttgacagactttgcctgtgacaaactgcatatgcttgttacacatggccactcttaatgttggttgattaagagtactgtccattggaacatggcaacagtttcaccagtagaagcaagctgtgtggtgagatttaactcaaaacattatttgataactaagttctagtaacaataatacatacatgatacccataatgcctgatttccctacttgactctaggaaggtagataggatgaagagaaagtaaagataattagggcatattataaaaaagtaattagaaatagttctaaaaggaaataaactaattgtttcaaagttatttaaaattcaaaactcacagttgtttaattgctttcttacattgcaatttcgccagggtgagcaactgaatcaagttctgtggataagtggggggaaaaatgaatagagaattaaagtattccaaaaatactgaatgggcgtttaaatgtgtgcaaccttttttatttcttaattgaaatatgaaagctgtgcttagtgcacaaatgagtgttatatcctcattttgtagatgtgggataaggattaaatgttatgtctaatactacgaagagaacacgctgctgttctggacaggaaattcaaaaggaaataagtgcctggtttcactctttggtataattatcaatttccttcattcaccaaggctcatataatgaagagctttaaatctactgttggccatgttcaactgaaacagaagtaaaggttgcatcctctctttcccttactgtagttcctcctgaaatcagaactaaggaaagccagtttccagaggtctttagtaaacacagtctcagaactagacttccttttactcttatgccatccatttctttactagtaagctggaattaatgttgcatctcctctgtcatcctatacattgtaccacaaaatatgtataggaaaacacaaattatgaagtgcttgaaatatattacttcctgttttagaattattatgattgtaaactaggttgtgctgaccttaataaaccactagagattctgtaatttcaccttgttctttttcatacataccctttcccatatagacttttccctttatttgaaatgccttcctttcccatactaccatgcttggcctgacaaactcctatttatctttctgggctgaggttttaagtgatctcaccctgtaaactttccctaatcatcctctctgggttagatacctttttgcacctcagctgtgttgattttcattttagatatgtcttctgtagcagaccacaaactccttgagagcaggaactgtattttcattttccttatattcacaatatgtaccataatgccaggaacatagctgggtgctacaaatatttgttgaataattgaatgacacaatttcaaaacaaatatattatttaaccaaataagtaagtaatgagaaagttacaaattctaaggtcataaagatacttgtaacttagaatgccttttaaagtaatgtactccagtgttatcataagtaattgaaataagcctacacatagtttactcaattattttgatgttcattgagatgagttttgtttccagtaaatattctgaacatatgatgcatcttagtttttcatggtagttatagagaatctatagcaatttaaaatttgaataagaggttgggcgctatggctcactcctgtaatcccagcactttgggaggctgaggaggatggatagcttgagctcaggaattggagaccagcctgggcaacatactgaaaccctatctctacaaaaaatacacacacgcacacacacgcaattagccaggcatagtggcgtgtgcctattagtcccagctacttgagaggctgaggcatgaaaatcgcttcagcccaagatatggaggttgcagtgagccgagatcatgccactgcactccagcctgggtgacagagggagaccctgtctcaaaaaataaaatttgaataacgtttcttgatttctttccattaaatattgacattgaatcaaaagaatctgaaattatttggtttaacatattaagttctatattttcatttttgatctatttaaattgaatgttaattataatctgcacaataaatgtgatcattatgagatggcatttgatagtgaagaggatagctttaccagaaaagaaaaaagtcctatttttttcaagatgtggcaacaactttacaactatatactacaacaaacatgactgtgacaacggattttagcatcactttctttcaaagataaaataggttcccctaaaaatactccatcttcctaacattttaaagaaggatcgagatgaaatttataatactatcattgggagccttaagaattttacagaacttctcagtactgaaatcactactctctcaggatattttttcatgtgttttaaaacacgtgctgtagtgaaagattatactgttagacttttgaagtactggtgaaataacttgtttaactcttctaagttatatatttgatatttgctgccttctcaacatcacagttgagttgaaaaaaagtagtggctttcttacaatgctattgaaatagcattatttcaataataatgaataacaggttgggcatggtggctcattattatttcaataatagtgaaataatgctatttaatggccttatttgcttgtcttctttacaaatcagtgattgaacagtatagggaataatcaatttttatcgtacctcataatttatagaaaaagtattaacattttgctgcatgtgcttactacgttagagaaaaaggttataaatggatgctatagcaacatcctggcataatccttcatttattgacagttttattgaatattgtgatttttattgatttagtaataaatttcatttttgaaactacttttatctacttatacttgtgccgacggaaagtgagaatgttgtaccatggcaattattagagaatacattttaatccagttaagtgattgcatttttttctttccactctccaagttatctttgtttgtatttaagagtattaaactcatttcctttttttccacatactagagactgtggtaaagttatgtggtgttttctgtaaaataagtttggagccattaactgttgctttactgtcaaaggacatttatgtattccaaactgtttcttataataaaaccgtacaacaacaatcaagttaactaaaaatctcctttaaaagaatacatacacataaatacacacacatacatctttaaataaattttaaaaaacgaaccctgcccctagtttcacatttattactctccattgaagttgctttaaatccaccaaaatttagagacacacaaaatatgggggataaagaacttcccgttatttgagtatgaactatagttctgcgcaaccttaaactaagaaaaggttggtgtaatcattccactttgttctattcttagacttcgtcctcagtcagaagttaataatagagatatgatgccaccggaagtggcatctccttccttttttttctttaccatgcagcattctacttttctctgccattcataacattggcagaagggaacttgataatgagagaaaagatttttctccctgcaagtaatagggactcttacctgatgatcacttagggcagtactcaaagtgtgatcccctgggcatccacatcagcatcaccaggggcttgttagatacacaaatatctaactctgagggtgaggcccagcaaatctgtattttaacaagcctcctggtgattgtgaagaacactaaagttagaggactactgatttagggaatagttatcatgacaatcacgttaatcacccattagagagtgcacagataattctatgctatccttaaagatcttctccaaatttattgtttaaatgcagggaaaaacgatgtaatgaggtactgtacctttggacaaattgcaaattaggaaaagttgtccctgaaaacttttgactgtggagaatttacctaatgagttacggcgtgaatttgagaacttcaaagactgagagcttgtactggattgactagcttcctccaaaatgttcccagtggcagtttcacgtggaactacccaatgtgaccttagctagaaagagggtttttgcaggtataacagttaggatgaggtcatactggattagagtgggccctaaattcaatccctggttccctactgggaaggtcatttagagaggcatacatggaagaaggttgtgtgaagatgaaggcagacattggagttaggctgccacaagccaaggaatgtcaaggattgctgccatccaccttggctaggagagagacatgaacagtttctcttccagggctttcagaaggaaccaaccctgctgacatcttgattttggatttctgacctcctaaactattatggaataaatttctgttgtttaaagccaaccagtttttgcttaattgttatggaagcctggggaaactaacagagggctttgtagggtttatgttttaagagtattctttgccttgctcttagtctataaagaccttctcattaaaatgtgctttgtaaagaaatatgctctcatccttcccacctcatcagttcctccttcctcttctgctatatccaccccacacatttgtttgttggttttaagtttcattgagttataactgacaaattaaaattgtattattcaaggtgtacaaagtgatattactctccactgaagttgccttaaatccaccaaaatttagagacactaaactacattcagaaaatgtggggcgggggagaaattcccctgtttttcaaatataaattatggttatgtttctgcaagaacccccaactaagaaaaggttgttgtaataattccagttcattctatccttacacttcctcatcagtttaaggatattcatatccatcacctcacacagttgctttcgtatgtgtgtgtgtgtgtagtgaggatggttgagatctactctcttagcaagtttcaagtatacactacattattattaactacagtcactatgctgtacattaggtctccagaaggcagaaggcggaaggcttttatcgtataattgcaagtttgtgcccttcgaccaacatgtccgtacttcctttttttttttgagatggagtctccctctatcacctaggctggagtgcagtggctcaatcttggctcactgaaactttcaccttctgggttaaagtgattctcctgcctcagcctccccagtagctgggattacaggcacgcgccactacgtccagctacttttttgtatttttagtagagacagggtttcaccatcttggccaggctggtctcgaattcctgacctcaagtgatccgcccgcctctgcctcccaaagtgctgggattacaggcgtgagccacagcacctggcccccacacttttgaaggatctttgaagagtctaagttcaactgggaaagtcatagtcttatttattgttggggaaaaagaaactctactgggagcatattaaatacaaagcccttttcattgtggagaaataaagcatttgtgtatttttagttagaaattatgcatattatctcccattcgtctgtctttcaataaaattttaagttgaggtgtattgtgtttcttaagctgctttatactcatttgttcaaatacataccaagcctttaattagaccatttggctattttatttgcaaataagtaatactattaagtgtatctgtgcctccttctgttgctgtttcaattgtgtcatgaatgcactgaccctccatagacagggttaattggagtgtgggcgtgagtgcatgcatgtgtgtggctgcctgctgtagacttaagataaagaatggagatttaccaagcaaagcttttatgtcttaaaaataaaacatatgtaattatgagtgatatatttaggaatcctgccttaataaaattaatttgcatgcactctaccttatagtaatagttctgagtgactttgctattttttcccaaacagcttagcaaagcatctatattgtaatatgtaagtaggcatttttaaaagtcatacaaatgaaaagaaacatttaataagaatacaactgtgctaaaataatttaaatgacttgagagatctgcctttattatatgtagatttatgctatttctctagccagtaaaacaaacatacaaacaaatccctatttcattctttcagcacttctactatgtgccaagtatcagttattaaaaatagagaagaaattcagagtcttgctttcaaagagtgatagttttaacagggaagaggaataatagacagttaagaatctgcttaaggagaaaactgggcccttgggcagggggaaatttagaaagggtactgtattggcttcctagggctgttgtaacaaattaacagaaacttgatggcttgaaaaaacagacatttattttgccacggtcaggaggctagaagtccaaaatcaaagccccagcaaggccacaccttcctctgcaggctaagtgggtggttcctcccttgcctcttctagcttctgatggcccagagcattctttggcttgtggcaaaataattccaatctctgccttcctctacatgactttctttgtgtctctctgtcttctcttctgtctctcttattaagaacctgtatccttggatttagagcccaccttaatgcaggatgatttcatcccaagatctaacttaattatgtctataaagactcttttcccaaatactgtaatatccacaggtattggatggacttatcttttggagaccagcattcaacctgctacagccacctagagtaggtgacacctccattgcagatcgggtttgaggagagagggaaaacacatagtgaggtatcttaggcatagacaatgtgagatgtgcaagtctttcccattgacaccaaaatgcctggcaaatagcaagcactcagtgactgtgggaatattaatgaaatacactcaatgaaaatggccactagcaggtggacataagtctagtaatcaggagaaagtcctgggttggacagaagaatggacaagattgccaatgcaagctgtgtgagaagcgaaaagagtaaagcaatgaccaagtaatgtccatccttgagaaattctgaagatgaggctgagaaggagtttgtggaaaaacaatagggaaaccagcagagaagggtggcataggagagaagagagaaattaatctttaaaaaaaaaaaaaggaaggtgtcagattaggttaagctgattaagtagtatgaaacctgcatttgggaactttgatatacacagtttcagaagttaaaagtccaatttttcatggattaaaaatggtagaaagtttgacaaacatctagaatttttttacctaatggacaaagaaattaaaccaatacatggccttcccttcataacacccaatgcacatgtttcagagaaagttcttcaaaaattctgtgtgaggacacatgtctgtgacctgtcttctttgaaatatgagacagactgtgcaagttgccacagattgttagagccgctgtgctggagtcgtctacttgtaacctctcttctcgttgcaggacatcttattatattcacagtgggagaatccagtttccaaactgtaattctaactctgatcttccatgtaaaagcatgttctccagggatcctactgaatccactatgaaacatcagtcaggcctacataaagtagatcagagaccttcctgatcagtagtgtgaaagatcttgagaataaaaggagccttaatgtttatacaccatagagatttaaaactgcattatactttgaagccatcatcaccttttttctctgcaatgacatctgttgttaagtgcatttaggttttttaaggttaataactgaaatacccggatcgctgtaatctcaactgttggaaagacactgaataaatcattccatggtatgtcgtcaatataccatcaattttgccttttcaattccatgttaaggagtggttgaaccctgaggtttcttttgaccacttgatattcccccacaaaatttttgaattagtcacaatggtaactatgttcaagcgtgcttgcgtcaactaacatttttttaatttaaggatggtaaatttgggcattttagatgtctttattttaattgttaacaatcaataagcttttaatccttttcttagctttatgaactgagattatggtaagtatgtttattttaaaaacttaaagtggatttactattcgttaccttaaaaagttgagctttaaaattaggtgaaataaatgatgttatttaaaaatcaactttttggctgttatgatatttttagattgggaatttaagaatttaaatgagattatgaaggaagtcatttaaaattttgttttataaatactttgtgttagacttaataaatcagaatttaaaagtatacagattgataagaaatttttaagttgaagcatatacaaaatctgattatataattttatgtcacttataataactgataacctataaacttagaactaacatcaatcaacaggtcaacagcttttgtcttagggttaaaccatgcaatgttatagatcttaaaaaaaaattttacctaactgctattttgacatcaaattcaattaagaaataactccaagacttcagcacatcttagaaaaattcaatagtgtatattttctactcttttatattcacaaaacacatatatgtaactaattagaatttaataagcctttcacccgagagaaaattttggtctctgtaaagcttttatccttgccctacttttaatgtcactatcaagtatgttattctgccgggtttttaaaaatacaattttatgttattttcctgcatgttgcaattatgcggttttcttacatgaatattgctttatggagagaatgctctttgaaattttagaaaaaaaatgaatattgtttctatagaaataggaatactctgagcaatagattgggaaatgagacatattcagtatgaatctgagtctttgttgttcacactagatgaagggtaattttataaaaataaggccaagaaaaaaatgaaatatgggatttcatagtttatctatgataagtcaagccattttattctgccaataactcagcacaatgtagcctcaaaccactctacaccactgtgtatatgtgtgtgtttgtgcagtgatatgatttgtcaaggcattctggcgttaaaaatttgagagagatttttactggcttttggttgtaaatcatgttatttcataaagaaaaagataagatcttaggtaacgtgagttcctggcacttctgttcagggtttatctcattccctacaatttcccatctgccactcatcttcattttatctccatattttctatcctctatcctccttctctgttgtctttttactttcctacagtttcctcatgcataatcataaaagtctcaatttattattactccttttgaaaatttatccctaaagcatttataatttttttattttcatttatttaatttttttgaggcagagtttctctctgtcacccaagccggagtgcagtggcacgatcttggctcattgcaacctctgcctcccaggttcaagtgattctcctgactcagcctcctgaatagctgggagtacaggcacgtaccaccatgcctggctaatttttgtatttatagtagagatggggtttcactatgttggccaggctggtctcaacctcaggtgatccgcctgccttggtctcccaaagtgctgggattacagacatgagccgccacacctggcccatttctcatttattaagtgataattaactaatcaaatatattcatgactgtcaatcaagactcttgaacatctgaggaaacccatgttactatgctgaatccatggtatttccagcacaaaactttgacccttaacaggaggccagaaatgcaaagtcaagtaaattgtgcccctaccttctgtgaaatggcctggctggatctgagctcattggattcagcccatctagagactcagtcatgttcatgaatgtacacacccagacatttttgtgtgtagaaatgtgtgtacaggagaaggcttgagtgaatcgtaagggaaaggaaaggaggagaggttgcagatgtgagagaggagatcattattagaccaaactcgcaacagattgtctgagaaggacctgaagcacaggtggaagattagccttaggaaggaaagggagtacttttcctcttaaacagaaaaggaggagtgaaccaataaagataaggggaacttttgaggtaaatggaaacagagttgaaagtgatcatgttggatgacatctatttcttggtgatagtgagaaaaaaaaagcaaggggtgggactgagtcttgagaagaaccagaaaggattcatctaactcaaatgcatactgcattagtcaggattctacagagaaacagagccaataggatgtgcatatatagaactatttattttagggaattggctcatgtgactatggaggttgacaagtcaaaaatctacagagtgggacagcagtctggagactcagaaaaagttgatattgcagtgcacatctgaaggctgtctcctgctgaattccttcttggttgggggaagtcaatctttgttctattaaggcctttagctgatgggatgaggcccactcacattatggagaccagtctgctttacacaaaggctactgatttaaatgttaatttcatacacatacacacatacacacacacacacacacacacaaaataataataataatatcacagaaacattcagactaatgtttgacccatggcccagccaagttgatacataaaattaaccatatgacacatacgttccattagctgccaggctaactccttgttcttcaaaaatcagttgtcctgtcttctctcaaggagaccttcctgtaaacctttccctaggtgggagtttgcctttttgaactaaattgccaaactaccctgtgtttacttctgtcataaaaacatctttctttaattccccccaccaaaatctaagccactgagtatagtcatttagggagttttttcgttcacatctgtatctccaacacctaaaatgtccccaggtgcattgtaggcactcaataaaagtgatggataaatgaggtaataagttgcatttattttctatcagttttactactctctgaaagcagcgacagagtcttaattacttttttatacctatgaggtaataagttgcatttattttctatcagttttactacattgtgaactctttgaaagcagggacagagtcttaattacttttttatacctaacatctagcacaaattaagagctcagtaaatgcttactacagaaataatggaagtgtgacttaccaaatgtttactctgtatttttccttgtccctgaatacttcacttttattccaaagatttttttaaaaaccacattctgaagaatttgcacagatttgcattgctgtatctggagaaattatactagcaacaagggttataaatcacaaaatactggtggtaggatcagacatcagcagtttttaaagacctgcgggtaattccagaggtcacaaatccttgcactagatgcagttaaagtggggaagttgttgaggaagtttaaaaattttgggtacctctatgtaaggcagagctacatggggataccaggttggaagctttgagtgggctccaggggaggagtgaaggatacctaaagaggagaaagaagtactgaaaagaaagctatgaggtactttgtaagcacctctgagtatttaccatgtatcaggcacagtactaagtgctttgcattcattgccacttgtctccataatagcctttgtaaggtatatagtgttacattcttttcacagataaggacactgaggttcggttaagttcctcacatcaagccaacagaacagcaaaaaattcaagcctatattgactggctacaaagtttatgttctttctgatacatcagcagttctcaactctaactacagagcaaaagcacccaagtctgtaccccacttatgatcagttatatgaaaagttctgagtaagaggcacagtcctccatatttaactttaagtctcatcagtatttctaaaatgtttccagggctgaaaaccactatcagaaacactgtagatactcttccattttgccaactctcatactgtgtgcttacaggtgttctcacccaggaaaagagacttgactcagtttatgaatggcgcaccctaaactcagatgaaatattctgaacagactgagtgtggtggctcacccctgtaatcccatcactttgggaggctgaagcaggaggatggcttgagagtccaggagtttgagaccagcccgagcaacatagagagactccatcttgacaaacaaacaaaaaaaaagaaaatcttgaatagtcatgcactggccctgtgatttgaggtgctcttaattggtggctgctttgatgttagcaagagttttatcctgtttaatttaaattaatgaaatggattacatcatgcctagtctctaactctctgcaaagggtcctgctcagggccgttctgccattgtaagctttctagcacagctgatgctttttcaacataccccattccaaaaagtaggtactacctgggccacacacacattcaccataaaaattaaattgaataggtatcaagaaacaattaagtttcatatcagattttcttccattaattttggcaacacagcgttcatttttctttgtattataaaaacttgttgctaatgtccagggtcaccaacctcatgtgaaataaaatgcatttgtgcaaggccctgacatcatatcaaaattcagtcagttatcttaatgcataatatatatgtaaaaaatcaagagagactggggaagaaaaacacaaaaatgtgagtagaatggtaaaagttgtctaccctggctgcacattagaatctgggataaacagatttagataaacagatgctcagaacccagccctagagattctgattcaggcccagtctgactgggccaatcgttgttatccctaagtgattcaaatctgctgtttttcttacctttctcagactttccactgttgtagaaaatgtgtattaaatgagaatactctgattcatatattttctgtcaaccatgataatgatgatagttactctaattgagcttgctatgtgctaaccaattttcctaagtgttttacatatagcagctcatttagtattcaccacagctactgggtgaggccaatattattatcatctttttgcaaattaaaaaaatacatttatagagattaagtaactcactgtaaggcacagcagaggcggaatgtgagttcagggcttctagcaccccgtactcttagaaacttaagtgagtttatgaaataaaccatattatgtctccccagccttcccatcaggttcccgtttcctcttgacttttgcagagtctaatctaggtataggctcaccagttctactattaggtgcctaggaggttctcccccacttccatctaactcccacacctgctgtatttaccttgcagtggaacagaaccaagtctttgagattcaaggaaatacagctaggtggttcatctgctttgggaaagtggcctctttattcctgaaaacagtagaaagaatgtaaagcttaagaatcacacagatataagatcaaatttatgtactttcacttattaatcctgagcccagggcaagtcacttaatctctctgacatcccatttcttaatccataaaatagaaataatgatttctaaatcacatgatttaaaaggatgaagtagaataacatatagaaggttcctttgcacacagtaggtgctcagtaaacatgggttccttcccttttgctctgctcccatgtcacatatacaattaactttgcacctggcaactcctgtttagcttctatatttctgctttcctttattcctttattcctctgtgtttaaaagtctgtgctaagtagccaaagttttgtatgagaaaggtctgctgggcaaagcagaaagctacacacataacacaactttagggccctaaataaatattaggaacaaaaatgcctctcaaaactttatagcctctcctgcttccctcctctcctgccactgctaccaccaatatatccaaatgcctaaaatcccgttttaagatctctcctaaggaacttatgaagaacatgcattagtctcaataggcacctgttacctcattttgtttacacatggctacatgttgtcatactctatatgctataaccattaattgacatgagactgggtaaaggactggataaagggtaggctcttttttattcttctaattgaaaaattaaaattgtatacatttatcatgtacaacatgatgcgttgcagtatgtatatattgtggaatggctcaatcgaggtaattaacctatgcattacctcatgtaggtatcattttttgtggtgagaacacttaaaatctatttttgtgattttcaaaatatcatacattgttactaactacagccaccatgttgtacactggatcttttgaacttattcctcctgcctagctaaaattgcgtatcctttgaccaatccctacccatccagcccctaataactaaccaccattccagtctgtagtctcgagttccactcttttagattctacatataagggaaggttcttcgctcatttgtgtgtgtgtggcactgaaatgtattagaatgtgctttcacacaagcactggggcttgcccatggtgctcttcatgtttaaagtatggacattctgccagttcttctagagcagcgacaccaggaagctgacagtgaagtggatgttacatacaagctcatcatctgccatctttagggggccaatggccatggccagacatagcccccttttcatctggagcttgattgtgggctcccacctcatcaactttggccaacatattcccgttgtgtgtcagcagggaagggaacttgccagccttatttaggcctgggccaaggatccatgggatctgcttgatctgagactccaaggccaaatggtaccatacctcttggccagcctcttgttcttgtcgagtttctccagtgcctccaggtccatacgggggactccacaaccttggccttgtcacagtgctgctggcccccaggatacacacagaggagtggaagtgggttgtggacttcagcccaatgatgccccagaagtgtttgtccttcttagagtcacagtgagcaatggtctgggccacaccctgcaggaggcatcgctggggccgtccaggaacttcacacactcacatgtttttggaaaggtagagctgcagaacagcttgaagccaacagaaatacctgtttttattgttattattattattattattttaacagtctctgtcttccaggctggaatgcagtaatgatgtgatcatagctcaaggcatcttctaactcttgggctcaagtgatcctcccacctctacctcccaagtagctgggactacaggcacaagccactatgctcagctgatttttatttttattactatttttgtagacatgggttcttgctgttttgcccagatctttctatttcctggcctcaattgatcctcctgcctaagcctagaaatacctcttcaagtttcaattatctctagttactttattgttcatgagaaatgcctgtttttcttaatgtatggtagtctggttgaacaagtcataatataatgcttttactaaaatagtacaacaacgtagaaataattcttttctataggtgtccggctcctcagaggcatagctgatattgtatctgctgtgaaacatttcttctctctttctagagtctctttcctgtaaggtgaacttcttttgaagtttcattttgataaaattccatcactcgtttcttgtcaagcttttgaacttcatcttctatctttgcattttctgatacactcttgctttggaatattttaatataatgcataagcttcttttagtgaatttactgtatatttgattattttttcaagagtttgtaaggaagattttacttgatgttatacgtgattcttcaaaactcttcatctaagttgtctcttatttctgactctcttactatatccaacacctagtgaccactgtccatttcatctctaaggacagcaaacaaatctgtcatcttcaacaaacattcagtcaaatgctagatctgatgttccttctcatgtagaattttttccaaacatggtcttgaaatttcaacctcctttttttctatgtaaattaagaccactcagtcttcctttacctttgtataaaagtaattttccatttccctaaagtttggatttttcatcgaaatttttctttaatactatctatagctgtgttttacttttctgacataaatttcaagattattctggtttagctacttgggattggatggattctgatttatccttcaaatgactgtattatagcctttgtgtaacatcaaccatcatgccatcttcttctggatagttagatttttcttccccattttcccctagaaagtctattttaaccacaataaagagtaggactaatcagttcttaaatatctgtctccagacagcatttcaaacaactttatttcaagtctggccttcaaccaagacatttccagtgcttaatgacctctcttaaaatgccagagcctgtcagaaattttaagtttttcttcatctggagcagaaaacatgccatgatgttctttctccctacatttataaagcaagctttagttctgtgaaacccaatgagagctgtccatagaaccatcttttggggaaaatcctagagtcctgatcctgggctcaaacctgcaggcataatgctcacagagctgcatggagccttcaggataagccagtggtaaagctgtgtgactattgcatgtcctgtgtcacacaagtgactgccacagaactgcctctgattgagaatgtcctattggtcactgtagtcttccaggaacccagaatatcccactcagatcccaagtcagcaattgacaatcaagacaaacttgcagggagggaatcaagggtatgaacacatttttcctcatctttgtttcatcatggaacacaaataaattggtttgtgatatatttttgtttttgctttgttttgtttgtttatttatttatttattttgagatggaatctcactctgtcacccaggctggagtgcagtggtgtgatcactccaacctcctcctccctggttcaagtgattctcctggcttagccttccaattagctgagattacaggcacatgccgccatgcccggctaatttttatatttgtagtaaagatggggtttcactatgttgcccaggctggtctcgaattcccaacctcaggtgatctgcctgcctcagcctcccgaagtgctggaattgcaggcatgagcaaccatgcccagccgtaaattggtgatatttgtatgatagtcggggaaaatgaatgaggttgtttatgactcactccacctagaggctgcaagggacaaacagcccatgtcttgtcatgcgtgtgaacattctaactttgctggcggtcagcaaactgtgctctgagtctcccacattttgtatcagacttctaggctacagccttagagatacaacttgccttgaaaggtcccaaaaacttctctcccaaaacacaccccaccccagtttattgtgggtcagtaataaatagtatttgtgtaagagtgttgaaataaagggcctcaaaagggtttctgcttgcctttaaacaatgattatgcgtttgtctattctcactttaattttgttcattttagctgtatgtatttggaagccctatttttagttgtatatcttcctgatgaagtgaccctttgtcaccatgaaatgtctctctttatctctgataacatattaatactttgtcttgaagtttaacatatctaatgtgtcttacataggcacacaaatatttttatggtatatcttttaccatttttaaactttcaatcaatatgtgtttttatatttaaagcattttttatataaacagcatgtagtttggtcttggttttttattcagtctgataatggaatattgagtccatttacaaaatttatttttaattttttatttccataggtttttggggaacaggtggtattctgttacatgagtaagttctttagtagtgatttgtgagattttggtgcacccatcacctgaaccccatttgtagtcttttatccctcaccctctttccacccttccctggtgagtccccaaagtccatcgtgtcattcttatgcctttgcatcctcatagcttaggtcttacttatgagtgagaacatatgatgtttggttttctattcctgagttacttgacttagaatagtagtctctcatcccatccaggttactgcgaatgccattaattcattcctttttaaggctgagtagtattccattgtgtgtatatgtataatatatgtgtgtgtgacataccacagtttctttatccactcgttgattgatgggcatttggattggttccacatttttgcaattgtaaattgtgctgctataaacatacatgtgcaagttttttttttttttttggtataatggctttttttcctctgggtagatacccagtagtgggattgctggatcaaatggtagctgtacttttagttctttaaggaatgtccacactgttttccatagtggttgtactagtttacattcccaccagcagtgtagaagtgttccctcttcactgcatccacaccataatctactatgtgttttttttttatttttttattatggccattcttgcaggagtaaggtggtatcgcattttggttttgatttgcatttccctaatcatcagtaatgttgagcatttttacatatgtttgttggccatttgtatatcttcttttgataattgtctattcatgtccttagcctactttttgatgagattgtttgtttttttcttgttgatttgtctgagttcattgtagattctggatattagacctttgtcagatgtatacattgtgaattttttttttcccactctgtgggctgcctgcttactgttccttttgccatgcaaaagctctttagtttaattaagtcccacctacttatctttgtttttattgcatttgcttttgggtccttggtcgtgaaattcttgcctaagacaatgtctggaagggtttttttgatgttatcttctagcatttgcatagtttaagatcttacttaaggccttgatccatcttgagttgatttttatacgtggtgagagatgaggatctagtttcactcttctacatgtggcttgccaattatcccagcaccatttgttaaatagggtgtctttttcccactttatgtttttgtttgctttgtcaacgatcagttggctataagtatttgggtttatttctgggttctctattctgttccattggtctatgtgcctatttttataccactaccatgctgttttggtgaccatggcctttacatttaatgtaatgtttaccgtcattagatttaagtctaccatcttagtatttgtattctatttgtcacatctgttttttgttcctgtgttccttatttgtttgctttcctttgagctaattaaaaattttattatttctttttatctcttccattgatgttttctactacacctcaatggagtgtttttatttttcgttgttgtgtcttaagattgcacacatgcatctttattattgtttacctttaaataatattacaaaaataaccatgtaagaacctttaaaaagtataattctatttacttgctgtcctttgctttcttctggtcatgtattttatttacttataggtaacgacacaaaatgtgttactatttttgctttaaacagtcacaagtttttaaaatatgaatagataggtaggtagatgatgatagatatgtaggtaggtagacagatggtaattttttaaaaggtcttttatacttatccagatatttagtcatttatccactctaataattttcagttctccttgtagattcaggctttcagcaagaattcaccttgaaaactttccttgtctcttatagtatgtatttgctaaaaataaacactctcaacctttctcatcttatttcaccctcatgttgaaagatatatttgttgaacatagaattctagattaagagttgctttccttcaatactttgcagatattgcatcgtcttaaggcagtcaatattttagttgaaaactcagacatcatacctaaggttgttgcctgtgtgaaatgtctttttcctctggctgcttttaagatttaccctttatccttgtttttcaatagtttaatcacaaaatgcctcaacgtgttgttggtggtggtggagtttgttttgtttgtttagttgtttgtttttgaattttcttgcttgggttttacttaactttcttcatacatgggttgatatcttttaccagttttggaaattgttcacctatcatcttttcaggtatttcttctccttgattttctccccgctacttttctgaggctccaattacaaatatcttagatcattagatattttgttacagtcacaggatatctgtcccattttcttcactctttttttttctctagtgtttcagtttggatgattttattgacatgtctcaaatattacccaccctttcttctgctgggttcagtctgctgttcaactccctgaatgaatccttcatttattatacataatttttatttttatcatttctgttttgctctttttgataatgcccatatatctattgaaatttcccaatgttaatgcatgcttctcactttttcattatatctttttaacatatctatcataatttttaaacaaatctctgcctgctatatccaacatttgagccatctgtgggtctgcttctaatgtttattttttatttcatagtcacatttttcagcttcttcatgtgttttataattgtttattgtatgtcagtgggtaaaagcacagaaataaataatatttactcccataaaatggctcatccttttctctatttggctgtgtgtggggtcggggggatgcagggagactggattaatctaatatgattagatatgaatgtaagctttgctatagctttagtgtgatttgtccttggctttagatgtatttggggaagaaatagaaatttatctttaggaagactgagaatagcattgcctcagagatgtctgcgtacttaaagccatcctgccaatgtttctggaccacggaggatctctttcttctttacactccagcaccaagctttccaggtatatggatatctctcttcacttctggagaactgctactgtgcactgaatgaagacctctgcaccttgaggggatctccatcaactctcttgccctgccccagcctgtatcaactacccccaaatattcagtgatgatctgtggaaaggagttaacaggcaggcatggattctctctgtggttgtggggcctcagtattctaatctgtggtacctgtccacttgcaactgttgaaagtgtgttaaggctgggcgcggtggctcacgcctgtaatcccagcactttgggaggccaaggcaggcggatcacgaggtcaggaaattgagaccatcctggctaacacggtgaaaccctgtctctactaaaaatacaaaaaaaaaattagccgggtgtggtggcgtgcgcctgtatcccagctgctggggagactgaggcaggagaatggcgtgaacccgggaggtggagcttgcagtgagctgagatcgcaccactgcactccagcctgggtgacagagcgagattgggtctcaaaacaaaacaaaacaaaacaaaacaaaaaaacaaaacaaaaaagaaactgtgttaatacctgggctggttgtccttatccaactctgtggcaaaggtgctccacctgttgctgtgtcctcaggagtgacaacagctgtagaattcttctatccaagaaaaggttaacctcattttgaaaattaatttctttggatttctttgtgtcttcagctctctgatgtgtttttttaaaatatgattttgagactttttgttgttaaggacagataaatttgatagagaagagaaagtgtggaaaggcacacagttacttttagaacactgcactgtaaatatgggggcaatatggcagtcaggcatgcccctagttagttttttttttttttttttgtgacggagtcttgctctgtcaccaggctggcgtgcagtggcatgatctcggctcactgcaccctccacctcctggcttcaagcgatgattctcctgcctcagccacccaagtagctgggactacaggtgcacaccaccatgccccgctaatttttgtaattttaatagagacagggtttcaccatgttggccaggatggtcttgatttcttgacctcgtgatccgcccacctcggcctcccaaagtgctgggattataggcatgagccaccatgcccggccctgcccctattattttgtaggatctgaggcacaaatacaaagagggacatacaaacaatatgtctaaatatttaaaagctataacgcaaacttataaattattaaaccaaatatgttttcctaccttaatatgtgtatcttcataatgatttttaaggccaagttcaaattgaaattctcctaaatgtggctgctcagagagagagagcacccacacactctgccttctcttcccatccctagttctgtcctgtatctgaaagggccttgcactaaggtgtgtgtgaacaccttagctcattcttccaagattgactgctaccccctacatcacatccccacaaacaaccactcttcaactacccttaagtctttaaggtgtgtatactagaggcaggttcaccttgggaagacagacctggatgcagtctcaacgccttttgagcgggaaactccagagtctcacatgctcagagcttggttagaagagggacactggtatttcttctaactcatagctttttggggatgacatagaaaacagaggaagactacagcagcaaggccctctaacgagtgaggcccagggcagcccgtccccacaacctcccaacccccttgactgtgtcttagggcagtactgatggcaacagaatattttggagctaggtgagcagaccacatagagagggtaaatgtggcaagaaagtaaaggatgccaagaataacctgtgtttctctcctcagggccaactcttacagttggataaataattgaatgtatatatctctctaagtgtaaaaggtagcttcaatgttgatgggatactcttgaagaaatagggtacaatatttctagaagactgatttctccagactcacatattataaggagccaaaactagtatgtaaaatgattcaagagaaaccttacctcaaataacaaaatatacaaatgtggtccatatacgaatcatcatgacaacttgaaagggaaattagttcactattagattttacattgtcttctaacaaaaagcaaatataaaatgactgctaagtaattttacttgtcttgactaggttatgacttaattaatagtttaggcagaagttcaattacaaaagaattgtattttcactttttaagagagatagttttgcctaggaaggaattatttataattatatatgttcagatatttaattccacagataaatgatggaagtcttaatatagggaacaacatgtaatgtcagaataaaaggatctccttagtctaattgaatgttgtacttcactatgtctgtctgatagaaataattacataccttgctgggatttagctttcattttagcattgggtgtacttgtggagaaaaatgaaatatcatgttgcccccgttggcccccacccccaaacacacaactgctgaatttggtgggatcattttggagagatgtttgagaatttgttccctttataaggcagtgctaaagagtgaaggcagagaattacaattaaaatggtggatgggatacttgcttaagtctaccctctccctcctaaaggaactgctataatgacaactaaaaaaagaatgaaaaagaaactcactttctaaagaaaacaggagagaacacaacagcagagagctattgactttttttttttttaatggaaatggaatgaatgagtggtatgtgtttttagctaaacagagatgtagaaacccaggtgtctgcagaggagatgccaaaaagaaacaaatgggaactccattgagaaccctcaaaagactcaaagactggaggcaaaaaggattgctgacgctaagggacagacttgaggctgaaaacaggactgtttgaaattcttaacaagaacacctggactcccaaattccctcctcaactttttgcagcctgacagctacccctctctcaccctgtaagagagatggcggggtattattctctggagtaacttaactatagaggctacaagcttagcattattggggacagtggcagatgaggatgagatacgatatagaaatctgggagacttaagtagaaatctgcgtgccgaatagtaacaaactctactttcccttcaagccttcttaggtggctcagctcccaggacactggcaaccaggctgtacttcccaggcagaacattggagggggcaccttcctagagggtctgactacccaagggggaagaaatcttgctaatcttgagggcatttcggtgaaacaactcagctttgtctaatggttttatggtaatgtcctggagcccataatacattgcttgagcagacagctaaagaataccacatatggaggaaagtctccaacaaagagaccaaagcaaactaaccaacaagaaatggaaggaaacaaagactctggagagaacagaaagctgttacatgtagctttaaaaagctgaaatgtgtattatagatagtaaaaaagaaattgtgttcatgaaactaaacatggtgctatgaaaaaggagaaattagagaaaatttaattcttaaaaattaaaaatgttaggcgaaataatataatcaacagaacaaagatgagagactcttctagaggtagatgacaaaaagaagataaatagaaaagataataacgttagagtttgagtctcaaggttagtttcagaataaaagaacagaagaaatagaggtcagaaattgctaaaagtacataacaaaatttcctggaactgaataaatgagtaaaagtccctgaatttcaaatataatcaactgggggaactcatgcatatcgcaccaaatgtgctgttatgagacaatagaacaccagggataaagaagaaatcataagtgttttcagagagaagaaggagggagggaagaggagaaggaagaaatgaacaagcaaggaaaggaacaaagaaagatagaaagtcaaataaaatgaatcgggaaacaaaataacttcttaataacactggaagctaaaagacagtaaagaaatcccttgaaatttctgaggaaaaggtatttctaaacaatgaattctgtgtaaagtaaaagtaacaattaatgtaataagagaataaagaaatattttcaaacatttaagttctccaaaaatgagtttgtcccaaacatctttctcaggaagctactgcatgctcgcccacccacccatgagggagtccatcgagaaagaaaaacaaagaattcagggaacgggacccaaactacagagaggcaaagagcagtcctaggatgacagctcagtagcaagattgccacaaaaagcatgagggtactaaaaaacaacaacaacaacacaactaacatatttgactgtattaagaggaatgttgcatttctattggagagtttgaggaaatataagatgggcagatgaaaaattaagaaaacaaaaatatgatgcaactaatatcaggaaaaagaagaaaaaaatgtgtaaaagaaatgtaatcatacattcccatgtggcttacatgtggataatatatacaagttaaaataatgtaaaccctaattagtagtttatctaagattgttgtgtagttaaattgggaagattaagctaagggaagcatgtgtgtgctcatgtgtgtggtagggaggtaggtgacagggaggcaggaaagaagaaagagagagagatagggagagaggacacacatgctggaggaagtattatatataatatcctacatagaatccttatctcccatagtaggaggccaaaaggtaatatcaacatttgaaaatcaaaaagtaggtatctgagtatcatgtgggaatatggaatcatcatcataatgaacagttagatgaagatggttgcctctgggcttcaaaggtatagagaggtgggtgggacattcttttaagctctacagttttgtgtagtttttaagaatatgtgcatgaatttttattaatatgaaaaagctaattgtttgtaaagaacatgaatgccatgaatactagagctttgtggttttcaagcagtgcttcccaggttcatggagggctcctggagtccccacagggactgcctcatggaggagggggctgaagaaatggggccacaggctttacacctgttactgctaaaggagctatgctttgtcattgttatgtttcagtgaactatttcctttgaagaaaaggttccatagaaaacaacagcaagtttgaaaaacactgatagtagtttgcttatttggagaaaaactgttcccaaattgctttggttcaaatatgatttgtccccaccaaaactcatgttgaggcttggttcccaatgtggtggtgttgggacgtggtgcctccaagggtagattattaggtcattaagagggagtaatgccttttttatgggagtgaagtcctagttactttgaggttgttacaaagtaaaactgcctgtcttgtcgggttttttttgtttttgtttttttttgcatgggccaggctcccctctcaccttcccaccctgttatgaagcagcatgagttcctcaccagatgcagccacccgtcttggacttcccagcctccataacacaaatgaatatgctgactctaactatcagactccatccagtttggctatcacctgtcattttctgttattacacaaaacagaattgtcgtatttctaaccctggatagatctttaaaagaacttgaattagaaccagttttcacatggatttcaaatatggattagatatttgattatgaaaatttgtatattttcattttgctccaaaaccaaattttaccctcacttcttaagcagtatcacatacagtatatgctggcagagttcaaataagtaatccaatagaggtggtcctctgtccctgggatgaagttggacattctggtttcactgagtgatggacatatttatgattgtgctccaattcgagttgactttggttccacaaaggaaaaatacccccaccccagggtatagaaaaaatacaacaaaatctttagttttttttttttggagacaaggtctttctctgtcacccaggcctggagtgcagtggtgtgatcacagctcactgcagtttcaaagtcctgggctcaagcaatccttccatctcagcccccctacttgggagggtccgagctacttgctgggaccacaggtaaatgccaccatgcctggctaattttttttttttgtagagatggggtctcactatattgcactggctaaaaatctttatttcttttatactggagataacccatatgttttgcaagcatgttatattggttgttactggggctttataaccacttaaagacaaaacatccctaacttggtgagtttaatttaggagaaaatcaaatgctaaaacagacactcctgaaaaaatatgtttccttagtcagtctctctctttcattttctttgttctcctctgcactccacatagtgtgaaatgctgtgcctgttctttgtgcttccattatttctcaatataaaataattaaaatctgctttgaaaaataactatgttatctaatacaaatttatataaaatatatttgatataaagtatatatttacacattttatgtgttctgaacttaaatgcatatctcatttgaagttgacaacaactctttgaagtattattattctcattgtagggatgaagaaatagtggcccttggtggtggacctctcccaggttgtgtagctaacaagggataaagaccaaatgaaatctttattttcagagttttggtctacttgggccaaacactttctaattattaaaaaggctaatctttatcacaagcatacatataactttaaaacttccagatcacatatataggatgaccaactctggtttgtctgagactttcctagtttcagcgctgaaaatcctgtatcccaggaaatccctcgggcctagacaaaacagaatggctggccactttacattcagcagtcagtccaagagactgtaatagatacccatcatgggaactgagagagacacagggaaggaaatgcaagtagaagaaaatgatccagaaagtttgtatagacgagtaaaactgatttcttaccctatcaaagtaaaccagttgtaacaaccaccacaacccaacaattggcaccaacttttcaaaaatgtttatgtaaccaaatatatctatagacttaagattcatgactatatcatgaagtgtcccaaagacccacaaacttggtactaccatatcttgaaaagtaaaacctctcttaagtgttttatgagaagaaatcacaaaacactcagacagatatcctagggccaaataccctaaacctctttttgagatcctgatctcctcaacgtctgcctcattgaagtagctgctccccaacccagcttacagtctgcccccaaccccctacctatagtgtgccagattctgtttcccgcctgctcttctctcgttctcaccatcttaagagtgttctttttcttggatatttccctccttgccctttcttaaaaccaacataagtcccattaatcttcttctatgtctctttagacattaaagagcatcttcatccccttatgctcctctcccctataagctcctgcaacaaagatccagagaactagagatgcctcttcaaagatgaggaggagggtgaggaatgaggaaatgctgcaattattcctacttgaatattatagtgtgtgtgtgtgtgtgtgtgtagattatgaaggtaaaataatgtcattacagaaaatttacaaaaagtgaattaagatttttcataaaggatccacaatcattttggtaggaattttttagcctttatcttcctctctggtgttctaatatagttgaaatcatggtgcacatacacatgcaagctgatttttaacctaactaagcattagcctatgccattctgttttttataaaaactatcattgttccccattatttgctatcaaatatacgaattatattttatattaatactatactaattatatttataatactatactaattatatgtataatactaagtatattttgtaattagtatatttgtacatacagccctttgcatgattacagttattttcatgtgacaggcatatataacaggtgtccatttcaaccaatttttaagtttattggcatttaataggattatatgtagcatgctgctgtggttttctttgtttttaaaatgtatgtttgtaaggtatacatgatgttttgatatacttattttgatatatatagtgaggtgattactacagttaaacaaattaatattccgttgtttcctatagttactttcatgtgtgtgtatgagcacgtttgtgtgtgttaagagtacctaataatccacttcaggaggccgaggcgggtggatcatgaggtcaggggatcgagaccatcctggctaacataataaaaccccgtctctactaaaaaatacaaaaaattagctgggcgtggtggtgggcacctgtagtcccagctacttgggaggctgaggcaggagaatggcatgaacccacaaggcagagcttgcagtgagccgagattgtgccactgtactccagcctgagcaacagatccagactctgtctcaaaacaaaacaaaacgaaaaaaaagtacctcataatctacccccttggcaaattaccggtatacaatacaatattattaactgtagtctttgttctatatgctaaatctctacgcttaactatataactctctttttgtaccttttgatctatatcttcccatttctgcctgctcctggtaactattgctttactctatttctatatatttgattttttaaaagattccacatataagtgagatcatgcaggatttgtctttctgtgcctggcttatttcacttggcataatgtcctctaagtttatccatgttatggcaaatggcaggatctcttttttgggggctggataagattctgcatatgtatatcacaatttctgtattcattcctctgtcattgaacactttggttgttcccacatcttggttattgtgaataatgctgcaatgagcatggaagtacagatacctttaggagttgatgtatttcctttgggtatatacccataaaagagattgctgggtatatttttaagttgattggcatttaataagataataaatagcatgctgctgctttgaatcttccatatttgtctgtagagcccctgttttctaatgcagtttatgtaaagtttttctactttttcttgggcagtatctattttaattacttttaaatgacttggatgtattaatgttttctcttttaacaaaaatcacaattataccccaaattatttttgcataaaaagtatatgcttttaaaaataaatgatatgacaaaaatattagctataaaactatcaccatgagaatactgcctgtcctaatcccttaaggatatttattagggaggaaaaaaataacagaggtcgtttgcttttcagtgaccaggttcttcatacacatggatgtctcacagatcagctaaggcctgtgtttgaacaccttggtcacccctgcaaggagccatgctccagcatttgccatccacagaacggtgctaatagagtctatttctggagaatggaggagagattaacttcttgttcatgataaatcaagggtatctgatttgcctgttacatgcccagttttctttggaagcaagccctagaagctgtttttctgatctaatcctaattctcacattagtgcttatgaaagaggaaaacaacatttactcacgataaagactgagttctagccattataaatcttatcaattgccttgtgaaggttagggggaaaaagaaggaaaaaaatgattgtactcactcacacttgcatctggactaatgttcctattcccgttgttgagtgttctgagatttctaagactggcacaaatggaaatagcagcagagataaagttgggaaccttaggagatatctgactgatgaatgttgcactataaagagtggccagtaacagttcgataaggaaaattattatagtttactcattactgggaaatattagcaaacctaaacatttcatttttttttctatttttcttataagccaccaagattggtagaagtgctcttaacaaatatttgccacgttaatatttagaatcacacacatgcatacatacatacataagatgtataatgattttttggcttcagtaaaggtacttggtacataatatacattctatataatattttggttaattgcctgaaaagaagcgtatttttcccaagacaaatacaaaacatatttatctaagatgtaggccaacaaataaccattttccataggttaagatatacacttgcacatgagcagttcttcagtttcaacaaccattttttgagtatcagttatgtgctagtgctcactctgagatacaacagaggtgaacagagcagctgaatgtgaaccattgatggccgcacgtctgtccacccttcttagttcatttgtgttttggcaccatccattagccttgggaaggcgtgtttttgacagagggataaagaaacacagtgacagaaatgtgtactttctggactattgctttatttcttcccatttatttgtgaagtcattagaatgcccgtctatcagcattacatagagcctgcagtttccctaagaaactgtcaactttggggacaaaaataaggaaagtttcttactcctctgtttctatcttttgatctttttaaaagacatctagtaacaaagttaggctaaaaggctaaaagctggtaagccaccaatctatatggggcatcaaaatatcactaaaataggctagtaatatgatgccaattaatcaagttttccctcatggtttcttaagatggtattgccctagatatgataaaatataacccaaaatagaagattcaaaaccatcaacaaacaaaaacagaaagcttgctttctggcatctacgttttgccgttgaatatttttgagatgtccacataagttccaaggagcagctgcagccacaccaccaccctgagcccagccagctgacagttgcctagagttggcagccacagctagctgaaatttggaaacccccaaatgcttagggttgagatgtgtccaattaccaaaattataaagccttcattaggcttttgaagaagttgtgtggtctgtagaattgcatgttttgaacataaagaggttagttattttcagaggcaggagatcttttggccccagtgaccactaaatattaataaatattaaacacaagttaattaatggtgatttaaagggaccccatgttgttaattcatgtcagtctctatttgatgaaatgtatctttttctttgtttccattcactcaatttctcttcttttagatatacacttgtataacacacacacacacacacacacacacacacacacacacattttgttttccagtccgcactcaagttttgcaagacagtcctgaaaaagaagtttcagtggggagatagaagtgttttttgcactctctcctgtttggttgaaatcagtttttccacaattcttacaacaagtttttctctaacagaaaatgcacagattgaacagttgccctccaaaacactggcaagcaggcggcatgatgatttcctcttctaacggatcccaactcatttactaagactcattcaacttttaacaaaaaatttgtcatttctctttcttactacagccattgccatcctctgtaaaattacatgtggacattaaaacttaaatgctgtcctacaatgaaaatatttttaatgccctcctcaaagttaagaaaaaaaatttactatttgtattttgtgtacctgggaagttattcatgctgagtaacagtacaaaacttgagctgccttgctttctgcttccaggaatgccaatcagagaacattctttttcaggcagccaagtttggaagtcagttggtttctggcagtgagtagggggaggggatggcaggggaagcatagtgagtcctcgggctgatgttcagcttccaagtgtttccgtaatatccgtcaatgaaagcatctccttttacccacgtagagacaggtaaaaagacagctgagtaaatcagcattagatgtaacagcggaagctcagtcagagggagcggggagggagggcgcatgaaagcctgccattggcgagcttaccaaaggcatctgccagtgggacttcaatggaatgtgaaaccaaatcattttcaagttaaagatagacacagtacacaccaggatctagaggctggatttcatactcatagctctccctagaatttcagagagttctgttatgatctctgttgtaattaccaatttggttcaagtttgttctttaaatgaatatgcttagaattcacatatgttctggatgtactggaattaaaaggatttaagagatcatggtgtgcatgttctagggtaagtgaaaagattggtttttaaagtgcatcgcttttctgggatgcttaatattgaatttttctttttatctgtgtgaatgaaaaggtcaagatttttcagtgttgtagcttgcttacctttcttaagatacttggtattttacattttgtgcagcagaaagaggatttttgcttagttttgaaatttacattgcaagtctgtaacttcagttttgactttatccttatttgtttttccctctattcttctcttaagcactatgagtttactgagttacaatctcaatagttttatgtcacaacacagactgaatgctactgtgtctattatgccattggatgaaactatattattgtgagatggagttcagtttcccctgcatgttactaagtcacttcccaatttgagaaacaaaaaaaggaaaaaggagaggaaaggtgctctaaaggtggcttaaactgcgtaaggagcctttagaagatattctactttttaaaaagcaactgagaaaaaaaataggcacttttcaggaagagaagaattaatagaagttattttttagtgttatctcattaattccaagcaggttcccctccttcaggaaaaaaaaaaaagctgaaatttgctaagtggatggaggcgttctgattttacagagcttgagagaagacaagggagaggaagagttgtctgattttgctattgtcgcactgttttaggacttcaaacttcttcttgaaaagaatgacaaactttagttctcttcatgttttgcccatgtataggttttgtttcttgttttgtcaaatgacctctccctctgctcttagagacagctcttccaaacttgcacagcattccttctgaataaatactgtccataatagtcacagagtacatggtgtgaattggaaattctactttatatggggaaaataaatctgctgacgctgttattacagagtgcacagatgaacagttgttaaatgtaactggccagttttttgtcttgtcaaatagaccagattctaatgaactaagttggctaaactaggtacaaacaatgaagggcttcttatggatttttcattcaactttgatgagaataagtaatacactgtgtcactcttctaaaatgaaaaatgggcattatattgataaagtcatttgattttacaactactgagtaatctagtgaggccaagcaaatgtgaagttggcagagctcagttctgatgcccctttcctcctttctctgtccaattttccctccctctcagtcctccttatccctccagacccctgatgaatatgactactcagcgcccccgttttcttgtcaagcaagacctatactcaagaaagaatctgacttaagagagttttaaagtcaatgtactaagtcccccagtaatatttgcttttcagtgtaaatatctgaccttgtgacagtttagacaatttgttaaatgatagttaaccttgggtaatacttataattaacccctttaggttgcaagcaattgcaattaattttcatttccccataatcatgtgttaactttgtaaattttctgtggtcatactgggtgccttgtgacattgtattaccagttgtgtactgaatggttgacaataagaatgaacctggcagaaatcacaggtgcttccaagaagtttgtgaatgcatgcacctgggtgctcaccatacactcaggtacacacagtaacacatgtaggcataccttttatgtaactaatatgttttttattgaattataaaataaatgaaaatatgttaggcttaccagtgtgggatttgggttttttttcagtgtgtcaaaaaaaaacacaaaaaagaacacaaaatgtaaaattctaaaatgaagaatgttaaactatgtggccaaatagtgttgacagaaaaagagacaaatatttctctgctactattatatcacttttatagtttctaattcttgtataaaattgtcaatcttagcttttattcttttgaacatcctaagtgtagttttataatctatttctgataattatagtatctcaagtgttactggatttgtttctattattactcttcctgctagttctcattcatggtgtcttaatttcttggttgcttggatatctttgactctatgctggaaatgtatttttaaaattacattataattaaagatcgtaagagtaagttgagatctaagtgataatgttttcctccagagaagactttggtttgcttctgccaggcacctgggggcgatatcagaccagaatcatcttagacaaagtacaactcctgatgttccctgaatcacctctgtgacaagaaggctgcaaatcagtgagaggaatggtaggttcactcctcccctaaaggagagtatgacctttcatgacaccagcataaagctgggttagttaattaaagccccacctgagggccaaggactttgacttttctatgaagcacagaaagctacttgaagtgtaaagctagattctcagatcttttttcctgatagtcatatgcccaagggcttttaaaagtgacctcacctctctgatttctgatcttctcctaagttttcatatgccaaatcttcaccatcttactaaaggctctttgctgttttttgtttggttggttggttttttgttttgttttgttttgttttattctgttgcccaggctagagtgcagtgacatgacgcgattgatctccactcactgcaacctctgcctcttgggttcaagtgattctcgtaccttggcctcccaagtagctgggattacaggcacatgccaccatgcttggttaatttttgtatttttagtagagtcgggttttcaacatgttggccaggctcatctcgaactcctggcctcaagtgatccacctgcctcagcttcccaaagtgctgggattacaggcatgagctaccatgcccagcctctttactgtttttatatctcaaatatctttattacatcaggtaatacatacaaatatcttattacatcgggtatatcagtccagattctctcattactgttaccagaaatggaaattcatcctactgctattatagttgtttctttttacactcttcgttctagagaacatatcaaagtttgctgatatcattaatgatttcagataacttttctgattttattttttagttgtgacctgatatattcaaactttttggagaaaattgcatatgcatgctgattgaaagattcatgttttctgactttatttgagctgtcaacaccacctaacagttcttttttttaattatacgcaagttgtgggatacatgtgcagaacgtgcaggtttgttacatagggatacatgtgccatggtggtttgctgcacccgtcaacccgtcatctacatcacgtatttctcctaatgctatccctcccctagcccccaattccctgacaggccccagtgtgtgatgttcccctccctgtgcccatatattctcattgttcaactcccacttatgaatgagaacgtgtggtgttcggttttctgttcctgtgttagtttgctgggaatgatggtttccagcttcatccatgtccctgcaaaggacatgaacacattcttttttatggctgtgcagtattatttgtccctagctggcccctttccttggcaatttctttaacctctaatccatcccacaagcatccttcactctcagaagttgattttgactctttctggtttctcttggcctatatccagtactaagacatttaaaaaatcttcttaaatcccgtgctttccattctctctgcagttgctctacttcaggtcttcatcatttaacttggctattatatggtcttccagttgttctcctgtctctaagctccatccacaccctcaccctgccactacatacacacttgctgaaaccaacatacccatcttctaaaaactatagacttcaattaattgctcccctacttaaaaatctttagtgattcatgactcccttcaaaataaagcttagtgtccttagtatgtcttaaaaggtccatcacaaagcctcgatctgtttctcaaacattgactccactgcttcactggttatcaccaacacttcaatcacatacaatggctgcctccacaatatgccgtatactattttagctctgtgctagtctacctttccccaccgccccccgcccccccagaatgcctattgcttctctcctttgtgggaaaaccccacttttcctttagggttgacctcataagtcaccttcactgtactttctgtactttctttttaagtgtatagctcacccactgttctgggagtccctaatgctgtggcttgtgtcttactcgcttttttattctcagtcactgacacacaggaaccactcaaaaaaatgtttaagaaatgaacagatgactattcagaagaagtttgtttctgaggaatttgttttgttaatatattcttttccattctaaacatcattttttcttttgaccttagactctttgtctagaataatgatcattagtaatcctgtatgtcaagtggagtcagtaaaaacatgtttatttggctgttgtcactgtcttggggaaagggaattctctattttctttctttcttttttttttttttaccaaatgtgatgtataacttgattgtgacaacaagagagtagaaatttaagtatggtgagtcagctgtttattatcagagagattcataatcaaaagagtcatagagtgggaaaactgacatatttcaacaaatctagtccagaatgttaaatagcacaatgggaaaatgtcaatgaggcacaactaaatgaaaattatctcattgcatacaacctcaatttcaaccattagaaaacactgggttgttttcaaatcacagtgtggtgctacaaagaaagcagttgagtgtttatgtaatacaatattgtgaaagcttgtggaaaacttttcttaaaatttttaaggccttggccaggcgcattggttcacgcctgtaattgagcactttgggaggccgagacgggtggatcacgaggtcaggagattgagaccatcctggctaacacggtgaaaccccatctctactaaaaatacaaaaaaaaattagccaggtgtggtggtgggcacctgtagtcccagctacttgggaggctgaggcaggagaatggcatgaacctgggaggtggagcttgcagtgagccgagatcgcgccactgcactccagtctgggtgacagagcgagactccatctcaaaaaaaaaatttaaggccttgaagtgcaatttgaatatcatctttctaaaagcctatgctaagcaaagaaaaactgtatttgtttattaaacattgaatatagttgatgggaaccagaggaagaggaaatataacttattaattccaaggatgtttaattaattttatactctttggaccacttataaactttttacacatttattgtgaggctttgatacgccaacttctgagatttagataaataagaaacttggcttatattatttctcatacaggacactcctaccttcacaaagagaaaagccccagtatgggtggggcttcagaatgtatcttcagaaaatgtatcttcagaaaacatctttgaatttaatgaaatgttcaaactcagtgtttgagatcccagaattcttcatcgcaaaatatgaaaatatgatattggcctttcttttttgcctcatctataaaagaactctaaactagctcttgaataatggctgatttctaatcataacttccaaacagctgaactcatttttctcattaattcaataatttgaactcctaccttttgttctaactgtgtagacaatgaaattacttattcacccccttcaccggacactggtactgaaggatatcatgttaaaacaatgaatttaattaacaatttttttcttttttgttgttgaaaagggaaaacaaaaccctcaaacctgaaaaattccatatcccttcattttactttttcttattacagaagcaatgtaggaaaatcatgactttacctgtttttggttgtcgttgttttgttttcttgttgtttcttttttgagacaaagtcttgctctgtcgcccaggctagagtacagctgtcagctcactgcagcctctacctcctgggttcaagcaattctcctgccgcagcctcccaagtagctgggattacaggcacccgccaccacgcctagctaattttttgtatttttagtagagacaggctttcatcatgttggccaggctgattcgaactcctgacctcaagcgatctgcttgcctcagccttccaaagtgctgggattacaggtgtgagccaccgtgtccagccaacaaatttctttatgtatctttcattgatattttaaatgtatttgtcttaatctccacacatatttaaaaagtcattttgcctttctcaacaactagtattttcttctcagaaagctaagttagaggatagtcttgagattcttaaaaaatctcttgtttaggagatacttatgtaacagaagagcttaaagagagctgaataaattctgaaaaaaagttaagtcaaatgtgtattttttattacatatttaattaaatcttaatataaaatagaaacacatttatttgcataaataaaactggacttggcatttttgcaaaataaaaatgatgtaaagatgactcagacactctgaatcatgaaagttttgtaaacctctaagtattttaaaaagagcaatagagttactttaattatttttctttttaagtctcagtttattttttgtactcattcctatatagtgtgatagttcacacatttatagatgctgaaacaatgaattcactgaattaatcacagttcaggaatacagatgccttaattagttttttacaagatataattttgaatgaaatttatcttccaatgcatatgaacttccaggtcttagattgttcatttctacatatttgaagaatcatgtttactaaccaaaagatatttaacacctcagataaatgtagcaattcttcccagatgcatccaatgtttgaagttattttgtaggtaagagacatttattttacatatgataaaactaagatgtagacatatgaagtgttccagatatactatgggtggtttcctcaggtaacaaacaactctcaatttcagtgacatatagaaaccaggtttccttctcacttatacaatttagccaccacagattagctgaaggttcttctctacacagctgttttcacctggaaatgacccattttccttatactcacattcccttagccaaagcatgccatgtggccacacctaacttcagttggatgggaagtataatatgatcctaccattggcctagaacaggtgagccccagtactggggcttagcccaggagggtttttggctttgcctagggcaggaaagaattcaagggcaagccagtggtgttagacagcaacttttactgaagtggcagtgtacagcagcagcagaggtactgctccttgcagagcagggctaccccatagagtgtccagagtagcagctgagaggcagttttgtggtcatatttatatctttaattataagcaaattaaggggtgatttatgcagaaatttttaggagaaaggtaacttctaggtcactggtcattgctatggaaaggggttgtaacttttgggtgttgccatagcaatggggaactgacatggcatactgctaagcatgtcttatggaaagctgtttccatactggccctgttttagctagtcctcaactccttccagtgtctgagcccagcgtctggagtcaagtccctcctcctacctcaccatgtgcttagaaagagaaaggactggaatatttatgtagagctctgaggaatttctacactattggataataggcagcctaaaactcccttagtaacacagatttagacttaaagtcatatatatctgtgaacaggtccatacttggtaaatgtacgccacctgcgatctgatactaatgtctattgcctgtttacatcttttggctcttatctccactgagacttttcagctgtctaaatctttaccatttccatgtctgtgaccttttctgtccagcttctccaccactatggaattctaggattttacctatccttacacttaccactcagggagtcctgcccataaacagttttgggaagtgtaaggagactccgttggggcaattcctacagaatgcagaaagtaaatgtgaaatcttaatgctttctcctctctaggaactgctcatatgtagtacagaaatggagaaaaaggaaattgaatacaattctaatcctcagcccccactttaatcagtagacagagtaaaaggcctaggctcagggaatatggcacagaggaatggtgatgtatattatatattagaaatacatagtctcgaatagcatttatattattggtactctaccctttgcttagcatttagttttaagcactaactataatcgataaaactcaggaattcaaagattgagacacttaagagttgaaaatttttaagccaatattttaaggtcctttgaattgtcatttaaatcagcaaatccaatttgtgtccttggaagccaataattttaggaaatattatgtgtgtattgtggggagggctgggataagaatcttggatcaaatgaatttggaacatgctgtataccgtatccctttcttggagatttaggtaaacatttgcattaagaatgcataaaagttctacactaaagggatatgtttgactttctttaacccagtgttttccagtgtaatttgactatggaactttataattatagatagatacatagatagatagagatatatcacatttcaacaccacaaaacacactttggtaattctggttgcaagaacctctaaggctgagtggtgcggtggctcatgtctgtaatcccagcacatgggaggatcatcaggccaggagttcaagaccagcctgggaaatgtagtgagagcctgtctctacaaaaaaaaacaaacaaacaaacaaaaaaagaggcccggcgtggtggctcatacctgtaatcccagcactttgggaggccgccggatcaggagaccaggagttcgagaacagcctggccacatagtgaaaccccgtctctactaaaaataaaaaaatcagccgggcgtggtggcaggcacctgtaatgctagctactgaggagactgaggcaggagaatcgcctgaaccggtgaggcagaggttgcagtgaaccgagatcacgccattgtactccagcccgggcgacagtgtgagactccctctcaaaaaaaaaatacaaaataaaaaataaatttaatttaatttaattttaaaaaagaaagaaagaaagaaatttagctgagcgtggtggtgtgtgcctgtagttccaatcaggagactgaggaagaaggaacacctgagcccaggagtttgaggcagtagtgtttgtgccactgctccccagcctgggcagcagagtgagaccctgtctctaaaagaaaaggaaaggaaaggaaaaaaaaatcccatttaaaaaataaaaataaaataaatacctctagtacattgtattaataattaaaagtgcaataatattgcagctcatgtaatacttttatataaagctaagaattttaaaggacttttataagtatccttagtatttggcactttattttcattctctttttttttagcagtttttattcacttaaaatctacatgtaaaatttaccatctttaccatttttaagtgtagagttcaatggtaataaatacatttgtattcttttttttcacctttttcggttttcattgtcttgttaaatggcattgattttcaacaccaacagaaatcaaactttaaattgacagagcttgcaataatatttgtttaatactgttgaggaatattatctttgatacaccacaggtaaggagattggttgtgttcttcagaatgcagaactctaaagtgatttgctccattttacctatttcattcaaaaatctaaaactgttatttcattttagaatatgatcacacatcgttaaatttattagacttattatttctttatgaagaccttgtgaagagaaaggtcatcttcaacttcaacatcttcaacttctttttcttggtagtttttcttggtagtttcctttaagttcagaagttttaaagcttaaaaagaaaaaaattattgagtttcaaaaaaaagctctacgctctactaaagttatcatgtatgggaatttttctgtgcaagaagaaaagcagtagactaacaaaaacaaaatgtccacgttcctaaatatgtgttatagttgtgaggtgttatgaccatttaaaatgaagcaattgttccgtgaactgttatactaccagcaactccattcaaagaaaatcctagatataaggttcacccataaatattaaggtggcttaggcgtgaccgggtgtgtgtcctttcatcacttgtccactctgagaagataatcctgcttttcattcattagcaatttcagttcctctcccatcatttcaaaataagcgataaatcaatactttaaaaaaaatttgggaaatataacttctttctgtaccatagaaagagaaattattcagtcaaaactgtgggtagcataaattcttagcacacattttttttcctttaattaattttggcttatatttattcatagggccataacaagattcagaggctataatgatgtcagcaactcctctaaaattttatagcaagaggatctgaagatctctgttcagcattgcagggctgctcctctgtaactctttgactagccccacagcagaactccatttcttgtttgtcaaattatgaagttaattgtattcatattctgaaactgcctagcacctagaacatttggaatgctgaaaaatatcttatgtagctgtttgccagacaccagaacataaatctaacttacttagatttacagtactaccgtttctcctttaaaaaggacatgagggaaatgtttaacttaatgaggcagaggatcctggtgtgcaagttacattacatttttcattgcacaagagtaaattattgctccagtttcctatatggtaccccagtggcctcaaagacacaatgtagcttcccgaaatgccaacttttgtcttaggccataacttattctcagagagtatgctttctgagaattacccataacatttcttacaataggctgaatttcttgaaggtcattcatatataccaacttaactggatttgtcttttgttttttttaacttagaaacatccaagtgataagtctgcatacattattttacaaaatggaaaaacaatgggcattttctttgtctcaaacatttagaaaaccagcaaaaaaaaaaaaatctgggtaagaaattaaattatagggcatacaattttttcttggaattttcccactgttactgcaaactttttaaaataaataatcatgggtcttttggaggtggtctttgagggtttagaactataataattaaatatattgttctatatttgtaaaaaaacaaaaacttattttgaataccaaatgtatggacccacatgtccaaatgtgtgtttgagctttttaaacaagctttgctttctaataaggtaatataagaatgtaattaaaacaaaacaaagtccctccaccaatcagtgttgcaacatttgggtaaattttagagcttgacaattttcaaagcagagacattactccaggctttctgccaaaccattactggtaatctgatgacaagggatgaagcaaatgaaagtgctgctgcctggcttagttagatatgcattttctagaagagaagccaacagatttcttatgcaaaccatcaaaattgcaactcaggcacacacacacacacacacacacacacacacacacacacagtgcttttacaagtctaggaatatacacattaaaacacaactccatgcttaagggcaatgcagaagtagcagacacagctagggttgactggatcctttctttaccttgagtggttttaataaatagcaacatttctctcaatggctgcagtacaaataattaaattacttatatctggacaggatttagcattgccttcacatggttaaattccaactactacccaaaatctctcattgataagtgggtgatttgggctgctattgtctgtggtttatttaaatgatttaaataaacatctattctcctatagtgttaaaaaacaatttatgtactattaatgaaaaaaatccacttcagttagtaactatgaatgaccttcaagatagggatataagaaagtaatcaaatcagggatgttttataaaaggaagactttggagtttaataagttctgtggaggggaaaaatactgagtaaataactgggtatttgcatgcattattttgacaacgggagggctctattttttttacctatttctttagaaatctacttgatatagctgcaacttcagtatagcaaatttatatcttgccattataaagtctatgttgtctcttagctcatatgatggtatatattttcaaaatacaaataaaagaaaacatttaatgtactatgttctttgactatttcacaacaaaaatatttcacaacaaaaaatgagaaactagcaatgtgtctattttttataatcatttcacaaccaagactcgtatcaaaatgacactatcaataacatgcatattggagtaagacattcctgaatctcagcattatactccatatttgaagtcttaaacaacctacacagtgccaagtccctgcctttgaggaatgcagtgcccagtgggaagacacatacatatggtgatagtttagttaaattgtagtaagttatagacagtataaaggtgcccagagaagacatccagaagaaggtgatgcttatattggatcttaatagatgagtaagagttatttagataaggaaagatgggaagggctttcaggattgaaggactagcatgagcaaggatatgaaagggcatggtgtgcagaggagatacccaacagtttggtgttataatagggtgaactctgaggctaaaatgaaaggcgatgaatttggaggggtaaatagatatccagacatggaagggttttcatgtcattgtaaggggtttggtctctattccttggaggtttagtgcttcgaaatccaaacccctcccacaaagtaaacaaagcaaaaataaaatgaatacattcccacgaaagggactgaagccatagctcaaaatggcctcccatctgtatccagttctttgaattctcaagtatttgcattttacttcataatgaatctttgtttcattcaccataaaagtatttttctccacatttctagtaagatgcaccatttttatccaatagctctcatcccttgaaatactgtttgtgtccttagaattctctatgattacaaatcttttttgactgagaagtgcagctgtaggtagcaaagattatttaaactaagagtttcaagaaatgtatttcacataaattgatcactctggatggtgattttaaagaaggcaagaatacagactgaggagaaagagaatattgcaatagtctgctcataaaatgttagatgtaacagatttcatgatgcctagttagatggaataatattttgaccactgaggggagctcccctattttttctactttgattctgtagaaatctaattgatatagctgaatactttccaaacttgttccaaagcagacattctaaataaatatataaaaaatggactacattttatgattttctcatagtttcagcccttccccaatactacaaatacatactaggagacatgggagaaaatgtttgttactgttaccagcacttataacacagagagaggtgtttgtcctgaagggttcctgatttcttctcatgacctcttgacatcttgtgacagtcttccacaaacactcaaagttctgggttttgctggaaattggggtactttgtttcccatgcattcacacaatccactttatccagggtcaatagatcagaagatacagaattgcatacaacaactaagaaaaaggccaaagaggtagcatttcgatactcagtgaggaaggctttctactgatggctctgtttaatagatacagtagtgaaatgcaagacagaggattataacagtgcttgatctagaagtggcaaggattccaaatccctatgatttgaatcttaaattgctatgatggatgccaattaagggaagcccagaaggtctctccaatccctgatgaggctaccctactcttttgacagactcaattataattttcaatcttacgaaaagaactgtgccatgtcctcctcattttatatatctaagtaactgggttggtatttatatgaattggaagcatgcttatgtgcccaagcctacataaagataggcagcctgacctatgatgacatggttttgctatcacggtcaggagtagtcttaataagtagctgtctgttactaactgctgccaggaagaaagattttaaattagcagtgctaaaaataaaagacatatcctttattcaaataaacaatactaaataatcctattaggtcaatttgttcatctacttgaaatatttaataccctggagcacccatcagtatgtctttctactcaaatattcagaaatttgacaaaagggacaaaagtattcgttaggttttttttttttttatggattcaggcagtgcaatggtgagaactattcataaaaatttctaggcccaaattgcttcaatcatgcctcatgggacttatgaaatcacaagagcagattcagaattctttcttttttcctttttgagaaaaaaaaagtttatccatctctatgtattagggtgacccatctctttgtgagaataaaagtcaggcagttttcccatcagaatgtcaactctgctgccttctcacctgctgtttaaacatatagatctttcttcaatcaaccatgcagaatatcagcacttctaacagctgtcaacaaatttaaccttggattggctgtgctatagccaagataccttctctaagtgctattgtatattggatctcagacctagagcacgttggcttaacactttctctgccccctcatacacatgtaatgtcattactgagtaactatttaattttgtggtcttgattactgctcaagtttaccataaagcatggcactttgggaaaataaagaatgactttgaacaactgcagtaacatttgtgctaaatgctacttgctatcttcagaataaggagctaagcccacacaattctcatagggattatgccaggaaaaagtttatcactcaagacaagcttgtaagctttctttattgtacaagataaactatataatctatcagtttccctttttgttttgactgctttaattctttttttttttttttttgagacggagtcttgctctgtcacccaggctggagtgcagtggcgcaatctcggctcactgctagctccgcctcccgggttcaagcgattctcctgcctcagcctcccgagcggctgggactacaggtacccgccaccccacccggctaattttttgtatttttagtagagacggagtttcaccgtgttagccaggatggtctcgatctcctcatctcgtgatccgcctgtctcggcctcccaaagtgctgggattacaggcgtgagccaccgcgcctggccactgcttcaattcttaaagctaaatttgaatgctcagttgtattaatgatccagttttgggtgcctgatatagctactgtcttcaaaatttgttttgactcatacctttgcagagtcccctttattttctcttttataacccttatctcatgaaggtggaattccttccttgtctacttgcctgtgattttggactcacgtgataactgtctagtgttctactgtttctcatcatcaagcaaataatgtttagtgaattaacattactttgcactgtcttgtatgttttaacaatgaaatatgccattttgaaaataggaagtaaaattctaaaccatcaagaatgattaacaaaccaattaattagctgagaataataaataaaaacaataacaattcttagggacactttgagaccaattttctccaaagagcttagcgatatcctcttatcctccctccatttttgccgagatctatatatatatatattattttcagtcaggtcacattttactgtattgagttttattttcagcaagttttaattttgttggagtttgcatcagaggaatctagacagaatagttaaacaataaggtcatgcctgattacaatgtgtttatgtcatcagtttgtcctattcttacaaccaaggccactagtcaagtacgtgaggagacttctataggctaaggaagatttcacctgtgaggctgtgtttatgagaactgggataagtcaaaccaaccaagagctggtgtttctctcatggaaatcttttgacatctaaggagactgaggcaggagagattaagtaattatccaggaccagaacaaatcagtcttaatggaagtataaatcacaaattttctggtttaaagtccagaaactttatgactttatgacttccgtatgactgagcatacggaacatgattttgaagtgtggtatattgtcaacttatcttttgtgccaatagcatgtacagtttgttttcaggtacatttaaaaaatgtatagatccaaagggatctgggaaagggtgcagagaactacataagtaacagtgcacacttgaaaatgaaatacttaagaaaactgtgataaatccactcagtaaaataatatgtggccttttatgcatttaggctgttgtccatttctttaatgatctagaacaaaagccttcctgtaaactgtatgacttcagcatagcttatttaactttttattctcatctcttaaattggaacaataatagagctactgcctaggattgttaaaaagattcgatgagataatccatgtaaagaattgatgagctcagattattacatgtagtaaaataatgtctatgaaaagtgttaattacatagggaaaggctgatgtcacaatgtaacaataccataaccaggacacaaattatgcaattaattagaattatgtggatatcttgatagaaaaggctaagacagaaacattaattgcaattactttggattttgagaaagaggagattattttatttcttgtattcacctgtattgtgcaaattttctataaaatgcatacaacatatgctcagaaaaaatataaaattcataaatatagatctaaactcccacaaaaaaaaattctcttggatcttaacaattcttggattttttggaggtagctggtgtggtttatttgcttacaacctttatctgtgagtgtacatctctaatacaccaaggaaacagtaccattcaactctagtgcaaatcccttttagctttttagacaggttcattcacctgtaatgaaaatttaacaggtagagagtgattaaatcctggtctcagaagtttcctccagtctcaggtgctgagccctataaatctttattcatatgaactcatttctttctttagaacttgtgttactcttaagcaaggaacaagttcagaagaatcatgtattcttgaaggacatgggggtgtgtaactgtgaaaagtggcacccgagactccaggcatactctgtagcacctctttgctaaagaaataaaaagcaccaggggtaaaactcagagcagaatcaatcttagaaggggcacagggggaaaacaaaactaaactaaaccatgtgggctcaggagtcaggaatcagagtttcttggtttggggacctggttctccccttagctgtgtgtggccatggaggagctacttcacctcactgaaaaataagtgagatggcagatatagcaggtgtggagatgctggtcactcatctcaagagcagtttccagaagactccgctggcagaggggtctcgggcatctcgctgggcaggcgtgcagcacatcacatgctacctgggcagtcacagagctgggctggtggcactgggcctgtgtttcacggggctcattgatggctgtccacctgcccagcccaggctgaccatctggcctcctatgagtgcattctgtgggcggcacccttcctcacccacttgctgctcaactgcagccagctgacacgggccaccgcgcgtgagctcaccggctggcaaggacatcacaacattccctgtgctggcctgggaggacctgggcaacaacggggacctggcctccctggctcaacccctgttggttggcctgcacacctcactccccaccatctacgcgtgcctggaccttgagcctaggacctctgggatcctgcagctgctggctgggacctgaggcccagacctgccatgccaggtgacccacataccacctaactcactgctactgacttgtgatgctctcatgcacataggacagtgggcgatggtggccaaggaggtctcccaggcccccagggatcctgtacaaatgctcaacctgagattaaggggacagaaggagaatgaactcataggaggccatatggtcagcccgggctagagtctcagcctaccctcagcggaaggggccctggcacccacagtgtggaccctgtaataaagggtaatgtccacttccatctttctggaaaaaaagaaaaagaaaaaaacagggagagtattttctgcctatgctgtgattagctatattgaaaagcaataaacaaagaaagattgttgtcattgattttgcagcacttgcactcatcagtaaacattattacacgttgacattttcatggtgctcagcttgcctgtaaacatttccccaccaatgtgccttgttcttgccttatacttatgaaacactatacatattaatctaaatgaagatactatactcattagaattaatcatgactaggagagttttcagtgcataagccaatcataatgagtccaccttcatgctataccttattacttttaaaaacatatacagtcatatttcattttattgcaggtcactttatttccattcacagatactgtaatttttttacaaattgaaggtttgtggcaaccctgcctcaagcaagtctatctgccatttttccaacaacatgtgctcacttcatgtctctgtgtcacattttgataattcccacaatatttcaaactcattattatcctattgattatggtgatctacaactagtagtctttgatgtggctattataattgttttggggtgccatgaactacactcatataagacagatattttaatcaatgttgtctgcattctgactgctccactgaccagccattcctccatttctctccctatcctccaacctccctattctctgagacacagtaatgttgaaattaggccaagtaataaccctacaatggcttctaagtgtttaagtgaaaggaaggatcctgtgtctctcactttaaataataattagaaatgattaagttaagaaacacatgttgaaagccaagacaggctgaaagctaggcctcttgcaccaaacagtcagccaaattgtaaatgcaaagtaaaagggaaagttcttgaaggaaattaaaagtgctaccccagtaaaccatatgaatgataagaaagtgaaacagccttattgctgatataaagaaaattttacccatctgggaggaagatcaaattagccacaacattcccttaagccagagcctaatccagctcaaggccctaactcttcaattctgtgaaggctgacagaggtgaggaagctacagaagaagagttggaagctaggagaggttggttcatgaggttgaaagaaagaagctgtctccataactaacgtaacagaacaaggtgaagtaccaagtactgatgtagaagctgaagcaagttatccataagatctagctaagaagactgaggaagataactccactaagcaacagattttcaatttagacaaaacagctttctataggaagaagatgccttctaggattatcatagctagagatgcaaagccaatgcctgccttcaaagcttcaaaggataaggtgcctcttgttagggtctaatgaaactgataactttaaattgaagccaatgcttatttgtcattcaaagaccctaggtcccatcagaataatgctaaatttactctgcctgttctctataaatggaataacaaagcttggatgataatgcatctgtttatagcatggtttcctgaatttttaaaaatattttaagcccactattgagacttactgctaaaaagaaaaagataatgttcaaaatattacttctcattgacaatgcacctggagcatccaggagctctgatggagatgtacaatgagattcatgtcgttttcatgcttcccaagacaacgtccattctgtagaccatagatcaagagtaatttcaacttccaagtctcattatttcagaaatacatctcccaaggctgtagctgcaatagacaatgattcctctgatggatctggacaaagtaaatcaaaaagcttctggaaaggattctccatcctagatgctattaaggatatttgtggttcatggcaggaggtcaaaatatcattaacaggagtttagaagaagttgatttcaaccctcatgaatgactttgaggggtccaaaacttcagtggaagaagtaacagcaaatgtagtgcagatagcaaaagaaatagaattagaagtagagcctgaagatgtgactgaactgctgcgatcttttgatagaacttgaaaacaagaggagctggttcttacagatgagcaaaggaagtggtttcatgagatagaacctattcctggtcaagactctgtcaacattgttgaaatgacaaaaagtaatgtacagtatttcaaaaacttagttgataaggcagtgacagggtttgagaggattcgctccaattttgaaagaagttctactttgggtaaaatgctataaaacagcatttcacagtacagagaagtctttcatgaaaggaagagccaattaatgcagcaaacatcattgtttccttatgtattacgtcattcttgcattgctataaagaaatacctaaagctgggtaatttataagaaaagaggtttaattgacttatggttctacaggctgtgcaagcatggtgctgacacctgcttagcttctggggaggcctcagggagctttgacttacagaagaaggcaaagcaggagcaggcacaacacatagtgaaagcagaagcaagagaaagagtggaggggaaggtgccacactcttttaaacaaccaaatctcacaagaacccactattgcaaggacagcaccaagccatgaggaatgcgcccccatgacccaaacacctccaaccaggccccacctctcactttggggattacatttcaatgtgagattatgggggacaaacatgcaaactatatcatcttattttttaaaattgccatagccaccctaaccttcagcaactattaccctgatcagtcagcagatatcagcaacaaggcaagactctccatgggcaaaaagagtatgactcaggaaaggcttagatgattgtcggcattttttggaggtaaagatttttttaacttttattttagtttcagaagtagatgtacaagttggttttatagatacattgcatgtcacgggggtttgttgtacagattatttcatctgtaataagcatagtaataagcatagtactcaagtaataagcagagtactcagtaggcaactttacagacctcacactcctcccaccctccactctgaagtaggccctggtatctattgttcccttttttgtgtctatgtactcaatgtttagctcccacttgtaagtgagaacatgaaatgtttggttctcttcttgcattagttcacttaggataatggcctccagctccatccatgttgctgctgaaggcattgtctcattcttttttatgactgcatagtattccatagagtatatgttccacattttttttgttcaatccaccattaatggagacctaggttgatttcatgtctttgctattgtgaatagtgctacagttaacatacatgtgcatgtatctttgtagtagaacaatttatattcctttgggtgtatacccaataatgggattgctggatcaaatggtacttctcttttaagttatctgagaagttgccaaactgttttccacatggctgaattaatttacatttccactagcaacgtataagtgctccctttcctccacagcctagctaaaactattaaaaacccttgaggaaaacctaggaaataccattttagaggtaggccccggcaaatattttatgatgaaatggaaaaacagttgcaacaaaaacaaaaattgacaaatgggatgtagttaaaccaaagagcttctgcagagcaaaagaaactatcagcagagcaagcagacaacccacagaatggtatacaatatttgcaaactatgcatatgacaaagatctactatccagcgtctactatccacatctgtaccagtaccatgctgttttggttactgcagcctagtagtatggtttaaagttgggtaatgtgatgcctccagctttgttctttttgcttaggattgctttcactattcaggctctttctggttccatatgaattttagatttttttcagttatgtgaacaatgtcattaatagtttgataggaatagcattgaatctgtaaattgctttgagcaatatggtcatattaacaatattgatccttcctatcaatgagcatggaatgtttttccaatcgtttgtgtcatctgtgatttctttgagcagtgttttgtaattcttattgtagagatctttcacctccctggctagctgtattcttaggtattttatcttttgggggctattgtgaatgggattgagttcttgatttgtcactcagcttgaatgctattggaatgaagaaatgctactgatttttttcattgattttgtgcccagaaagtttgatgatgttgtttatcatatctaatatcttttgggaagagtctgtgggtttttctaagtataggatcatatctgcaagcagggatagtttgacttcctctctttctgtttggatgcattcaatgtcattctcttgcctgattgctttggctgggatttccagtactatgctgaatatgtgtggtaagagtgggcatccgtgtcttcttctggttctcaaggggaatgctcccagcttttgcccattcagtatgatgttgcctgtgggtttgttatagatggctcttactattttaaggcatgttccttcaaagcccagcttgttgagggttttaaacatgaaatgatggtttaaatttttatcaaaagccttttctgcatctattgagatgatcttgtgggctttgtttttaattctttctatgtgattaatcacatttattgatctgggtatgttgaaccaatcttgcatctcagagataaaacctacttgattgtggtggactcgctttttgatgtgctgctggattcagttcgctagtatttccttgaggatttttgcatctattttcatcaaggatattggcatgacattttcttttttgttgcgtctttgccaggttttggtatcacgatgatgctggtctcacagaatgaattagggaagagttccccctcctcaatgttctggaatagtttcagtaataatggtactggctcttctttacatgtctggtagaagtcagctgtgacaataaagtatttttaattaaggtatctacattattttttagacataatgctattgcacacttaaaagactacagcataatgtaaacataacttttgtgtgcactgggaagccagaaactttgtgtgatcctttcattgtgatatttgctttattatagtggtctgacacttaacccatgatatctctgaggtatacctgtatgcacatttttagagaactaatttatctgcacatttccttcatctttttgataatataattttccaatattatactgaatacagagaagctaatctctgggctgggtcaccaaatgttagagctgggagcaggtttagacatcatctagtgagtagttcagattgttaattttccggaagaggaaaccacagtctagagagattaactttgtccaagagtacaagggtcaagagtcgaactcaatccagttctgttgtgttagatctttttacctttaaaatattcatgtcaaccatttttgacatatatgataatgatttgccagcctaaagtatctcattttatggggttcattctccttcaatatttgtagacaatagtatgaaatcattttgatgatgaaaatccagagacagaaggattaatcattgtcagcaaatcattttaaatcagtgctgactataaattactgtttcattcaaacatggtatcagatagttctctatacacagatcaagcaaatggaagcatgtccttcacaggctggagtagataggtcataattctgtgactcactttacaattctctcagtctctcaatcatgtgttattgttcctttctgcctatgtcatttttgggggattatgccaaactgttcacttttaggatgtagaatttttggtgtttttaagggctttgtgttgcagatgaagaaagaacttcaaaacaatgtcatgttgtgataaaagaaaacaattacttgcaatattgcctaagcatttttcattttcgtaaaaatattgctcaagtaactgaccctcaataatgaggaaaacctgtatttttaaaatatcttttcattcatttatcatctactttgatcatcagccatgtaccaattaatttattaagtctgtggatgcaatctctgccccagggagctcaaagagtgtaggggaaagacacatacaagtaaattgttaatatttcatatgacagatacaatagaagccccaaaaggcattatagaggaagcagagaattaattcagggaaagataaatgcgatgaaggttggaagatgactacaagtgtgtcaggcagatttgcgtttgtgtgtgcatgcaatatgagtgcaaaataatattctggaaaaagtaaatatcatttaaaaggtattggaggggcaagagtatgatatctttagttaaatgcaaatggtttagcattgctaaagcctaagatgtgttgtaatgagtggtacagaataagactgggcacattgggggaagcatcataaaaggtctttaacactgtgttaaacaggttaacatttatactgggtcagtggaaaaccatttaagaattatgaacaggcaatggcataaccaatctcagtgttagaaaaaccactgttgccacagtctgaaagaaagaatggatggcagagaacctcaaaccaggaagaatagcaaagaagcaatataccacaaattccaagcaaggaaaaattagagcctaatgttctaaggaaatcacagtgataatgtcaatgagataggaaagggaggagaaatttaagagatacttcataaatagaatcaacatgatttaaagattggatgggaggtcaggaggaaaagacatatcaaggatggttcccagggctctgacaacagaatggatggtaatgtcatccactgtgatagaggatgtgggaaaaggttcatgtatggaaaggatgaacacaatggctttggacattttgagttggaggttttagtgggatatccaaactaaaatatccagtagtcattaggataaatgggatgacatatctggtgtagagatactgatttaaaagtcatttgtatataagtatttaaagctatgagcagtatgagttatcccaagaaggatgtgtatcagaaagaaaagaagcatggggaagaaccctagagaacacttatgattttggttgagaaaaagttaattgtatcatcatgagacactgagaataattagccaaagagatggaggggtgaaaataaggacagaatggttttaccaaaaccaagggaagaacttttttcagggagtactgcaagtggtattatacgaaacaaacaagattggtaaagacagaagttcctgttggcttccccaattcagaggtcagagacagtcttactgggaacaggttcagtgtagtggtgggaaaatgagctagtttgcactggggtaaaaggtgaaagggagatggagaagtttagacagtcaacataagattgctatttgggaaatttgatggtgtagaaaggaaaatgagaggtagctaaatggggaacccaaattgaagaacgttttttaaatgtcaattttaaataagtttgaagatatttgaatgctcatatcaaaaaagttcatggaaatggataatttgaatacacagaaaatagaagatgattaagttacagagaatgaagagaagaatctctagaacaggtatttgtgcgaaatacagcttactcatcgtattagtttattctcacattgctataaataaatacctgagattgggtaatgtataaaggaaatatctttaattggctcacagttctgcaggctatacaggaagcttagtggcttctgcttctggggaggcctcaggaaacttactattatgttagaaggcgatgaggaagcaggcacatctcacatgccctgagaaggaagaagagagagagcagggaggtgccctacacttttgaacaaccagatctcatgagaacagcacaacggggatgctgctaaaccattcatgagaaactgcccctatgatccaatcacctcccaccaggcctcacctccagcattggagattacatttcaacatgagatttgggtggggacacatatccaaaacataccacttattacaaaccaaaatgcacattgcatagttgaaattttttctaataaaaaatgtatttggagtaactgaattgctttgggagcaattgcataaaataccattttaaaaaaacccagctatttattgcaaatttcaagtgctattttttgttatcaagggaaaattggtagatagaatgtgaaccgttgatccagaaaaatctccttctctcagttctacaaatgattacctagtatttgaaacatgatttcttaaggatcatcatatattacaaatatatattacaaataaatatatattatatataatatgtgtatatgtaatatatgtacatattgtatattacatatatatgatatatatatatcctgtgaataatgattgtgtgtgtatatatatacacacacatcaatatatcctgcagaagacattttagaaagaactaaattctgtgggaactggtaatgctttcttaataaatagagctggtccactcccacgttcactgtagcattcattattcacaaaagtcaagatatggaatcaacctaagtgtctgtcaatggatggatgaatggataaatgtggtagatatctgcaatctctactgtatagcttaaaagagaagaaaattctgtcatatgtaacaacgtggatgaacttgaaggacatcatgttaagtgaaataagccaggcacagaaaggcaaacactgcctgatctcacttacatatggaatctaaaaaagttgaattcatagaaattgataatagaatggtggttacaaagggctggggaagagactggggagatgttagtcaaaggatacatttcacttagaaaggaggaataagttcaagaactctattgtacaacatagtgactatagttaaaaacaatgtattttattcttgaaaattgctaagagagtagatattaggtgttcattataaaaaataagtatatgaagtgatgcatatgttaatgagccaaatttaactattccacaatgtatacatatttcaaaacaacacattgtacatagtatacgatttatatttgtcaaataataaagacaaagttgaactcatagaagcagagagtaggagagtggttgcaaagggtgggcagaggggaggaattgggagatattgtccaaaggatacaaaatttcagttaggaagagtaagttttggagatctattggtgactatagctagtaataatgtatacttgaaaattgctaagagagtaaatcttaaatgttctcatcacaaaaccataagtatgtgaggcaatggatgttaattagcttgacttaatcatagcacaatgtatacatatatcaaaacatcatattgtacactataaatatatgcaatgtttatttgtcagttaaaccctagtaaagtagggaggtggagagatcagaagccccctatacgtataactccggttttaaactagtgtgatttaccatcaaaagaacaacttgaattgttatccatagaccacactggtttagtaaaaagtgctacggtttggtgtacatgacagtgaggtggttaatttgaggtgtcaacttgaccggattaaggaatacatggaaacttgataaagcattattttggggtgtgcctgtgaaggtgtttccggagaagattaacatgtgagcctgagtggactgggtggggaagatctgccctcaatgcgggcaggttccgtgcaatctgctggcagcccagagagaaccaaaacagagacaaggtgaatatgttatgtatctgctggagctgggttacactcttcctttcctgtccttggacaacaactccaggctccctagcttttagacttacgttattcctcgtgcccctctccacccgtcttctcaggcctttggccacagacaagagttataccatcggctcccatgtttctgaggccctcggattgggctgagccatgttaccagcatcccaaagtctccagcttgcagatggcatgtcttggaacttctcagcctccataataatgccggtttgtttaataaatcctctcccatatatctgtttacatccatatctttatataccctattggttctctctgaagaaccttgactaatacagatgggtaacatcagactctcttaaaaataggaaatatttttcttctaagaaataccctgggataacaaacatgctgtgtgttaaggcacatgagacccccatggggcagatctcccagggcaccattcacatggaatacattggagctgcataacctcataaccttgccagtatagggtcaagggccaaaaaatgcaggcttcacctaaaaaaggaacaaaaatctgattcaggaagcaatatctgagccttgagcaagaaaagacagactttagaagacttttattttggttactgagaggctgtaataaacctcagaagcaaatcaagggaaacttcattcatactgtagatttttggtgttggagttttatagaattttctagcagatagaagtaccttttctaataaaatgtatagtacaaaaattttcttttcttgtttgtacaaagtcactttatctttctggaacctttgcttctctatttagttttcaccaattagtttcaggagctcaagggcatttttatattcagagaacattctaggctagaatcagtaactacagttagaacacatagaagaaataaatgaagacagggcttttatatccttaaactcactcattcactcatccattcaatcaataagtacttttaagcaactgttatgtggcaggcggtgtgctatgtcctggccataagcctagtgaggaaactaagagtaggctaatggttcaaggaattaaacacatgctgagagagaaggcatcatgtatagcaagaaatgcagtcacaccattgaatgaggcatcagtgttgttctctgaaagctgcattttaaaaactataatttggaagatccaaatgtgttgaaaattgtccttagaagctattttaactttacacagatgtggcgctttcataacaggaaaatgctcatattttcagctcaagttcttaagtggggaaaacatggcagatgcttctgataagcataagagattgacttgaaatgaatttttaattaaaattacccaaaggcctagtgaaatgatttcccatgactgtccaagtctatgaaaagttctgcccacctctgaagaaagaaatagtgtcatatttacatcaaaaaagcaaaaaaaatacaaggtagtcggttatggatggattgtgtcatgaagttttcttgaatgatacaatgaaaattcaatttcaattcacttttgccagttgcagatcaattaatctcaaaatcttcagtgtctcataaagacactgaagtaaataacaataatgtaaaatcttatgctgagaactgagtaacacattgatatattaacatttctatagaaagtacctactatgttgaaatatctgttattgcatttttgatatagcaactgccccttaagtaaagatctgacagcacaactcactaacttacatttaaatctagactttaacattatttttgagtaaacaaattaggaaagcatcaaacattttcttctcacatgccaaatgccaatataatttcaagtataatcaatgttaactgtggaaatgtttgttcttccaaaagatggctactgagaaggctgatatgttaaataaagttgaaatttaatagaaacttaattagcaagtgctgttaaattctttttataaacaatgctatcttaggtgctttgagagataaaaagatgaattagacgggaccgtgactcatccagagctcacaatacacagtgggaaacagctgtgataagtgctttaatagttgaataaacaacatcaagtctgaaagtattgcagggaatagggtaattaattccagttggggacactttttttcatttgttttgttttttgagacagagtctcactctttcaccgaggcttgagtggaatgcagtggactgatcttggctcactgcaacctctgcctcctgggttcaagcgattctcctgcctcagcctcctgagtagctgagactacaggcagatgccaccacagccagttaatttttttttttttttttgagacagagtcccactctgtcacccaggctggagtgcagtggcacgatctcggctcactgcaatctccaccaccctggttcaagcagttcccctgcctcagcctcctgagtagctgggattataccaccacgtccggctaatttttttgtatttatagtagagacatggtttcaccatgttggccagactggtctcaaactcctgacctcaggcagtccacctgcctcggcctcccaaagtgctgggattacaggtgtgagccaccacgcctggcccacccagttaatttttgtatttttagtagagacggggtttcaccatgttgcccaggctggtctggaactcctggtgtcagataatctgcctgcctcagcttcccaaagtgctgggattataggcgtgagccactgcgcccggccagggacaccttttaagtgatatacatcaggtgaagcattaggtgccacaaaggacaataatacaaacatatgatatgaccctttcctttgggaaacttatcttcttggaaacataagacatacataaaatatatgtctacatttatacacttatatatacacaaaatattatcaaatacacaattgtatgcaaaagaataaaaagtctttgaccagaatgtagaggctctgagagttcagtagaaggagaagttggtatcaacgtgagaaatgaaataacatcttggagaaggtggaccatgatatgggagaggaagtgctggaagtacttgcagaagcagcagaaggtaagacttgaaatgatgaaaacaatgaatgaaggcagaattgactacatcctgttccatgaacctcagagactgacctggccaaagcatgaggtcttctttggggaaccttggaagaactaattggttgcattaagtgtaggatgggggtgctttgtgaatgccaagacaaggaatccggatttgatctgataggaacaggaaattctcgtagactgtcaagcagcctagtgacacgtgaaagcaactagaaagattaggcttgtgattattgcttttttcaggaaatgttttatataaagttcctctaaacagtttataaagctttagacagatgtacaatgaatgttattattacatcagacacatacagagaactaatgagtgtgtatacaaccctaacactcgtgaaagtgttctgtaaaatcttataagtaagactcagaagaaatcatttagttggcctgctctaccataaaggagtagatgaaaaacagagataatggattaacatttgttaaaacaatgtcagagaaaccaaagtggaaatgctccatgaaaagaaagatttatgtccaaaaagggcctatcacagatattttaagaaccttcagaaagtgtcctgaagttaaaaaaaaaaaatgaaatttccttctgtaaggctgttttctgtttgttggtttgttttaagagggaaatatctttgagagttacaaactggtcattacacctttaatacctgagaagaggcagacgcaacaggttgccagcaaccagcaaaccatttaatgtaggtagcaatctgcatgaccttatgaggggaaaatcagggaagatcagttcaatttccacccaaaacacagtaatagatattagtgataaggaggccataatgtggctgaatttttgtaaggctttagggtctgctccagttggcattcttcttaagaagctacacagatgcagcctggggctgtcacatgtggacatagatgatgagggtttatatccagatattatttattgtttaagggtgtctcaccattaatttggaaacatttgtctgtagctgataagctcactgaccaaaggtgtgtgctaatggcatcaaagtaatggaaatcccctccatgtggactcacatgctcctggagtcacattaccagctgggctcactccttcccactgactcacaatgcatgtttttatagctagaagaacctgacaaaaatgatagaacaaaataaatttgtcatcaccactagaagaaaagaaaatccataaattctgcttaagcaaaagtctatatctacggatgagtctgagagtcaaaaaaaaaaaaaatcgattcattcaaagtatctaccacttcaagaaagctgatgatttaagtgacttgatcttttttgtgttcacttggttggtcaaaacaaacaaacaaatttacccttgaagccaagaatatctgtgtgagaatgtgtgacagctggggaaccaacgttcattccaagcagtacctgtgtaaagtgtgttcactttcccttactcttctactgaagtctccactgctccctttagccaagaaggacaaattcttccccagaccccatggttccttcccagtccactcttctcagggccctatcagttcccatagcatcctcccagccaatgcccacatatccattcaagatattaagtttaggttcaccaatatcaataagccttagagatcatagagggccatgctatctgaaaagtccctttcaatatctgcaaatgaaattattctcagatctctggccccatcatctttataatgctcagtccagtgttctttgtcctttgcctctcttggaacatggtgatcaaccttgagttcctgagtcagggaaggatgatgcacatgattgtgccagtgcagctgtgcttattgagaattccacccacagcccagcctctcttttgaatgtgtgctaagtctgggcaaaatatgaaagattttctttaaaaatcttcattcaatttttgacttcccagtgctgcttatatttcttctaacattagttacttgtaggaattccatggtacacccttctgtctgactgtatgctaattttttttgtttgtttattgttgttgttgttggggggtagagatgggatctcactgtgttgcctaggctggtctccatctgctggcctcaagtgatacttctgcctcagcctcccaaagtgctgggattacaggcatgagccactgcgcctggcacaaatttgttaaaatatgaattctaatccttaagaagactcaagttatctacaatagctatgaaacactcagaggcttctttaacaactcatttctctagctttcatgaagaccacttaaaatccttcttatgcattccctctctgctaaccaacgtctataactcatcttatttttaatacagtaagaagttagaagatataacatagctgtgtgctaaatcagttctactgaaaggttttcaaattatttggtaaaggattcacatattcatgtgacacagtgatttcttttgatcctgttttgccataaggatctttagacatgacatgcaattttataaagaaagctagccatcaggttagagatccatttgtgaagaaagactcatatcccttggcctgtacttacacaatgttcaaattgcattatgtttattgagatttttttcattgatccagataaatcttgcttgatgccttttcaaagaattgcttatcagagaacttctagtaaccttctggcatttcaaaattgcatattccctgcataacaactttatttgttgtaattgtcaagtttcaatgtttctaaagatatagctaaagcagaaagatgtatgtgtgaagtattattggatgcctggatttcttacaaactctgtacattctttttttcttacttgaacttgtttgtcacactttataagcttatattttcaaactggttgacacaccttatacctaccatactcatagtttaaatcatttaaaatgcatgctattcacagtacaatgtttcttaactgaaataatgttaataattttatctagaaaatggggccaacttcacaaagcgcctcctccccataaatgatattatctcaatctaacactgtacccacattaaccgttcttcttagtagcataaataatttcatgagtttaataatcaaatattttattaaattatgaaatggcatatcatataaatattttaacaattagaagaattctctgctatgtttacacaagctcttttattttctttattaataaagaacaatcctcactacagctcaacttcagcttcaattaaaacacaaaaaagcttactacattatttatattaagaattaacccaggtttttcccagtgcttgaaaatttttcttattgtaaattggcttaaaaggtctttcaactacagcaatacttaccaaagtgttctctgttagtctgccctgacggagtttccataagtaactgtacaaagagccagtaagtgtggttgagacttgggaaaactggttttattttttatccttttatcttactttctttttattttattgccattgttgtccagattcctaatgaatatggtactttcagccctagctcggaagatatctagaagtggtcccaggaattcactcaacatgctatctgttctcctgggataggatttcatcagaaaaaccagtgaattcaagtcgtagtgagatattttcaggcaatcctaagatgcccattcttctgggcttccaggacaagtgctgtttaaaacctgcaacctctttagtcctccaggccacctatgcctgttacctgtggtcaactacaacccagcatataagcctccccagtccttcattttctcatgggcttctaccaccagacacaatgtcctgaaccaccttcctcctaacttagtccattttgaactgactgctggtcccgcaatcctccatactgtcactctcttcactgagcatctctcctctcctgggcttgatacatgcctgctgggcctctgattccatgcttcctcagcagcccagtccagagaaagctgcttattctatctcatgctctgtgtcgtagggttaaatgatgtcgttggcatttttctccttccccaaagtggtttccaggccatattctaccatcacttgatgaatatctctttttgggatatatggtgtccaccttcacttctctctacctcagttatcaccactgtaaacctacttgttgaagagttcagaagccagtacatttttttttaatcacaaccctagcaactgccatcatcttaagtgacttcacgtctgggcgggtgatttatgaaaaggagagcttatagggccttggcttccctgacttctctattcatcttctctattccacttcaggcagcccaccgcccagccacatcataatattgaataacccaattctcctgaattcataaaatcataaatgaaataactgatactaactctaagccttagctgctaatcacatgcagtgtatgatcattttactctgtaataatcatacattatgttacagggttactgtgagggttagtcagcgataagaaaatgaagagttgggaatagtgatggaaaggatttgaaaggggagactagtagcaaagagatcagtggaaagttcattttatttggagcgaagaggttcctggaagcctggatagaggcagtagcacaggaggtaaagagtgtcagtttcctgagacatgagtgagataaaatcgggaagatgtaataacctcttggatttagagaggagcaagaagtagaggctgactccaaagtggctagcttgggagaataattggattgtagctctgttcatgcagctggaaggtggagcagataaatgataaatttcaggtattattaagccaaactgtcaaaaaaaaaaggtagatatatgtgtttggaattcagaagaatagccagagtaaaagataaagctgtgaaatcatcagcatataaatgttattgaagttaagagagtagatgaaactacccagggagagtgtgtagaattaggaaaagaaaggataaatgactgaaggacctcaacatcataggcatggctaggagacacagagtcaatcacagggccagagaaggaagtaatggttacaaatgaaaatgatttaaacaataatactagctaacatatattgagtgcttattattaccaagtagttttgctatgcattttatatgcattatagtagaggggtttaaagcacacgtagcgcttgggttcagattataattctaccacttagtagctatagccattaccaaattacttaagcactctgtgctgctatggcttgaggataataaaagtgccaaatttatagagttggcatgaagcctaaaatggttaatggatcatttaaggcaatgtctgactcatagaaagccctatataaggattaacagttatttttattattccaattttaatttcacaataactcaatgaggagacatgatttttatcactatttttaaattgagaaaactgagattctaaaaggttacttatagcaagtgtcactgttgatatttgaaagagatctacctgagagtccaagtatttaatgagcaggaaaggatgttgcagaaaacaaaaaagcaaatagttttaagaagcaaagtgattaaaagatctaaatacaatgacgtagtcatgaaaataatccataaagcacattcttttaattcatctgctaattcatctaatagtagcaatagagatttgatgaagataacatgatttcagagttggtcaataacaaggaactgttaccacatggaaattgagctacaaagagtctgtttacactcctaccctgaactgtgtaccaaggactcccatgtgcaaacttgttcatcacccaagagtcactgtgcacagaagagcttatagatatgatctgcaattatgtcaatacaatgaaaccactgggttctcctcaaatttagtgagctatacttctatcgggagtttcacaattctccatttggcagataagttttttgcatactactttgcaccattctcatggacttcattttaaaaaattattatcttggtgtctcataacattttcaatttaatatgcttttagttaaagaaaatataatttatttctgtttttctttaatccatttaaattaatccatttaaattaaattaatagaatttaatccatttgtaatgtaaacttcacaaaatggatttataaatcccttggcaccagaagcagattacaggacatcatgcttttccttctccttgtatggtgccacagacataaatggctcatacgtatgggacattttgtgtcaacttttcctcaccagtacatgaagcttatgttcccctatgttaatggtgatttaaggggaggatcatttagcaagcaagtcaagtggttcccattgcatttcagctctttcaaatgtggtggctgcaaatgatgctgctgtgctttgttgtaggtttctatataacgctgggcatggtgccttatttaacagttccctagtgctattttggaaaagccctctgcagaaaatgccagaacacagcttgaactcttgtcccctgtcagggagaatctttctatcagcgggatttctcagctgtttcagaaatcattcagccctttaccggtaaattttgttcctgtaaaatatgccaactgtagcttatcctaattgttcatcctaagagctttagaagcaaagatttttatctgggaacttcagcatttgctacaaacttttatacagaaatcttaattttaattcactaaagattttctcttgtttttcaactcacttttaaaaatatattaatccttattttcattttcatcaataaaatgagattttctttttctgttaagctagtccacctgcaattaacaacaataatttgctaaattaagagttagtatatcctttgttatgttatataccagattatcattcatttttattctttgtggtgctattattatccctattttacagctaacaaaactgagacatagagaggattaaaaaaattctgaaagttagtaaatggtaaaaccagtatttgaatccaggtagtctcattccagagccatatttgatgaacaaggaagatctagaacattaagttaatgtatcttccttgtgatgaatcaatggtaactattctgatatctggattaagacaattctttacagcctttggtgagtttcaaaagtccagtgtgagttaattatttggaactcagaatacaatgctagagaggtctggtgctctgcccagcccacaaaatctcatttgaaatctaaagtcggtgaaatacagcatatttatagtaattaatgtcaaagctatgatgttgcaatatcagacatcaaggaaaacataaaacagtaagaaactttaaaaaatttttaatagtattgcttgaataaatgttaggtttaattatacaatgaagggaaatataaagatctattatagtaagaaagccataagaaaagaactgaataagggatgttacaagacatgctaattttcaatgaagtggaaaaattgcaagcagagaaacagaaaagcaggcaggtcgggatggcagagggccaggtggtatgcagaaaactgaatacacacagtactaacaggtcatacactcaaagggttcctctcacttttaagtatggtatgttttgtggaacacacacacactcacacacatgccacatttctactaccctgtctgaccacctaacattaattgctaagaatggggccagcccaaggatatccatgcctgaaggactgtagagtagtgaacagtctcctgagtttccagcctaaggaaaaagagtaaatgggaaaacagaacatacctttcttaaaacttcaatcaactgtttgggcatcatcaaaattggtttctgtgggcttaagtaggaataatatcaatttaatggattgagataacatgggaaatctacagtacgttttgcagcacatagtagataaccaatagctggtagttaatagtattacaggagaaaacagatgtgcttcctcaagcccccagcccaaaaaggaaagaaaacatagtgcatatctatctggtgtattttaagtcactttttggatttgaggttgagatttggaagataaaacctctagagatgtttgtctttcattcactgtggttgcatttttcatcacgttttctcgaaagcatttactcctttgcccaaaatgcatttctgtacgttagctattctcaaactttttagtctccaaggccttcaagcttgtaaaaattattcaaaggacttcgtttgtacaggttacatctgttgatatttatcaacttagaaattaaaattaagaaatttaaaatttttttacttacctattaagtcaaaaataacaaaccatttacatattaccatactttattaaaaataaactataatttataaacaaaaatttagtaagaaagacagcatgttttcacatttttgcaaatctctttaacgtctggcttaataaagaactgttgaattctcgtaattgcttctgcatttgatctgttacaatatgttgttttggttgaagtatgtgaagaaaatccagtctcacacatatatgtagtcagaaaaggcaagagcattttcatagccttttcagaaaattgtggatattcttttatatagcacctaaactcaaaaagtggttgtttcttttaaaaaaaatttaattaacaaatataaattgtatactatatacaaaatgttgttttgaaatatgtagacattgtggaatggctaaattgagctaacatatgcactacctccttttttgtagtgaaaacacttaaaatctattatcttagcaattttcgagaatacaatacattgttattaactatagtcactgcgttgtgctgaaaattttactcaccattattcttgcatcatcagtgcaaatggtaacacagtgaataaatctggtaacatgttagcattatgatttattcctcctaactgaaatgtatccttcaaccaatatccccccactccccaccctaacctctgctaaccaccattctattctacatttctgtgaattaaacttttttagattccacatttgagatcatgtggtatttgtctctctgggcctggcttatttcacttagtataatgtccctcaggttcatccatgttgttgcaaatgacaagatttccttctttttaaaggctgaatagtattctattgtgtatatatgacacacttttaatccccttatctgtggatgtgcacttaggttaattccccatcttaactgttttaaataatgctgcaattaatatgggaatgcagatatttctttgacctacagatttcatttcctttgaataaatacccactagtgggattgctggatcatatggcagttctatatttaataggaacctccacactgtttttcataacagctgtactagcttacattgaacatgtgattgtttcttaaaggtgagttgcagtgtagaatcttaaatcatattaataaactttgcataatttattacattaaaatccattatctgtctcatacttcatatatatccttaacttaggtatgattttataacatcatgcattgatcatttggaggatattggtttacagatcttacgtaggccttccaaatattgacccattttacttaacgataacaaaaacacgaattttgttaatataaccattgatctcaccaatcttttatctcaatcaaaagtcttttaggtactgggaagctgtcatgctcatggagacaaaggcaagttttccaaaattctaatttttgctagaaagctccaattttatcactggcaacaaatactgtcatttgttttacttgaagtgacagcttaattcttttttttcaattaaaaaaaaaaacctgtgaaatatccaagattgaataaccatagtttgtctgtcagtcttctttcacttaaaatgatgttccacaaaaacacatgtagcctagctcacaatcagttgcacagatgtttcacgtgtgtgcacacaatatattcttcagtgtgcagcaagtctttatgtatactttccatttcatcacacaaaatgttaaaaagacatatatttgagggtgatatttaagaaaattaattttttttgagacaaagtctcactctgtcacccaggctggagtgcagcggcatgatctcagctcactgcagcctccacctgcggggttcaagcaattctcctgcctcagccaccatgcccagttaatttttgtatttttagtagagacagggtttcaccacattgatcaggctggtctcgaactcctgacctcaagtgatcctcctgcctcggcctcccaaagtgctaggattacaggcataaactgtaatcccacagtgctgggctgaaaattagtaatttttaatgtttcatcaaggacaccctgaagtaaaacaaacttttaaaaaacctgtagttaaaaattactagtgaagtctgagagaactctctcaattcttgtggaggtgctgaaagttttactcatcattgttcttgcaccatcagtgcaaatggtaacacagtgaataaagctggtaacatgttagcattatgatgaagagtgtattgattttatggataccctgaaagagtctcagggtctcccaggagcccatggatcaccctttgaggaacagaaccatacagaatgcttctttctaagtttgccttgttttgtcttattttaaagcatctcccttctgacctacagcttttaggtcattgagttacagaatccaaaattgtgactatgccgtaagaatattcagaataaaattcagataataggtgttggttaaaatgaatttagtaatctgtttgctgacagttttgaaatgctgtaggagatattgatgctcaatggatgcttaataggagactctgtcattgattggaacttccagggtatttcttctgaaaggaccccagagaagagagaataaaattgttggcacctgccagttgcttaataccctccaaaaaggctgagtttctaaataaataaatgctgtacttatataataccttgcttgcgtaattgctgatatttgctccctaattgttccaagagaaaggaaatggatggaattatgtcctaatgttgtgccaagagcaaagaaactaggtatatcttcagccctacatataatttgtttcagggccagtctgttgctgtcagtggcatactctgctatttacttttagcaaccaggatttaattaagtgcagttcattgcccccttcacagttcttatcagatccttcagaagtgtaaagccactgttgctgcctgaaacatgctgcccaaatgggaaaattatgggaaaaatatatctatttcttccccagaactggatgggaaagtacccaaaaggagaatatatataaatgagtgaatttcttacatgtgtaaatatggcaagttagttaattaaagcctattccgtttggctctcagatactattaggctaaaaatttgcttagctcttagtccccactccacaaagcactgtcaccctcaccaccacagtctggcatctagcagcatttcctctgagcgttagagtgcaggacctggacctattgatttggggcagagacagacacagttctttctcagaggtacatttgtattatcccagcttatgaaaccccaaagcagtttattaaattctgtagtgataaatgtaagtgttacaaggatactctccatagaaagggaaatagaaccagggagtttcttaagattcagtcagaataaggccaattagctgggtcactcaaatatttgagagcactgagctaagcatatatttcaatagcaaaggtaaatttgtcattacagtcttttccatgtgaacttgtcattgtcatttttgcctgggcatctcctcttcacattggaaagagtgaggcttgtccattgtcagataggtcccaggcatctcagcattacttcttatcgttgtctgtcctttgattactacgtagcctcctttagctagaaattaaatgaagtaatggatacggatcacataataaaatgcttggcataagttaggagagcaagtattaatcccctttctgatgcttgccttttctatgcttctgatgaacactttattctcttaggtatccaaataccctaagtggaattattgttaagtcttgtcactaatggttaatatttactgagtgctcactgtgcactaggcattacatttaataaatttttaaaatacattatttcctttactcctcacagcaatctgtgacaagtgctataattatttccgtgttatagaagaggaaactgagatacgatatttaactaatttacctgtctggaaaagggcagagctgagattggaatctaggcagtctaactccaccaaccatgtttctggttggtaccctacactgacactcaagtgtgacctgcctaggcatcattctttatcttcctaaagggactttgcatactctagctcacttcattatgtgttgatttacagtttaattctcagaggacatcttggttcctatatttctatattctatatgggaacatgctaccatcaccttaattcataagcatttctgattgctgaattcataaattagaaaaatatgatactcatgcccacaatgaaagcaatattccactattcaggaaaataggttcgagtaattatcctagcatacattcacattttacatcagtatttattgatcacttactgttttccaggcattgtttttgtttgtttgttttgttttttgaagtggagtttcgctcttgctgcccaggctggagtgtaatggcatcatcttggctcactgcaaccttcacctcccgggttcaagtgattccccagcctcagcctcccgagtagctgggattacagccatgtgccaccatgtccggctaattttgtatttttagtagagatggggtttcttcctgttggtcaggctggtctcgaactcctgacctcaggtgatccacctgcctcggcctcccagagtgttgggattataggcgtgagccactgctcctggccccaggcattattttaggtactactgatacaccttagaccagagattgtcagcctcttcacattgacatttcaggcaaatcatcctttgttgtgggcagctgtcctgtgctttgtggcatgcttagcagcatccttgccttcctcccacaagatgccaaatagcatcaccctgtctccagttgtgacaaccaaaactgtccccagacattgccaagtgtcctctggagagaaacagcaaaattgctcctggttgagaccctcttgcctgggccctgctttcatgaagcttctatatgaatggactgaaaaaagaagacaaggataaataatagaattgcaggtaatattgatagagcaggagggaggggcctatttaagtatgatagtcagatacctcacctccaagccttcttcacaccccaaagcactgctcaaactaaacttctctgaattgattaagtggcatagtactgcaaaatctccttcagcaaaaggcttttatgggcctacttcgattatagctcatgttcaagctataaacacagctcttcctgacctactccaggactcagaaggaaagaaatacaagttaaattaaactcagaattggtggcagtgtttttgtttgtttatttctttattttccttattcttattctgctcccatggagtcttagtgcttctctctatttagaaatgaagagggactgcaagctcagctgccagcctggcagataacaacagcagaagttgcaacatcaccttctgttctgtttttatttggacacatttccctgagatttactgagatgggattaggataatagttcagagattattttcgcctagcccagtgaatacttgaaaaacaaactatcttttcaggtataaaagattgcacttcaaaagttccaataaaagcctttgatgcaaatttctcctgatctaagtttcaaactctgccagaaatgactgttaatctacagttggacaatcagagatgataatgctttttatattttcatatgattatcaccattttgtcagcagcttcctatttgcaccttgcagaccatttcattacctctctcagcaacagctatgggatggtgtgactgactccctgcctgcctgtccctcctctgagttctgtctccttttcctcaacactctcaggctgaaagacaggcatccatagattaacaattctccctcattggtctgtagacaattgtccttctggctttactctgtattgatgctccaggtccaatagctgacccttgttgtccttcctaccctctttctctattcttataggaactgcattgtcagcaaaaatacctaatgcccatggcaaggacctccagtgccaatcacagacattcattcgttcacttatttgttcattcatcctatagacatttatggaatgcaactgtaattcagaccacatgctaggtacagataccccttgatagtcctaccaatctttctaggcctcttgctattgggtgctatgctttaaccaactgcctagaatgtctcccatgatttgaacctaagcccagctaaattgtttgcttcatctttaaaaaccaatttgaagtttatattccttccagccttgatctagcctaccccagaactggctagttccctattttcatgttaaagtttaaaagtttattctaaaagcaaaggtttgtttttttcttatggccttctagctgcttttcattgcatagaaaggactaattggcagtggcggatgttgttgttgggttggtttgttgttgtttgcttttttgggaggggaaggcatttgaattttaccaggtatcatcaatttacatatctataaacttggggtaaagactttattattaatcaaataacggatgtgctattttataataaatgttgctactagtaaaaataaatattaaaataaaaatctatctagaatatttctagaacagagtagataatatatgaatataagggtaagacagataataatcttaactatctattgaatcatagaatctcaaagatctacaagaacttattagtgacttaccaaatcccatgcctaaaaataattataactattaataatgtgataactagcatttaatgaataatgtctatgtactgtgttatcagtgaagcatatgattgatttagtttaatactggaaatttctcctctccagcactgggaactggccactgatcacagcagccccagatgtttcacagcaactctgaatattacagacttattccgtttacccaggctaaaccttccccctctggaacctggccgatcaggcctagtctctcttcctatgacagccccttaaatatttgacaacaatcatacttttcttgaatcttcttttatccaggtggaacaatatcaataattcatttaatcaatctatccacttatagtatgagattcttttctggaggagttcctccaatccctggattcaacctatccctcctattgaatatcattgcgtctcaaattgaggcccagataaccaaacattgtgtttcaggcataaacagagctggggaattctccatttggttctttattttattttaatgtaaataagttgatataaggacttcagcttggagttgagtggtggagagagatagagagcaaggatagaaagcattgtttgccagagagctgagtttcataaattaagttacatgcgtgctgactttcatgtatgccaagagtttaaaagtaatccctgaaaaacagtcacatagaacagttatggcacagcataacccaccaaataggcattaatatccttcccagcaccattattatataaggattgtactatattcagaacttgtttaactactttatagctgcctttcaattaatatacattgattattcactggatatgaggtactgctacagtaggcagaagcttgctaatgaggactcaccacattcttcccaaagcagcagagagtctgtgagaagccactgaggcattctgggaaccctctagggcatcctagagccaaattgaatgtggcatcaggatgacaagaattaaggcacttgggagctgcactggggtccccccttaaaggttgcccaactggaagctgggtgtctctgagaaactcccacccttcatgttgggattatctgggctttagaaggagcccactgatttgaggaagagtacttttctttactacttaaggctcttgaatgccatcttactacccaatcttactaccttggtagaggagaacaactttcacattccactttacttcaggctgggttgctttccttccttccttccttcctttctttctttccttctttccttctttctttccttccttccttctttctttctttcttttctttcttttctttcaacggagtctcgctctgttgccaggctggaatgcagtggcgcgatctcggctcactgcgacctccgactccctggttcaagcaactcttctgccttagcctcccgagtagctgggattatggtcacgcaccaccacgcccagctaatttttgtatttttagtagagatgggttttcaccatgttggctaggggggtctcgatctcttgacctcatgatctgtccacctcgacctcccaaagtgctgggattacaggcgtgagccaccgcacctggcccagactggctttctcagggaatcatgctgccttggctccagtgtgaaatctctctgcttacagaaattcagaccctcccagaaatgtcacagcagcactgccctgtcccaaactaacactacctggaattcatgtgagtaactagcatgccataacttagcagcaggctactgcaaacatctctgagtattaggtataactggaaacaaacaaaaaaaaggaatttgacgactatttctggtaacattctggagacatggccagtctttagtgggtacagtgactttgtacctaagagtggcaagatgtgtcatggctcttggttcctcagggcctctcctgtgttaaccattgctgcttttaattataattagagcccatgggttcttagccatggtggtaaagcacatacccaaatattttgaaatcttaataaaagaagaatgcatgatgttagtttaactttcaaaattaacactcattaaaaagtatgtgatttgcattagcacattcttattttgtgataagagtctacaagaatcactcttaaattatggcagcagcctatccccagttcctgggcttaaacacaatatgacaaaagaatcataagcaatgtgttaattagcctgtttctgattttaccttcaattccacatatttcatgattttcaggaaatctgtttattctttattattctctgcaggtgttttgagaatatattcattgggtaaaccagaaatgttggcaacaaaatcccaagatccagtttccttgtctaggctcttggtcagaagcatctgaccagtatcccaattttaaccttaaacatatttcagattatatgatagaaactgccttttttaaaagctgagattatgttttctgctccacattttgagggtagatgccaacatgaaatcttaataaaattatcattatgtaattcacagcaatcagattgtatattccttaattacatgatttgttaaatatccatacattattaagcatcatcttttatacctataaaattataagctcctgctatataatataatctagatctacccggctagaacaaaactgtataattcatcaaaaattacatttttcttcagctgtatattatgttgttctctctaaattatctatcactcttatcatggccaatgtaattgtgagggataatagaaaatgggaataacattgatattttaaataaaaaaaataagctaaatctcttttgagtaagtagtttcaagcttccctcaccagatcgtggcccacttatatccttttattgtcctattcaccctctagtggaattcttagtaagtagtggaagtacatatagagagagtgaaactgcagaaataaaggagatagccaaaaagccacaaaactgaataattcatggaacatgtaggagtcgactgtattatcatcaagaggatgtttttgtgaatgttaattatttatgactacttgtaatgtttatgtttattagttgaggtacatagagaataaaattgcatagcagctagtaaaataacttttaaaagattccagtttaaacacactcattagtttaaaaggctttctgggattacagacattaaaacatttaaatcttactagggagtcaaaaggctctccaaggatttgtagtcacttaaacatctctatttttgagttacaagtttgggttagtcactgttgatttgtatatttttaatcatcaagaatatctgagaaatatacaatttggcacctcactttataatctgaaaagaacagcactgaggcttaaaaaattttttgagcaaaagaagaacatattttttagttcatttcaaccagtctttttccttcagcctaatatggatataaaatgtaactggcattagcgtttcctagtattgctgcagcctgccagaatgttgagacctttgcacaatgaatccattattacaataaatatgaaaagacgacataatattctaaacagctcatcacattctttctaatgttccctgtactgaagaaaatattttaatgtatactaagtatttgaatttattttcaaaatagtgaattcatgctttcaattgttgccctttaggagtccttagtgcacatttgtaaggtaacgacaaactgaatctttaataatgatcgtaatgatcactttaacactggaagaaaactcaatgttttcctaagtttctcaaggtcattttttcactccatagcttttcaacataatgtagttgttgtcatcttaggaataaggattttcacaaagtcaggctccagcctgtctattctgattctggaaaacctttggcaattttcatgctaggtggaggactttgttaaataaatagtgtgattttaaaggtgctcattatcctcaatattaaacacttatagtgaaacctgcatatacccactagggcagtgttacttattattaataagatttttgtatgggtttttgagcctgttcatgaagttggcaaaagctgagaatgttattcgtcccaccttgtaatgtgggcaggtaatggagaattactattgactaagggaagaggaaaatttaggctttgttgaaggaatattaactttagtagtattcctttccattctagatatctcgattcatagaaaaacctacagatatgtataaatccatatagaagatagagaataaatctcaagaagggctctggtaatacagatggtgtgtatacactacactcacaggtggatgaaatggagaggggttccttgatcagaattttgaacaagcacaccctatgaatattattgaagtaaatagggagtctcttcagtttcctgcaacgtcttttctagaactctgtaagagaagaaaaaaagtaagtcagatgctttctcagctgtattgactttagaagctggcttacatattttccactctttaactcgttttctagttttttaaccattttttgaaaaaattgggtcttgcttattaatattttcctcttggtacatctccatcacctattctcctaatctaatctagaaatcaagaaacagaggtaaagacatacatcctggtcccctcctatttatccttctaactgcatgggatgtgatcatctgaactgcactgactgcatatgtactctcttagctggtattctttttatggttcagtattttaagaaatgtctgattgtgcttcctgccttttcagtaagctataccctttaaatcaatattttaaaaggtcatcttgacagttacttcagaataaacaaatgacaatacaacatctctcattagatgatgaaaatcacagtgaaaaactggacacattacttaaattcctgtcttttgtttataataaactaaaaaaaaattcatgttaagaaatggcaataaacttattttctagatgtaagcattttaacttggtagttttaaaattaggacgatacagctcatacaaacaataagaaaccatatctgttatattttacattttattgtgaaaaagggcatattttacatccagtgctgattatatttaatgtctaaaagtcattttgagctattaagtaaatgatgtgaatttaccagagtaataatcaccacttttaactttacttgatttgccacaagtcaatgcctcatataaactgtacattacagattattttagaagcaatatgacatcggaagtaccaaatacagtgctacaaattttttaaagcacagaccacgtattcaaatgatttattcttctttacaaatctccatctgaagctactagttttattattcttattactttatttatttatttattttttgagatggagtcttgccctgtcaccagactggagtgcagtggcgcgatcttggctcactgcgaccctgcaacctccgcctcccggattcaagcaattctcctgcctcagcctcctgagtcactgggattacaggcatgcgccaccatgcccagctaatttttgtatttttcgtagagacggggtttctccatgttggctaagatggtctcgatctcttgacctcgtgatccacccacctcggcctcccaaagtgctgggattacaggtgtgagccaccgcgcctggccagttttgttattcttaagaggctcacagccttctgagaggaagtgagatagacccatgttttcatttgagtgaatgtgagtaccagggtacctgtccaatggttcctctttaggaagcactctcaggattcaaaatgagaataacacacgggtagccactttggctaagatccttaaatttttacattattagaaaagccacatgtataataaattaggtgatatgacaaatcctgaaatgtctccacctaccagtccaggatgggtggtcctgatcagcaggtggctttcctctatgtgatgattcacagaaccaggcccatttcatctcaaagctcagccaacctcttggaccacagaattcctcagattctagccaccagtagggggaaaaatggcatagaaaaagggcagctttacaggagcaggcgcctagaagtacctcgtatcacctttgttcacagcccattggctacaacttaaccacatgacttcactgcaaaggagtctgggaaatgtagtagagctgcgtgccaggaagaggagaacagtcagtggtctttgccacacctaccgttccatatgttcctaaaaatgaggaaggcactcagctattttggactggcttctagggctacctctgtcactaaggaattatgaaaaatttagcaagttctgacctctgccttttgtatgatttggtctcataaagctgacagtcttaaagaaaagacattaagtcaacacacaaataaatatatcattacaattttcagctaatataggctctaaaagagcttggaacatgcctctctggcacttacaacagtgcttagtgcacagtaggtgctcagcaatagttgttgaattaatgcatgcctacctccatggatgaatgaatgaaaatatatgagggggaaaaatagttgctgtaaaagaaagcagtaggggaatctaaattagtttggcaatcagggaaggtctttctgaggaaataatattgacattaaaacataaaggctgactaggagttagcaaaaagaagagttgtgtggtggacaacatttttcaggaagagggaacagcatattaaagcatctgagttgggaagagattaatacatttgaggagctggaaaacggccagagttataagaccccagagggtctgagtggtaatggcagaagtgaggctaaaaaaataggcaagggctgtatcaggcaaggtttataacgtatgtctagccttttggtctttccacagtcacgatgaaaagtataaggaaggaaagggggtgatgtgattatattttcattttaaaagatcatgctggctttctgtgaagagtaggttgaggtggggtaagagtagaagcagtaagtttgactagttgggagactattggaaatcatccaaataggatacctaaatcagtgcagtggtttaaaacaaggtggaagcacagcagatagacggatttgaaatacattttgtagataaagggaaattggagtagatgggtaaatacagcaataaagtcctctggctctgtttgtcattattctctttagagatgccattaaaatgactgctgccactaaaagtagacctttcaagacagttagtgttgctttattcagattcttttagaagctttgttccgactctcaagatttttcaaaaatcagtcaaatagcaagcatttaaacttaggctagattactgggattcttcaaaacttgttccaagttatattgtatttctgtttccctttgtcttcaagaaatagattaggtaagttgcataatcacagtgaagaattttgtatgtgtgcatgtgtatgtgcaaatgtatttttaagtgcccacacacattaactttaaaatatttttgttaaaaggtaaattttggacaatctttaatatttttctaatgtggtactgttggttctcatttttcaatttaatgttttaggaagtaattcaaatattctaatagtgttaattgaagccagtgttctgctctttcggagaccattctaatgattcaggtgtttattagaatgtttttttggagataagaacactgtgtacagaaggctggaaatttgatgtttttgcattccattctgctctcctctctctccccattcattcttgggttacaaacttatctctgtctgtatttatcatcttgaaatggacattatagtgatttcccagaggtattgagagagctatttcaatgtttataagtcagcttttaagatgacgtgcacaaaagaagattatgatcttgggattgatatatctgcaaaacggctgctattgcacaagtaagaatgctgtgagggactggtgaatttcctgtggggacgttatacccacgatcagtgaaatacttctggtaggttccctccctcaacctaaagatagagcctcatttctgtgactcttctggcaatagcatttacatgtgttaaatgttattgcaattttaaataatttatttgaataattttcatccaaaaggcactattttgagctacaagttgttggattaaattaaatgcttatttgcattctggagaaaaaaattgagggaattatgatttctacagaaaaaacttttggttgtttctgccaaacacattaatgtttataacctcattttttcatttcatgtctattgggatatccttcactttctttttgatatctactccagattaacttttacctacattctgttttaagattttttcaaagatcttttaaaattatttctttattttccattgctttttcctgtcacatagccacctcacttcaagattatgctatacgtgatccaaagcataggaaattgagggaaacttgtaaattcactttgttgctctgacttcagtttgtatgtggttgtaggataataatataaaaatgacatgtgtttgccttcaaattccaagctgtgaattgtaattcctggcaggtatttcacttattccaaaagtggtagttcacaacctagcaaaagaaaaaaaaaaactgaagtcttggataaagtcctttgcacaggagaacttgagagtcaaaagacttaaatttgtttcaagtttctccgttgcacggatcagccaagcagatctctgattacactgctttctggcacctggcacctgaaaatcttcacttcctgaaagccaagtgtttgaagacaaaacgttgaccttccaagcatctggatttactgccaaaacactaaataagaactacaagcagaaagaccatgagtcagatgaactcttcattttatttcaaggatgaagttccagatacatgaatcaactgtaaatagtgaaagaaatatgtgagtgtgagtgtgtgtgtgcatgtgcatgtttgtgtgtttttcctacttgtaaacatctgctttgttcctacttctccttttgagacacagtctttttatagtaatggtggaaattagatcctttcctttttcgacactgttaatcatcgtttgaatttgaagccagtatctctacctcaaaatagaatgaaaattcagtttcttagcctgtggcaccttcaggcactctgttagcattcaataaacatttattgagcttagagacagacactatactaggcccagaaggcaaagctgctgcaattggatgttctgtcctaatattagtaaataacataaaattagtgcactgaatcagaccctttgtcctgctaaaaccacactttttctattatagtagtactaggatatgtgttaatacagaatatagttattctttttactgtcagattaagaatttacctctaattcttcatgtacattagtaatttattatagttctactaccctgaatcatttgaatgtttaaaaattattttctattttcaacccaatcctactaatattagtagtacacccttttattgatcttacacttacctcttgaaacaacaatagatttctagtggataagctcattgtcatcttttccagaccattcaaagctttctagactttacgtcttcttttcgcaaacagaatgccccatatttttgtagtctgtctttatacagctacctccctattctccttagacacttcatatatatcttgtgagctgtggcaactagaattacaagtggtatttaagatgtagacacaatgtttttgtaaaaatggccacattttgttaatgtataattgcatttatgatatcatttacttattagcaataccttcctagtaagattactatgaggataaaacaaggtaatacttgaaaagtattagcacagtgcttgacatggtaaacactcaataaatgctaatagtcattactatttgattttgattttataatattttaatggccataccccatatgctagccacttttattttttaaatcctaggctttcctcattcaataatagaggatatgcttgagtcagatcaacattgctaagactcatttctgatcttgtttgtttcattcacttaacaaattaacttaattaatattccaggcattgagctatgtactggaaatacagctgccagaagggcaaggtctctgcatttatagggcctaccataaaatggaaaactaataataaaatttcattacgatgcaatgagaagtgcagaatcaatgggagaacacagaaggggaagctaacctaatacagggaccactgtggtttcctggaagaagtgatgttaaaactcagacctgggccgagcatggtgactcatacctataatcccagcactttgggaggccgaggtgggaagattgcttgagcccagaaatttgagaccagcctgaggaacacagagagaccctgtctctgcaaaaaatacaaaaattagctgggcatggtagcccacacatatatagtcccaggcactcaggaggctgaggtgacaggatcacttgagccaggggggtcaaggctgcagtgaggcatgatcatgccactgcactacagtgtgggtgacagattgcgaccctgtctcaaaagaaagaaaagaaaaaaggaaggaaggaaggaaggtaggaaggaaggagagaagaaaagaaaaaagaaaccacaaaacagcaacaacgaaaactgagacctgaaggtgagtaggagttagccagacagagggcgggggagggaggacaaaagtggaaagatcaccagaaggaatagcatgtgtaacacttggaggtgaaagaaaatactctttattgaggaactgaaagaaattcagcatgagctcagaactcatcaatgagttctcttcatccatccaatagcattcagccttcttagctggattttgtgaaatttggccctatccacccttcccattactttcctcacataccccacccactgttcctacatgcccaggtgtttgcttatttccttgactggaatgttcttcctcaaattttagaattcagggagcatttactgagtaactggtacatgccagacattgtgagctatcacccttccaatgtcttttcattcattcttttgatgaaaatttattaagcaccaacatatagagggtgccatgctacttttccagcactagtttaaatgacacttctgtgaaggtccccagatgcttcaactgacataatctcttctagttttcttcattctctgaagtcctaatatcctaaacgtgcctctcttctgtctgctgccactttttgtactgcatgacagctaagcagttaacgtgaatccgaaatctccatgagacttctgttctaggtggccaagtccagggatccaatctatcatcgggtaatgcccatcaccctgcattaacctaggagctgcaaagttcatagtaaatatccaaaggggtggatacatattctgaacctggataatggtgacgttattttggtacttcctaatgatccacattgccagaacaatgactttgtttcaaagtgatcatatctgaatctagtataatttctcttaaatgtcactatttcctgcaggattccaagatttacataaaaacctgatgggtgaatagtatgtttttacagattacacatctaaaatacttgaaactgtatcaccactgctatcagctccgtactatgcatttactcatgctttttatttattcttataatcatggtaaatcaaaaaagggaaaaaaacgaataggcttctacctgttgattgctaaaaataaaattcagcctcacctttagcatttcaattttatagtcctctacctggatttatagctaatatttttagtgattgcttatgcatttcctaggcacaccaatctaatttgtagcaggttctgtgattcatagtgactactagaattgaattctgcttgtctctatagtgaatactatagttaaggcttgattctttccaatgtatcatttatgtgattgaaagaacaagaaaaaaaaaacacttaacactaaagagttttttaaaaataccactgagggtcaggtgcagtggcttatgcctgtaatctcagcagtttgggaggctgaggtgggcggatcacttgaggtcaggagtttgagaccagcctggtcaacgtggtgaaaccccatttctactaaaaatgtaaaaattagctgggtgtggtggcacacacttgtagtcccagctacttggaggctgaggcatgagaatcgcttgaacccaggaggcagaggttgcagtgagccaagactgcgccactgcactccagcttgggtgacagaatgagactccatctcaaaataaataaacaataaaaacaaaaaataccactgaggaatccatgctaaaatatcaatatcaaacagctttgaattggagactcacaatacagtatatgtcttcagatacattgtctcacttcagcctccttatatctatccaaagggttttgatgagtttttcttgtcagccatttcagataatttactaaagccaacattcagagtgttcctatgagaggaaggcttgggacagggatgactcctcaaggaactgtggatttatttataggacttgggtggtctcagtaattcacctggtgagcttgctcaattttttctcctgttattggccaaccatcttccagctggattagtgacattctcaaatagctgatgtgatagagctgttgcaaattggcaggaagactttcaccttggaaacagcactttgcaaatgtccctgtgaccccatttcaatgtagttacttcccatgccttaccttagttaataatcctcgagcagttaccagttactgagtgacagtcgtgtactaggtacaatacattcattatctaaatcaaaactcaagatttctctaagtaagctctattattacctttatattaaagatgaggaaacgcttttagagaaaataagtcacagatgtaagtccatgctgttggtcactatgctgtacttgccagtgtatactcagaacacacgcagtacctttaatactaactgcaacaaagttaaatatgaaagttaatctcttgggaacattctaaaaacatacctcatatgggtacattctaaaaaaatacctctgaatccaaatgcagattttataacttatcttccatgtgggataatctatgttccactatgtatgtgtttagaaagtggactgtaaaatctgtaaataattttttttttttgagacagagtttgctctgtcacccaggctggagtgcagtggtgcaatcttggctcactgcaacctccgcctcctgggttcaagcgattctcctgcctcagcctcccaagtagctgggattacaggtgtgtgccaccacacccagcttatttttgtatttttcgtagagacgggatttcaccatgttggccaagctggtcctgaatgcctgacctcaggtgatccacctgcctcggcctcccaaagtgttgggattacaggcatgaaccaccgtgcccggcctaatttttttaatagggataataatattaagaaattcttttactaacacatgtagtttttcagaactccataatatgcaggcaatatatgatattcgattattaaatccagcaaaaatgtaaacccccgtttaagtagacaggtaagtaaactgctaggttcaagaggtgaccttcccacactctgcctacctactcaagcccttctctgaatcggttattggacatattcactgcctccttctctcttacataattggtgttactttagagtaaggggaagattagcatcacccaaacataactcagaccattccagcccaccaaggcctcctcccccacctcccacctccacttgcctgctcaaagatgctaagaatcctacttgcttaactttatctggtaaaggaaatggtggctaaaggcaaaactaagcaggtatttctgagtattatgttcacctgtattagctattattaaatgaaaaagaaaagttctcagataagcagactattgtgcattttacccttgtatctttcaatttactcatgtgtcttcactttttatcacagaaattatatggatattaatttctaaaaatatccaaagggtaacttctcatgttaaattgtgtcctcttttctataagtgtttaggtttactattaataattaataagacagtaatattcctgggagctggattgcccaagtattgttttaaccaaataactcactgtatttgagcacaataaaactcttactttgttagagtgtgaatgggccagtcctgccaggagactcataacgttgctatggaatagacagactttgaggaagaagttaattgttcatatatacaaagaaattaagtcttcattttacctattctctaactcgtcaactttcacattctacccttttaaatgagcacaaaagggaggctttacacacataaacacatgtttacacacacgtgtgcacactgagtgatattttattgtcaactgcttctcttgctgcagatgaatgaatcaaattatgtgaatatattttatgttcttgatagtaattctgtggtttgcattacaggatggtttatatgattatcaaatgttagcagtttatagaacccttttataaagttatagttataagttgcttttatctcttgaattagacatgtatcagttatgaattttatttccaattttagtgttgctaaaccataagcacagatgtcaatcctagaagaggtgaagtaagccactcatgaaagtgattcgtcttggttaagtcagtgaagactggctatacagtttggattttattttctgcacgtcttgctaggaattagaagaatagaagggttcttcttacggtaaatgtctgacaattgtgtcgttttccttctcctctttaggggaacagggtgctaaaaagacttgaaatgagctgccagtcaccattaaccccttcccttctgaacttccaggtcacggagcagtccccaaatgctttttactttcatattgaagttctcctagccctgccaggtttcctaaaccacatttcacagatgtcacaagtttcaatggtgtgttttttcttttgtaggtttctccaaaagagttttattaacaacacataaacttttagaatatacaggattcgttatttaaaatttcttcattataaaaactgaaacaaagagaagagaaaattatagttgttagatgttgaaatgcttttttaaaacatagtaatgccgttatctaaaaatttagtgaaatgatgttaatagtccaatagtctattttacgtaatctttttatatttgcatagcctttttttgtttgtttgtttttttgagacagcatcttgttctgtcacccaggatgcagttcagtggcatgatctcggctcactgcaacctccacctcccaggctcaagcaattctcatgcctcagccttccgagtacctgggactacaggtgtgcaccactatgcatggctaattttttatattttcagtagagacaaggtttcatcatgttgcccaggatggtctcaaaatcctgagctcagacaatccacccacctcagactcccaaagtgctaggactaggcatgagccactgcacctggtcctatttgtaaagtcttaatcaacatctttttaacccctaccatttctcctgtccattggaatcagataatgtaaggttgtcattctaaaaatactgaaagcctgtcatagcttgctttaacttttcttgcttttgtgtatttcccaaatatggtacttttttggtattgctcagcaacacttgtcaagaatttgaatttttaaaaaaacttgtcaaaaaacaaaatgtgttataaatcagtcagtttgctttcattgtccaaactgaaagagttaagaaacaatttcctttgagtggtaaaagtaatctatttttatttatcatgtaaatgtttatattgtaacacaatgtcttttttaatgagaaagcaaaaatatacttaaaaatcattagaataccaaccatttaatttttctttaaaatatttttataactttaaatggatacactaaatttttcatacatcactctccatttagacaaggaagactactaaacagagattttaggggaacaccatgagccattctccaatagaagtctatccaaatttcagtttctgaatttgagggatgaaattaggttatgcatttgggaaggaggggagacatcacatagctctgaatgaaaaagaatctgaagaatttcacactttcttccaactagctcaggagccacacacactgccatctttgtattgctagaatacacctttggacaatcattcaggaagtcctggccactattaatgaaacctctgctcagctacttgctttccagctttgctcataaaaattaaagtcagtagttaaaatggatgaaagagaaatttcaggagaattggctgacttcagagtctcaaactggcatctgtttgactccaaaactccaaagtcttctaagtagatattggctaagaaaaagatgaaagaagctgactgatgaaactgattcaagcactgaaactaaaaaggagagagtatgcagcaggatataggagaaaggctactaggaatccctcaacactagccagaatttagggggataatttactagcagtgacaaatcagactcaaagcacaaaaacagtcaggcaaatctagaaattacaatctttcagtagctgtttaaacagccaaattagtatccaaattttgcttttataaaaattcttttgtttctttgtttgtcttttgagacaaggtctggctctatcacccaggctggagcgcagtggcgtgatcttggctcactgtaatctctgccccccgggttcaagtgactctcatacctcagcctcccgagttgctgagacaacaggagtgtgccaccatatctggctaatttttttgtatttttgtagagatggggttttgtcatgttgcccaagctggtctcaaactcctgatctcaaacagtctacctcccttggtttacaaagtgctgggattacaggcttgagccactgaatgtggcctttatcaaaatccttattaagtcaaagtttaagcccaatatgttataatactgtcttgattaccaccaccaaagcagtgttaagagcattcaagtctaaaacagaacagaaaagtccagagaacaacactaatttatttctacagtgctcattttgttcttttatgagagtgtcatttctcagcatcttggacagtgccctttctttcttaataaaatggccagaattaaataaatatggctaacactctttctccactgtaaccacggctgaggcctaatgacaattcagggtagaatatctttcagtgctatggagtatgttgcactgttctttagcttagagaactgggattttcaaatcagcaccttaagtggaattttgcagcctgcatttttaaaacacctactgccttcctatccatttactgtacgtgtgtgtgtgtgtgcacgcatgtgtgtgttatgactggaaggagatgatagcaaatatcttcctttaaaatagtactatccaatagaaacaggatgcaagccacatatgtaattataaattttctagtagccacattaaaaaaggaaaaagaaacaggtgaaattaatctaaatatattttacttagtccaatatatcaaaactattatcatttcaacatgtaactaatataaaaagttattaatgaggtcttttattccttttttgtactgtatgcttgaaatcctgtgtagattttacacttccaacacatcttgatttgggctagccgcatttcaactgctcaatagccacatgtagccaatgactactggactgtacagcccaggtataaggcaggcacttctttgtacaacagtatctcatttgaaatgcctagcttctgatatttcagctctcagtttgaacatgtttttccttacacaagaaatccatatatatttcattctagattctaacacgtacacatacacacagacacacacagacacacacacacacacacacacactcatttaacatctgggttttaacaacctattctgatcttcttctaaataaacttgaaaaataaaatacttcctctcaccagccctttctgaaggagcatgtgagcctgttatcttgcgcattaaccggtgaccgtatttagtgctgtcagagctgctgactcattgcctatgaatggccccgctgccagtggtgattgtttgacagaatgccagtaatggctgcctacggctgctgaaaagctgaccttgtaacaacatccacattcttttggttgcttttgctgacatactctcaactcaaaaactgttttcaaaacaaaagtataatgaagtattgagcttttaaaagcaattgtatttcagttctttaaattatctgagtgtaccaaggagggcagaaggcaaagaaatgagtatacaagagagggaaccatccttgaaagttgacatttgagctacaggcatataatacttggggacagtgttctaagacaccatgggcatccaaatgaagcaaagctgtgtaaactgaaaataaaattctaagccccccaaccatcggaatggacccctcctctcagccaagagcattccagttaacctggaaaactagttcaggccgtgagaggaagtggggggtcagacatcctccctttggaattcaggcacaactgagcagcattaacattaaaacagagatcttaagactttttgtagcaataggtcaccaaattccagcctgatctagtatagcatcacctgacagacagcaggccctgaaagatatcaaagtattttactctaaattatatttctttgacatattttgaaatagccctgcaaagctattgcttgtggggaaaatctgcattctgtagagaatccccttccctttccaggtctttttcctgatccaggagagaatcgactaagagtctggcacctttttaagtctaataagaaacatttacaatctaatctctctgaagcctgttacttggagacttcatctgcataataagaaccttggtctccaaaaccccttatcttagcccagacattcccttctgttgattccaggtctttagacaataacttaagtcttccaaccaattgccaattagaaattgtttgaatctacctatgaccttgaagctccccacccccgctttgagttgtgccacctttcctgacccaaccagtgtacatcttacatgtattgattgatgtcttttgtctccctaaaatgtataaaactaagctgaagcctgactactttgggcacatgttctcaggagacagggctgtgtcactgaccattgcccactcatatttggctcaaaatttatcttttcaaatatttttcagagtttgactcttttgtcaacaactattatgatatctattttttatctttctcagtatcatttattagctctgtattactaacctatttgaaattctgtttatttgcaaaatgtattccattctccaccctgaaaacattttccccaagtggagcttctaaacaaagaatatgagatgctctccattaattaataagagctaaggtactattaaatacttaaaacagggatcaaattagcagtacttactagacactgctctagctagtggatacgttgatcattcacactatactcaactttgcccataaaacttagtgtatgccttccagctgcagtatgtattgatggccctgccttctgttagagtacaagtttttagattcttctcttttcctggtgatgaggtctgaaactcttgaatcttctaaattcctacttgggctgatatccctgctccctctttctggcttcttttaccccagagtctaatctgcactggtagtaaaatttcctttcagttcacatctcacacataacagccagagtctgttttgctaattttaatcagacaaaggatgagtttcgcatagatgagttttcaataaacaggatgaatgaacattcagctagttgttttggcatattttcaccactagagggagataaaggcgcctctccatccactgttcccaccctctttgccccaagataggagaggtgacagagttaagtgcagaggataatggtcagtgagatcatggagggaaattaagttatatatttggagaaatcaaaaatgtggcagctttcaaaccctgccaacatgttttatgtggcctacccagtttggggcaacatttataaattggaaaatttcacataaatatctggatttccaccctgagcttgaaaatagaaagatgtggccacactgtatgtctgcgcctctgtgtggcagtcagagggagcttctctctataaacaaggcacaaactcttcatttcaactccatcactatcactctctatttttctaacaccgagattaaatgtaagctgttacttattatcaagcttgcatcattttgttgttaagaaccggttgttgttttttttttttttgtactcaggtcaaagatggtaaaaagaataacatagcaagcaagcctcttgtaatttcaaggaaaatgagagagaacatatttcttggaggcagtaaaaaatattcataagagtaaaatatgcaggcacaatgtgactggtctccttgacttacacttacctatttccatcatttacatcagctagatgtccctatgagctttgcataaccctttggaaatacctgcttcccaaacatgatatggcaggaagaagataagggactgggcgatcctgggacccagtcaaataccttctctcagttgtccccactaactaatgactgagaaatgtctctcatgactgattacccaaggatttacaaaattgacatgtgagggacaaaaatctcagtctcacttaaaatagcaggaaaaacatatctgcatgtaacttatactcacagaagaattgcagaactaaaatttggatttaggtaggataaattccaacacacagctgatattctgatttactcatatcattgcttcttgatctgaaaaagaaatgataatataaatattagtaatcatagctaacatctgttgagttgacagttgtgtcaggcactgtgctaagtgatctcctttaaccctgaggaacaactgtgttattcaacctcagagatttgtctcaacaaccttaatatatgcccttccttttaggacaacggttctcaaaatgaagacactttcatgagattcttgaggttaaaactattttaataacaactctatcatattatttgcctttttcactatgggacagtcacacagatgtgcaaaagtaatggtaagtaaaactgctggaatctattactaggggttgaaggcagtggcaccaagctctactggtagtaatatttcttcactcccatgtacttccagtgaaaaacaaagcaagcaacagcaaaagcatgttattaagtcttgggagtgtaaatgacgttattttatttatttatttttactttttatttttttgagatagggtctcactctgtcatccaagctggagttcattggcatgatcgtggctcactgcagccttgaccccgtgggctcaagtgatcctcctacctcagtctcctaagtttctgggactacatacaggtgcatgccaccacgcctggctaattttttctttttttgtagagacaaggtcttgatatgtcttgctatgcccagacttgtcttgaactcccaggctcaagcgattctcctgccttggcctcccaaagtgttgggattagaggcatgagccaccgtgcctagccacatccttttaatagtgcaaggaaatgggaagtacacataaagcacttttgaaatatgttgaggtgcggtagttgtctccaagtattattgttcaaggtacaagtggtactagtcatttctttcatagaacattttttttttgaaagaacaatgggcagacaaactatgattatttcagcaggggtatttggcaaatgttttttgaaattgaatgaaataagcttgtcaccagaaaaaacaactgacaggaatttctgacaatgataaaattcaaactttcaagtagaaattagaattttgaaaagcctacatctgccactataaacttgacagcttctcaatacctttcttgatgagactcgtggtgacattaacaaaagtaattttttgttatcaaaaataatacgtaaacatttggaagatctgctttactaagtgagctagactattttgtcataaaatcatatatagatttttttaaaaactataccaagtatgagacaaataattgagtttactgtaatagattatatgaagttcattgatatgtttcagattccacattccatttttaaggaacaatcacttgttgaatttcactgttgtatcaaagaaaactgtccataataatctgaaaggctatgaaaagactctactatttcaaactacaagtctatgtgagcctggagtttcttcatatttgtcaaccaaaacatattccaatagattaaatgcagaagcagataggtaaatctggctatcttccattaagccagatattaggggatttccaaaaaatgtaaaaccatgcttatcaccaaaattttgttttggaaaatatttctattttattaaaaatatattattttatttatgtcacatgtaatgggtttatcattgtcacataaatgaatttatagaccaattcttttaagatgctccaatcacgtgctttattaagtcaattttaaacgtataatgagaatcaagggaggaaaggtggggtaggttaatgcacttagaatagtatgcaagtggaataaaaggaactccaccacctgaatgctgggttatacaatgtccatatgtcttgtttctgctacaccagccttccaaactggtggtgtggttgtggagtgagaatagggtttgaggaaggggcctaaacagacaggtggaaggtgtctggggtacaaacttgctctatcacagagacacaaggacaagtacacctatcaatagctttagctttccattagcttgccaagtagctttgggttttatctccagtgaatttataaataaatatttttaaagtttataagttttcatttctaatagggtaaatattgataggtataataaacataaacaaaagctcttggaggtcttcagaacaaaaagtttaaaaacctctgatgtaggatatgggatccctttttttaaccccaaagtagcatggcaatttattgaaaccaaattaaatgatttatcttctatcttctatcttcttcttcttctttttttttttttaaaggtactcatctccccagagtcagatgaaaatgctaagtcaagctctcagtaaccctcaggtggctcctaaggcatatgtcatatgcaaggccaccagttaaggtagaaatgcaccactaaagggcaagacctgagcattctttcccagaattagatgcttctgtctttttatgatttccagtaaaagtatctctttgtctaacaaagcaaccacccatattttgcacacaaatatttttttccttagggaaacaagatatacattacaaacaacaacaacaaaatattaagaatctgattttcatgctaagaatttgtcaatgaaattgtgtccaaataactgctacatttgtatacaaattttttatgaaaacaagatttatgattggggtttaatgcatattagagaagaattatttatatatatattttttattacactttaagttctagggtacatgtgcacaatgtgcaggtttgttacatatgtatacatgtgccatattggtgtgctgcacccattaactcttcatttaacattaggtatatctcctaatgctatccctccccactccctccaccccacaacaggccccagtgtgtgatgttccccttcctgtgtccatgtgttctcattgttcaattcccacctatgagtgagaacatgcagtgtttggttttttgtccttgcgatagtttgctgagaatgatggtttctagcttcatccatgtccctacaaagaacatgaactcatcatttttatggctgcatagtattccatggtgtatatgtgccatattttcttaatccagtctatcactgttggacatttgggttggttccaagtctttgctattgtgagtagtgctgcaataaacatacgtgtgcatgtgtctttatagcagcatgatttacagtcctttgggtatatacccagtaataggatggctgggtcaaatggtatttctagctctagatccctgaggaatcgccacactgtcttccacaatggttaaactagtttacagtcccaccaacagtgtaaaaacattcctatttctccacatcctctccagcatctgttgtttcctgacttttaatgattgctattctaactggtgtgagatgatatctcattgtggttttgatttgcatttccctgatggccagtgatgatgagcattttttcatgtgtctgttggctgcataaatgtcttcttttgagaagtgtcctttcatatccttcacccactttttgatggggttgttttttttttcttgtaaatttgtttgagttctttatagattctggatattagccctttgtcagatgagtagattgcaaaaattttctcccattctgtaggttgcctgttcactctgatggtagtttcttttgctgtgcagaagctctttagtttaattagatcccatttgtcaattttggcttttgttgccattgcttttggtgttttagacatgaagtccttgcccatgcctatgtcctgaatggtattgcctaggttttcttctagggtttttatggttttaggtctaacgtttaagtctttaattcatcttgaattaatttttgtacaaggtataaggaagggatccagtttcagctttctacctatggctagccagttttcctagcaccatttgttaaatagggaatcctttccccatttcttgtttttgtcaggtttgtcaaagatcagatggttgtagatgtgtggtattatttctgaggcctctgttctgttccattggtctacatctctgttttggtaccagtaccatgctgttttggttactgtagccttgtggtatagtgtgaagtcaggtagtgtgatgcctccagctttgttcttttggcttaggattgacttggcgatgcgggctcttttttggttccatatgaactttaaagtagtttttttccaattctgtgaagaaagtcattggtagcttgatggggatggcattgaatctataaattactttgggcagtatggccattttcacgatattgattcttcctatccatgagcatggaatgttcttccatttgtttgtgtcctcttttatttcattgagcagtgatttgtagttctccttgaagaggtccttcacatcccttgtaagatggattcctaggtattttattctctttgaagcaattgtgaatgggagttcactcatgatttggctctctgtttgtctgttattgatgtataagaatgcttgtgatttttgcacaatgattttgtatcctgagactttgctgaagttgcttatcagcttaatgagatttggggctgagacgatggggttttctagatatacaatcatgtcatccgcaaacagcgacaatttgacttcctcttttcctaattgaataccctttatttccttctcctgcctaattgccctggccagaacttccaacactatgttgaaaaggagtggtgagagagggcatccctgtcttgtgccagttttcaaagggaatgcttccagtttttgcccattcagtatgatattggctgtgggtttgtcataaatagctcttattatttttagatatgtcccatcaatacctaatttattgagagtttttagcatgaagggctgttgaattttgtcaaaggccttttctgcatctatttagataatcatgtggtttttgtctttggttctgtttatatgctggattatgtttattgatttgcgtatgttgaaccagccttgcatcccagggatgaagccaatttgatcatggtggataagctttttgatgtgctgctggatttggtttgccagtattttattgaggatttttgcatcgatgttcatcagggatattggtctaaaattctcttttttttgttgtgtctctgccaggctttggcatcaggatgatgctggcctcataaaatgagttagggaggattccctctttttctattgattggaatagtttcagaaggaatggtaccagctcctccttgtacctctggtagtattcagctgtgaatccatccggtcctggactttttttggttggtaagctattaattattgcctcaatttcagagcctgttactggtctattcagagattcagcttcttcctggtttagtcttgggagggtgtatgtgttgaggaatttatccatttcttctagattttctagtttatttgcatagagatgtttatagtattctctgatggtaatttgtatttctgtgggattggtggttataacccctttatcattttttattgcgtctatttgattcttctctcttttcttctttattagtcttgctagcggtctatcaattttgttgatcttttcaaaaaaccagatcctggattcgttgattttttgaagggttttttgtgtctctgtctccttcagttctgctctgatcttagttatttcttgccttctgctagcttttgaatgtgtttgctcttgtttctctagttcttttaattgtgatgttagggtgtcaattttagatctttcctgctttctcttgtgggcatttagtgctataaatttccctctacacactgctttatatgtgttccagagattctggtatgttttgtctttgttctcgttggtttcaaaaaacatctttatttctaccttcttttctttatgtacccagtagtcattcaggagcaggttgttcagtttccatgtagttgagcggttttgagtgagtttcttaatcctgagttctagtttgattgcactgtggtctgagagacagtttgttataatttctgttcttttacatttgctgaggagtgctttacttccaactatgtggtcaattttggaataggtgtggtgtggtgctgagaagaaggtatattctgttgatttggggtggagagttctgtagatgtctattaggtccacttgttgcagagctgaattcaattcctggatatccttgttaactttctgtctcattgatctgtctaatgttgacagtggggtatgaaagtctcccattattattgtgtgggagtctaagtctctttgtaggtctctaagggcttgctttatgtatctgggggctcctgtattgggtgcatatatatttaggatagttagcacttcttgttaaatcgatacctttaccattatgtaatggccttctttgtctcttttgatctttgttggtttaaagtctgttttatcagagactaggattgcaacccctgcctttttttgttttccatttgcttggtagatcttcctccgtccctttattttgagcctatgtgtgtctctgcacgtgagatgggtttcctgaatacagtacactggtgggtcttgactctttatccaatttgccagtctgtgtcttttaattggagtatttagcccatttacatttaaggttaatactgttatgtgtgaatttgatcctgtcattgtgatgttagctggttattttgttcgttagttgatgctgtttcttcctagcatcaatggtctttacaatttgtcatgtttttgcaatggctggtaacagttgtccctttccatgtttagtgcttccttcaggagctcttgtagggcaggcctggtggtgacaaaatctgtcagcattagcttgtctgtaaaggattttatttccccttcacttatgaagcttagtttggctggatatgaaattctgggtcgaaaattcttttctttaagaatgttgaatattggcccccactctcttctggcttgtagagtttctgcagagagatccgctgttagtctgatgggcttccctttgtgggtaacctgacctttctctctggctgcccttaatattttttccttcatttcaactttggtgaatctgacaattatgtatcttggagttgctcttcttgaggagtatctttgtggcattctctgtatttcctgaatttgaatgttggcctgccttgctaggttggggaagttctcctggataatatcctgaagagtgttttccaacttggttccattctccccatcactttcaggtataccaaccagatgtagatttggtcttttcacatagtcccatatttcttggaggctttgttcatttctttttatgcttttttctctaaacttcttgcttcatttcattcatttggtcttccatcactgataccctttcttccagttgatcgaattggctactgaagcttgtgcattcgtcacgtagttctcgtgccatggttttcagctccatcaggtcctttaaggacttctctgcattggttattctagttagccattcatctaatcttttttcaaggtttttaacttctttacaatgggtttgaacttcctcctttagctcggagaagtttgatcgtctgaagccttcttctctcaacttgtcaaagtcattctccgtccagctttgttccattgctggtgaggagctgcgttcctttggaggaggagaggttctctgatttttagaattttccgtttttctgttctgttttttccccatctttgtggttttatctacctttggtctttgatgatggtgacatacagatggggttttggtgtggatgtcctttctgtttgttagttatcgttttaacagtcaggaccctcagctgcaggtctgttggagtttgctggaggtccactccagacccttttggcctgggtatcagcattggaggctgcagaacagcggatattgctgaatagcagatgttgctgtctgatggttcctctggaggttttgtctcagaggggtactcagccgtgtgaggtgtcagtctgcccctactgggggatgcctcccagataggctactcgggggtcagggacccacttgaggaggcagtctgaccgttctcagatctcaaactctgtactgggagaaccactagtctcttcaaagctgtcagacagggacattcaagtctgcagaggtttctgctgccttttgttcggctatgcccttcccccagaggtggagtctacagaggcaggcaggcctccttgagctgtggtgggctccacccagttcaagcttcccagctgcagctttgtttacctactcaagcctcagcaatggcgggcacccctcccccagtctcgctgccaccttatagttggatctcagactgctgtgctagcaatgagtgaggctccgtgggtggggcgtgagaccctccgagccatgcgcaggatataatctcctggtgtgccatttgctaagaccattggaaaagtgcagtattaggatgggagtgaaccgattttccaggtgctgtctgtcacagatttgcttggctgggaaggggaattcactgaccccttgtgcttcccaggtgaggcaatgcctcgccctgctttggctcacaacaagccccagtgagatgaacccggtacctcatttggaaattcagacatcacctgtcttctgcattgctcacgctgggagctgtagactggagctgttcctatttggccatcttcaagaatgatgtttaaaaatgtggaattgcatgtgctcagtacaaatttaattcagaatatttgtcagaagtacggtactctgcatgcaaacgttttctctcctctccattcaccctgcttttcatgttactaatgtaactgatagagttcctacaaaatctttttttattttgcctttttgttctatatctagttttataaggttttatcctttcttcctttatttcttcattccttccttcttttctaattgaactttacatcatagtatcaacagacacagttataccagatcacactgtatcagtctcttagaagtgtgcagtgggcttctctaacaaatgaatgcatggaaattatgagcaaaatcatgatcacatagtatcagagagatttcaatacactctatggtatacctgcttgtaggtaactacaaatatggctttttaaaagctagttagactaacctttgacacatttttacttaacctgcaaaattcaatttaattctttttttggccaatttggtgggtataatgagatgcaggagacaaaagactgcacttgggtaaacattgttttcttgtcctgatcagcaaaaatacgtgaatctttctgccttacttggaattaatttcaacatggagaacataaagctttaatgagattcatcactgtggggtggcatttatctatacttagttttagtttcatattgccctacttatattcataaaaggagattttcatctaagaaaacctgagatacttaggtttagtgattatttgtgtaggtaaatacacaatgagactcactggtttctcaactgtattttttaaaaagatacaaaatgagataatcactccctttaaaagtgtattctaagaaagtgactcctatttttctgatattttgggatacctgaattttgtacagtagcgatttctataacaaaataaaccttaatataaaaataaaatagtgacttactgctttaccttgaaatgcagctgacatgtgttctgtgtgaatgtgtgtataaagtacgtgaataaaggagcgttcagccactactgatgtctcatatcttcatatgtatcatatcccttagtgagcaagttgaataaaaataatttcatagccataaacagaggaagtattcatgctgaatatgtatagattgctaataataggacaaaaaagtttcaaatattaaaacaaaattatatatagtttacagttcttcaactacttccttaaaaattatatggtatgtatatatatgcacaaacatatgtctgtgtgtgtgtataactggaagtaaatgtataaaatcttcatagggatttcctgtggggtggaatgtgggtgatactaattttcttcacaatttattatattttccacatttcctaaaaggagagttactttgatcaaaacacacacacacacatacccgcagtttaaaaactccatgtttcttcttgtctcttgatctatttttaataaaacttgatttttaataagtattaccatgtaagccaattatttttacattttatttgtttgttttttgagagaggatctcactctgtcactcaggctgaaatgcagtggcacaatcttggctcactgtaacctccgcctgctgggctcaggtgatctcccacctcagcctcccaagcagcagggaccacaggtacacaccaccacgcccagctattttttgtattattagtattattattattattttttctctatacaatttctgagatacttacgtaaacttaatcactggggttttgtcatgttgcccaggctggtcccgaactcctgggttcaagggatctgcttgccttggcctccgaaagtgctgggattacaggcatgagccaccttaccttttaaaaatgcaagtatcatctcgataagcaactgtcttaaccttacaataaaatgcaacagaaagatacgcagagccagtccttcagaaaaaaaaaaaaaatgctgtgcaagaaacagctgataaatcctttttaaaccaccttcatttttctcagcacctttaaaacagttgactggatacccaactgaactgatattgacaggcaggccatcatattatttcttaagtgttcctgaatgtcagcaggtcttcggctttgtggcgtgaaaaattctacattcattgctgaaggtatatatttttttcctgttgacagctattttgtccaaatattgttctctctgctttatcttactttaacctaagtgataaggtacaactttttatccacttctattgacgaaatatcaagaataaaaccgaattctctgctactatcttatacttctcaaatatcttcttgctgtcttgttaaattttatcagagataagtattaaagtaggcaactgaaaagtgaggcacagcagtggcctatatggatacccagaattgtgaagtacacacatgtttctgcaatcactgggctgtgatttgatggaaatgaattatagatgcacaaccccttctgagattagattaatttccctgattattagtccaaagatttaaaaacttcacagaaatgaggttgccgcccagcttaggagctgatgcagccagtctcaaaggcactttccttggggcccagaatccctaatgggagaggcctgcctgactgtgtgatcttgcccttccgcaaaggtgccacactggatgtgaacaactaaactgtcacagccacagcccctttatcctaggggcttgaagaaataagctatgcccttaataggaagtaaagacatccaagaccttcctgcctctcatactgtgctgtgtgtcaacaaaaataagtccttaaaatagagaggatgcctaagcatccaatagcactaattctgtttccagcttttaagtgtccaaaaaggcccatttgccagccatcctctccctgactctgacttaattaatatgcttgtgtctggggtgattctgggtttagtccaagggccatgattccaaatccattttactacaactttctaagccactttgacgttcttaggctgataactaataatctggtgaaattatttgaataagtttatactgccactctgtacaggaaccagatgtgaaaacatgagctttgtgtttgctaactgttccactatcaatcatttattcaaacaagcatttagtgatgattgctattcatcattaaagattatgtactagagatgatgaagaaacaagcaataagtccctgcccagagttgcacgtattcttataaagggataagaaaattcatggtaattttaaatgataacaggtgctgcaatgaaagacctccaagagtggtgtggcagcactaaggactggaatacagagagggtctaagagcacagctgggaggggcaggaaggaattcacgtggtatatagagttggaggaagcttcaaaagggaagttagacttaccttgttcaacttcagaggtctggatgggacctgtggtaaaattacataatagaattaggactcaaaggaactcggaccacctaccagggttcctcaacctgggtactatcaacattttggactattcattatttggctgggggttggggggcagtagtcctatgaattttcagatgttcagcagtatcctgacctgtacctactagatgccagttgcacgtacccaccctgcacaaccaaaaatgtctccaaacattgtcatatgtcccctgggggcaaaatcaccctgattgagaaccactggacaaaagtcataccctcaaaagaagtcctggagagcacctttttattcctccttttaatatttaggctacccgttcttgaataataatgaaagtagctaaaatttctgcttggattccttatatttttagggtgaataaaataatcatgaattcttcagattgtgatgatgaaattatttttaatatggtgcaagttcacaagggtaagagaaaggaaattgaaccaaatatttataagaaaaagaagacaaattttaaaataagaaaatgtaataggatttttcttttactacattcttgctagttaatcttgtatttcaccctaccttgtttattctaaggtatgtataaataaaatcatcatctagaagctttaatctgacttgcaaatatttgtgtgaaagaaaaatccaaacttcttagatttaaatttgatggcaaccaaaaatatacattcattcatacatctgtttgttcgtgcaataaatattactgcaggcatactatgtgccagccaccattctaagcatcaggtgcacaacaatgaaaaaagttcctgcctttgtggagctatattctggtgtgaagagacaatgaataaataatacatcaggtagtggcagtacaggggaatatatcaaaataaacaatagagagtgagtacagagtgctatttatggtagaaacatcagtccgagcataaataggaataataacacgaatgttaactcttctccagtctaatatttgtctaggtcccacagaatctgggctgagaggaccacatatcccaatttgtaataaacgtgtatgctttaccaaatcctaccactacaaatgattattgagcctctgtttaaattgatatcattggtatgaaggtcactacctttttaggtggcccattctgtttttgtgtcctccaatttgagggggtcctcttattaagcaaaaatgtgactcctgcaacttccatctaacctacatgcctaaaatgcagcacccaaaatgaatgaaatacttctttcttttatggtactctgtggtaagacactggttcctagctccaatccagaccctggatgaaagcttttctgggagcttagtaaagaatacagtatttttattttataccatgacactaaattttaatttctagtcacaagttagccaacctagaatttacgttagctgacctgtaatttaagtaagaacttaaagagagaaggggccaggcacggtggttcaatgcctgtaatcccagcatgttgggaggctgaggcaggcggattgtttgagctcagatgttcgagaccagcctgggcaacatagcaaaatctcatctctacaaaacatacaaaaattagctgagcgtggtgctgagcacctgtagtcccagctactcaggaggttgagatgggaagattgcttgagcctggggagcttgaggctgcagtgagccacgatcatgccactgcactcagtatgggtgagagagcaagaccttgtctcaaagagagagggagagaatggagaaaggtataatttgtattcccacccaatgttcatgtgacaattttgctttccaagtgtccagtaggctgcaggaagagtatagtaggattgatgcctttaattcactagcagcttgggaagctgccaccctcaggtgaaagaaagagtagaaagaattgagggtattcagctctgcatactctggagttgccatgcaggatagaagccaagaatggtagggatggatctgcctccagattagacaactaacttcttttaatcactatctgtgatatatggggtgaagtggggccacttcttagtagaaaaggaacagcagaatttaaagctgccttgtgatccgtagaccacccaaggtgtaaattttattagtcatagatcctggtcaagatgtcaacctggaccacccatggggttctttaacacagtgtctccatctgagcattgtttaggctccctccaaatctattgcagtctggagtaacccattggatctggacaaaaaaaaagaaatatgcaagtcatccttcccaaaattgtcaggtacaggaacaacaaccagcagccaaatcctaagaggtccctaggacaataccaagtgatttctcgagtgattctacattgccagatagagctggatataagtttatctcactttattatatacatagatatagcctaaggtgaaaatataatactttagattatatgcgattttcatttatttccaggtgctgtggcttagagagctgtgttcatgaggagaaatattttaatatataatttattctcagatacataggtctaatctactccgactccaatttttttttaaaaaagcatgtactttaagaaacaaaaaatatctgaaagtactactgttgtaataatacatttaattcaaagaatgtcaaacagaagatgtatatgcctagaatcatagcacagggaaagactgttgggtctgaatgtcacagaacagtggttaattgtgtagtgaaagtctctttatatcctattaaattgtattaggtcattctcactctactataaagaactgcccatgactgggtaatttataaaggaaagaagtataattgactcagttccagatggctggtgaggcctcaggaaacttacagtcgtggtgaaagtggaagcaaacacatccttcttcatgtagcagcaggagagagaagtgccgagcaaagggggaaaagcccctatactatcacaagaacagcatggggataacagcccccatgagtcaattatctcctattgggcccctcctgtgatatgtggggattatgagaactacaagtcaaggcggggacacagcaaacccgtatcataaataaacctcacgtaatgaacatgtctgagaacttagataagaggaaggggaagattttgttatagaattttctttagtacctcaaatcataggaagcctgaacccagtcatgaaagctgaaataattattgtgttcattttagataacctgggttgggagaggaaagcatggggtgggagtcagaagcagaaggcacccatcacccagcaaaggtgcagagctgggttccttccatcccttccctttccacccccactgccaccagatgccttgtcccttttactttactgtgtccctcctccccacacttttccttcatcttaacatgagatttcctaagcttcaaatttttgctgcttcaagccatctggcacctgggatagtaacacgcagcctgtgtgttcacagggagaagcaaggaagaaagggtgaggaggaagagaacactggggaggactggctgaggggagatgatgagtggagtgcctgggtcactcccagccatagggtcagggatcttgggcattggggcgggcagtctagagcttgtctctttcagttctcatttagaaattttctcagaaggcaaaagcttataaaaccattcagcttagttaagaaaaattaacagccaatcttatgaaatatttacaatttatgttattactacacaacataattatatggattattaagtaacattaggttgcctttgtagtccaccttgttgtagtccactcttacagggtatctactaatgactgctcaagctcaatccatcagaggaaatgttagtctgaggactctgatcttagcaatactttacttggcttcagtaaaaattatgtcaataaaatatcccagaaaactatctacttggaaaacaaagaagattccatgtttttccatttctggtttttcagtcaactaaatccatagagctatatcaggaacccaatgttccaggcaactatcattaaccagcttttaaatcttggatgatcacttaatccctctggaactcactgtcctcatctgtgaaatgacttctaccataaatgtctgttattataaatatttcttatactaaatgaaaagcaaggttctaaattgcatacgttattaatagaggataaggggatttataaaataacgtatgttctagatctgccaattctggcttcctgtttgtgtaataaatacagaagtgtgaattgcttagctaaataaaagtctactttctcgttgcagataaataggatttaccaatccttggatgaagtgcttgggaagtctttaagtgccataatcaactgccatttcaaagaatatagatggttttgaaaagttcatgctgtcccttcattgaattttaggtgagtgtgtttaagacaaagaacttaagatgaatattgaactgtttctctttagagtgctcctctcatttgcctgaaaagaaaatgggtttaaatattatcaatgctgaggtggagcaagatggctaaataaatattatcaatgcctttcagtttcgtacctttagtgaggttccagacaatgaaagacttaccgtctttttgtttatttattgttattattattattatcagaaaccatctgaactgtgagctatataacataaagattgtcttgaccgtcacttcccagtttctattaagcaaatgccataatacttcattctattctaaaggttatataatttgtaaaatataaaatgtatttaatatcagtgtaataaaccagaatgagacaaaatttttgatggcataaactgaaggaaaatttgatggtgataatagtggcttaatcactaatgaatctgtgtttgagatcgggataacgttttagatgcgcttattgggaggttttgcttagaattaaaagtagggcatggttaagggcaggtgtgctaaatttttaaagtgctatgtacagttaaacacaacacacacacacactcacattaagctttgttttgtctggccatgaaatgaatgaataaatatattttacatcatcatatgtcatcacccttccatgtcagaaaagagaagagcctaaaattggtggtttaatattagtctgatatatgccattgccatttttcagcagaatagaggggaatggagaaagtgagtggtggtcatattgaggatattgtgtggctttccacctcctcctaagtctagttttcaaagtgtggctttattatgtactttgaagaaaggtgatcttcagaacaccagcatatacctatgtttacaattccaataaaataatgcagctgacagagcattggccactgtctaaatctaatctgaaaggcagagatgcttccttaatacttttgattaacttcaaaatgatggcaaataatgctttcataaacttacaggtgtataaatttggtttatagagattggatttagaactaaaatggtaattctatttatttacaagatgtgtgttgaatgcagttcccagaagctaaacttggtgcccatcaaaaataccagtaaatcaatttgcctagtgtaacagttactctagaagaaaaaaatgaaaatgaaaaacttattttctgaatcctttattttccacttgtgcccatctgtgcctgttaccttcagggccattccttgccctgccctgcctctctttattccacagggactgaccctatgggctgtattttccagccagagcctctcctcccctcctacatgttacctccagcttcttccagtgacctgaaccctgaacctcattaacactacctcttcccttttgtcccttgagaatcatgagtgatagtgcctttggcttcctgaggctgctgatcttcaatttgatccaccattcccaatttagcttctcaattctttcatctttgtaaccatttccttgtattaaagttcatcattttaaatacttagaatgttttcttttatcttgattgaatcgtaactaatctatcaatacttcattaatttcttccaaaattattggaagaaaatgaacatggattacttgcttcttaagaaaacaagtgattcctaagaaattaaatttaaatgtaaagttgggcagggtgttttttacttttaaaatactttatactaagacattgagatataatatacatacaaagaggtcacaagtaagtgtatatctcaatgaattttcacaaagtgtatacttcccatcagatcaagaagtagattaccaatgcccccagaagtcctgctcacgtgagcttccagtcattcctcccacagaggaaaccatcatcatggcttatgtgacaattaactaattttgcctattctagaactttatctaatggaatcatgcagtgtgtcatttatttattaatttagtaaaatttatttgagagcaatttaggtcacccaaaaattgagtagaaagtacagtttttatatatccccctatacacaacacacacacacacacacacacacacacacacacaccccacacacacacaccctatggacatcctccaccagaatggtatatttgtgactatcaatgaacctacattaacccatcatcacctgaagtccacagtttacattagggtacattcttggtgttgtgcattctatgggctttgacaaatgcataaatgacatgtatccaccactgtggtgtcatacagaatagtttcactgccctaacaatcctctgtgctcttgcctattcatccctcccctgcacctcacccctcatctttttactggctccatagctttaccttttctgagatgtcatatagttgaaatcatacagtgtgtagccttttcaggttggcctctttcactcagtaatatgcatttaagtctccttcatggcttttcatggcttgatagttcattttgttttagtgttgaataatattccactgcctggatgtaccacatttaatttatctattaacctattggaggacatttttgttgcttccatgttttggaaattatgaataaagctgctataaacatcatatgtaggtttttgtgtggacacaaattttcaactcatttaggtaaatattttaggttggtgcaaaagtaattgcggttttgccattactttttgatttaattacttttgcaccaacctaataccaaggagtgtaattgctgaatcataggataaaaatatgtttagttttgtaagaaactgccaaactgtcttccaagttaattgtatcattttgcatttccaccagcaacaaataagtgtcctgttgctccatatcctctccagcatttgatgtcagtgttttagaatttggtcattctaataggtgtatacttctgattttaatgagcagttccctaatgatgttgaacatcttttcatatggttactttctaactttgtatcttctttggtgaggtgtctgttccgatctttggcccattttttaattgggttgttttcttattgttgagtgttaaaagttctttgtatattatggctaataatcctttatcacatgtgtcttttgaaaataatttctcttatttctgtcttcgcttgtcattctcttcaaggtttgtttttttaaaaactgaaaaaaaattaaacttaatatatttaaagccatatcctcagctatacaatattgtaacattaatttgttgctgttaacacaatcattgtcaagtttcccattttgcatatcaaattaatgggaagatttttaaattttcaggtatatcccaagtattatttttatttttaaaatatccacatttcacaaactttactatgtacagtataagaacttcttagtctcattccaatttaaatcagtctcattccaacattcacatttaaatctaaagcttctgatttactttattttggttcttttcacctgcagttgagagatctgacctctctcttttagtaatggttgtttgctacttgaagatgccttatgatctgaacatttcaaatgtcctgtaataaatactggttgtattggaaagcaatgtgatcaggatcccagtgtctgtctttcttgataactaatcaattcactctgtctcaacaattccattcattctaaagagattccttggtattaaagtcgcttttcacttaatcattttggtacttcacttagttattttaaatggaagggccttgctattttcatttccttctcatttatttatgtagtcatgttccttttcaatcttttctcagaggtcatctcaactgctcatctgtccattttaatgtactgtggttggactctgaaggacatgatgttccttctaccaacaattttcatctattcaaccaatgtcaatgttgaacctgcaatgcctaatttagaatcctttcagacaatgcgcaaatgccatcatgaacagaatttctaaaactccttcatcatcctaaagctgggagacacaggtatgaggagctttatgatacagtttaagacaatgaataacttatgttgccagtacaagtcttccccttatttgatacagctctaaaaattctaatcattaacatttttctccagcttttggaaataggattttataaaattataatttaaaaaaatacccttgggaagaaaaatgcacccattaattatatatactacataatatgtaaatctaatgaattagcaaggaagagacccctgaaacaatggtacaaacattcagcattggaagttggggtacacatatgtgggaaatgatctcaccaactttatgatgttgcctgtagggtcaagggaaacacctgacatcaaagataactcaggctgaacagatcttaatgtcacgttgggagagagggatgggaagagtggaggtattagtcattacaataatgaacaacattgtgatgggagatttttatgtatatatatactttaggttctgggatacatatgcagaacgtgcaagtttgctacacaggcatacaggtaccatggtgctttgctgcacccatcaacccgtcatctacattaggtatttctcctaatgctatccctccccttgccccccatcccgcaacaagccctggtgtgtgatgttcccctccctgtgcccatatgttctcattgttcaactctcacttatgagtgagaacatgtggtctttggttttctgttcctgtgttagtttcctgagaatgatggtttccagcttcatccatattcctgtaaaggacatgaactcgttctttttttggctacatattattccatggtgtatttgtgtcacattttctttatccagtctaacatttatgggcatttgggttggttccaagtctttgcttttgtgaatagtgctgcaataaacatacatgtgcatgtgtctttatagtagaatgacttataatcctttgggtatatacccagtaatacgattgctaggtcaaatggtatttctggttctagctccttgaggaatcaccacactgtcttccacaatggttgaactaatttacactcccaccaatagtgtaaaagcattcctatttctccacatcctctccagcatcggttgtttcctgacttttcaatgatcgccgttctaactggcatgagatggtatctcattgtggttttgatttgcatttctctaatgaccagtgatgatgagcttcttttcatatgttttttggccgcataaatgtcttcttttgaaaaatgtctgttcatatcacttgcccactttttgatggggttgcttttttcttgtaaatttgtttaagttccttgtagattctggatattagccctttgtcagatggatagattgcaaaaattttctcccattctgtaggttgcctgttcactctgctgatagtttcttttactgtgcagaagctctttaattagatcccatttgtgaattttggcttttgttgccattgcttttggtgttttagtcatgaagtctttgcccatgcctatgtcctaaatggttttgcctgattttcttcttgggtttttatgattttaggtcttacatttaagtctttaatccatcttgagttaatttttgtatgaggtgtaaggaaagggtccagtttcagctttctgcatatggctagccagttttcccaacaccatttattaaatagggaatgttttccccattgcttgtttgtgtcaggtttgtcaaagatcagatggttgtagatgtgtggcgttatttctgagggctctgttctgttccattggtctatatatctgtgttggtaccagtaccatgctgtcttggttactgtagccttgtagtatagtttaagttaggtactgtgatacctccagctttgttcttttggcttaggattgtcttggctatacaggctcttttttgtttccatatgaaactgaaagtagttttttctaattctgtgaagaaaatcaatggtagcttgatgggaatggcattgaatctgtaaattactttgggcagtatggccattttcacaatattgattcttcctatccatgagcatggaatgtttttccatttgtttgtgtcacctcttctttccttgagcagtggtttgtagttctccttgaagaggtctttcacatcccttgtaagttgtattcttaggtattttattctctttgtagcaattgtgaatgggagtttgctcatgatttggctctctgtttgtctattactggtgtataggaatgcttgtgaattttgcacattggttttgtatcctgacactttgctgaatttgcttatcagcttaatgaagttttgggctgagatgatggggtttcctaaatatacaatcatgtcatctgcaaacaaagataatttgacttcctgtcttcctatttgaatacccttcatttctttctcttgcctgattgccctggccaggacttccaatactgtgttgaataggagtggtgagagagggcatccttgtcttgtgctggttttcaaagggaatgcttctggcttttgcccattcagtatgattttggctgtggatttgtcataaatagctcttattattttgagatatgttccatcaatacctagtttattgagtgtttttagcatgaaggggtgttgaattttattgaaggccttttctgcatctattgagataatcatgtggtttttgtcattggttctgtttatgtgatggactacgtttattgatttgtgtatgttgaaccagccttgcatcccaggatgaagccgacttgattgtggtggataatctttttgatatgctgctggattcagtttgccagtacgttattgaagatttttgcatcaatgttcatcaggaatattggcctgaaattttctttttttgttgtgtccctgccaggttttggtatcaggatgatgctggcctcatgaaatgagttagggtggagtccctctttttcttttgtttggaattgtttcagaaggaatggtaccagctcctctttttacctctggtagaatttggctatgaatccgtctagtcctgggtttctgttggtggtggtggtggtagactattaattactgcctcaaattcagaatttgttattggtctgttcagggattcaacttcttggtttagtctcgggagggtgtatgtgtccaagaatttatccatttctcctagattttctagtttatttgtgtagaggtgtttatagtattctctgattgtagtttgcatttctgtgggatcagtggtgatctcccctttatcatttttattgtgtctatttgattcttctctcttttcctctttattagtctggtagccatctatctattttgttaatcttttcaaaaaaccacctcctggattcgttgattttttgaagggtttttcatgtctctatctccttcagttctgttctgatcttagttatttcttgtcttctgctaacttttgaatttgtttgctcttgcttctctagttcttttaattgtgatgttaaggtgtcaattttagctctttcctgctttctcctgtgggcatttagtgctataaatttccctctaaacactgtatagctgtgtcccagagattctggtacattctgtctttcttctcattggtttcaaagaacatctttatttctgtcttaattttgttatttacccagtagtcattcaggagcaggttgttcagtttccatgtagttgtgcagttttgagtgagtttcttaatcctgagttctaatttgattgcactgtggtctgagagactgtttgttatgatttccattcttttgcatttgttgaggagtgttttgcttccaattatgtggtcaattttagaataagtgctatgtggtgctgagaagaatgtatattctgttgatttggggtggagagttctgcagatgtctgttagatctgcctggtccagagctgagttcaagttctgaatatccttgttaatcttctgtctcattgatctaatattgatagtagggtgttaaagtctcccactattattgtgtgggaatataggtctctttgtaagtctctaagaactttctttatgaatctggatgctcctgtattgggtgcatatatatttaggatacttagctcttcttgttgcattgatccctttaacattatgtaatgcccttctttgtctttattgatctttgttggtttaaagtctgttttatcagagacgaggattgcaacttctgcttttttttttcttctttctgtttgcttgataagtcttcctccatccctttattttgagcttatgtgtatctttgcacatgagatgggtctcctgaatatagcacactgatggatcttgactctttatccgatttgccagtctgtgccttttcattggagcatttagcccatttacatttaaggttaatattgttatgtgtgaatttgatcctgtcatcatgatgctagctggttattttgcctattagttgatgcagtttcttcatagtgtggatggtctttacaatttggtttatttttgcagtagctggtactggtttttcccttgcatatttagtgcttccttcaggagctcttgtaaggcaggcctgatggtgacaaaatcccttagtatttgcttgtctgtaagggattttatttctccttcacttatgaagcttagtttggctagatatgaaattctgggttgaaaattcttttctttaagaatgtcgaatattggcccccactctcttctggcttgtagcgtttctgctgagagatccactgttagtctgatgggcttccctttgtgggtaacgcgacctttctctctggctgcccttaacattttttccttcatttcaaccttggtggatctgacaattatgtgtcttggggttgctgttcttgaggagtatctttgtggtgttttctgtgtttcctgaatttaaatgttggcctgtcttgctaggttgaggaagttctcctgaataatatcctgaagtgtgttttctaacttagttccattctccccatcactttcaggtacaccaatcaaacgtagattttgtcttttcacctagtaccatatttcttggaggctttgtttgttccttttcattcttttttctctaatcttgtcttcatgctttatttcattaagttgatcttcagtctctgatatcctttattctgcttgatcgattcagctattgatatttgtatatgcttcacaaagttctggtgctgtgtttttcacctccatcaggtcatttatgttcttctctaaactggttattctagttagcaattcctctaaccttttttcaaggttcttagcttccttgcattgggttagaacatgttcctttacctcagaggagtttgttattacccaccttctgaagcctacttctgccaattcgtcaaactcattctccatccagttttgttcccttgctggcgaggaattgtgatcctttggagaagaggcgttctgctttttggaattttcagcctttttgcactggtttttcttcatcttcatggatttatctatttttggtctttgttgttggtgaccttcagatggagttttgggtggtcatttttttgttgttgttgatgttgatgctattgctttctgattgttttccttctaatagtcaggcccctctgctgcaggtctgctggagtttgctggaggtccactccagaccctgttttcctgggtatcaccagtgaaggctgcagaacagcagagattgctgcctgctccttcctctggaagcttcgtcccagaagggcacctgccagatgccagccagagctattctgtatgaggtatctatcgaaccctgctgggaggtgtctccccatcaggaggcatgggtgtcagggacccacttgaggaggcaatctgtcccttagcagagctcgagtgctgtgctgggagatccactgctctctgcagagctggcaggcagaaatgtttaagtttgctgaagctgcgcccacagctgccccctcccccaggtgctctgttccagggagatgggagttttatctataagcccctggctggggctactgcctttctttcagagatgccctgcccagagaggatgaatctagagaggcagtctggctacagtggctttgaggtgttgtggtgggccccacccagtctgaactcccagtggctttgtttacactgtgagaggaaaaccacctactcaagcctcagtaatggtggaagcccctccctccaccaaacttgagagtcacagatcgacttcagactgctgtgctgacagcgagaatttcaagccagtggatcttagtttgctgggtttctttggggtgggatccgctgagcaagaccacttggctctctggcttcagcccccttcccaggggagtgaacggctctgtctcactggctttccaggcaccactggggtacaaaaagaaaactcctgcagctagcttggtgtcttcccaaatggccgcctcattttgtgcttgaaacccagggcccttgtggcacaggcactcaagagcatctccttgcaaagaccatgggaaaagggtagtaacttggcaagatagcaccctccctcatggcaagttcctcatggcttcccttggctaggggagggagttccctaacctcttgcgcttcccgggtgaggcaatgccccaccctgcttcggctggccctctgtgggctatacccactgtctaaccagtcccattgagatgaactgggtacctcagttggaaatgcagaaatcacccacctgttgcgttggtctcactgggagctgcagactggagctgttcctattcagccatcttgccacaatgggagattttaaataacttgttctcaagtaattcagataggtgattttaatcatgatgtaatctcaagtacttctgttgaaccacagagtatgtgagaaaacccaaatgtgtttaaatgcagaaatcatcttttatccatctttgtattcctggaaactaacacagtgcttggcacactattaatactttctaaataaatggctggtgattaagggcaaaggcacaaagcaatgctggctaatgcttactgagttcttattttatgcaagaaattgttctatattctccctttcatgcctaaacaaccctataacataggcactatttttatctccttttttaaggattaggaaactcgggttcacagaagttaaataacctgcccgaggttaagtaggttgaaggtgaaaattcaagtccagatagtctggcttcagggcctgagctcctaattgtgatgctccactgcctcttaggtaaaataatcaccaagtaattttaaaacacaggagcaacattttgtattacttaaaaacattctgtcacgtcatatagcacacctatattaacagacctgcccaaatcatgaacactcactttgaacagaaattacttcttttctgtattcttcctctcctttccttttaaaacatgaccgactaaactaactttctaacttatgttcagatctcatcattttcattcttcagtgatttgttctatctcaaatatgccattgctccttttacaagattgcttacggatgtgtaattttgagcaagttacttaacctctctgagcgtcagttgaccaagctgaaaagataagtctattttacttcaaggactaggaaacaatacctataaaacaaagcacagtggagttcctgatgcattgcatgtgtgaaacaagcagttgaaaatatcatccaagtactctcatccactttggtttcaaagccagcattgactgccccatcagaagaaaatctgtgttctgtattccttagcatgtcataatactggtacaatggacctcttgggtctcactgcctacctttgcttcccatcagctgatctttgctaatatagggatattttgtctttcctaagccatgctctttgttcctttacttttgcacatgctgattcttctgcctagacactcctcccatccacacccctccctaaatccccttcatctgcatgcactcatgtactcttacataacttgcaatatgctagtcatctttcaatatccagcacagctgctgctgttaccatttcactaaagtcactgatgaacttctcatggatcatagttatgtgtcctatctttgaatgcacatagacttttgggttatttgtagggtatcagcacctaatgtagacaacagaaagaaaatcaaccttcattatcaatcacagcaccatatcttagcttctcatgttatttctctttttcttctgaatttttcatcagagacaaatgccaagtctcctcctctttgaagttcctataccaagttcagaagtagtcttcctttctggttttgaatgaactagggagggtcatattttgagataaatttgagttccttcagtgtagttaagatcctaacactttatccagccattagaagtaaaagaagagctccgttctggggaaggaaacctcacagagggggtccgtggcactctgtgccaagcaccaaagcagacgttccatgaacattatcttatttaatcttcataataaccccacaaattagctattattatccctgttattccgagaaaaaaaactagggttccaatagcttagctaacttgccaatgttgtatttctggtaagtggcagaatgagaatgttagatctttccactgcagcaaactgccactctaaaagagctttccaatttaatcctataagaagaatatgtttgttagatagtgttaaaattttccatttaaaacatttcccgaggagtaagctatttataactgcacagatctttactcattggcaaataagtttatgtttaggttgatgctaaaattagcattatttctgttcaacaagagtttaaaagatgtagcaccttgtggttctgcaaactatttatacaaaatcttcttcgttgatgtgcacataagcctggaaatgatggtatctaaagctgtagactgatagaattttagtgctaaatgttatctgggattaccactggaggtggagtctctttaaggcaagagtttctgtctctctttcttttttctccttaagaatatttatgaaataaatatctatgactaattataaacgaatttctttagaatgcaaaaaaatttcctagacatagtgatactattagcacttcttaaagaagtacataaacacattctgaaatttttataacactattcaagggccatgcataagaataataatgtatattaataactcaaaattaaatttaattgcaaaaatcagcatccgtagagaagggttcctttgtgaaaaatcataagatgcataggcagcatttatacttataatgatcattcattcattcattcattttttaaacatatattgcacatcttctatgttccctggctctatgttaggcacctgggagcctgagataaataaagtttaattatttcaagtaatatcctaattatatttgccatagattatatcatagagtcatagaatatcatagaattgaagcatcagaaaggatatttcagatcatgcagcccagacctcctaatttttagtttgaggaaattgaagactagagagcttaagtactacccaaataattagcagcaaagccacaactcagacatgtctgagtctcctactacccagctcttctctactatacaataaactagctaacatttctatattcttgagtttattttcccccaagaggagattcctggtctaagaagagaagactgagaaaataaagttgatttttcttttaaatataataaatagaagtagatttatgattcatcaagtattaattgagaattaaccaaatatcaggaactttcctacgagctggtcatatgtgtgagaaaaacagaaatgtctttctggaccacatcctgcttgtcatcttgtgtgcactgtgtgtgtgtgtgtgtgtgtgtgtgtgtgtgtgtgtgtaaaaccctagcctaaaggcactaaactgccctttaatgggaatattaaaatagcccaggcaatggcagatataatgtaatgctaaaaaaggcaactaaagtgattagaacatatttatatttactttttttaaaaaacgtaaaacagtgcaatccttaaacaccttatgtattacactgaaaagatacaggtatatgtctttggtctactactgttatatgaataacttgttttatgactgtttcctgttaaacatttcagaagtggaaaataattttttaaaatctcagtacatatctacactgctatatctctttgagtaagataaatatacagtattttagaaaaaaaaatgagaaatctgttcacattcccatgttatgttcctgattagttatcttttgtttgctaattgcccctttacttccctagaagagctttgcagaatactatttaccttttcataagtatgatttttaaaactatgttatcacaagaatggatggagcaatgtttttccatcaaaaactagaattctgatgggtttacaaaagttagtaataatgtgctttaatgttagtgcattcttagtaatgacaatttactgtttgagcttgtattttagccatcaactgatttttgtcactttcaaaaagcaaatgttaagtctgtacagagtttattttagtgaaatcttaaactgtaaatttgatagtttcaaattagcaaagcagataaataatgtagctctcaattttgtctatttctaaccattctctaacagtaggctagaaattttactgcacttttgtctgtgtataatatgccttcacactcagataaaaacttgcagtatttttacttccaatcctagttggataagtaaggtggctgtctttttttttatgaacgggtttttattatatcatgtctccctaatgtatgtaaacagctctagtgtcacatgatttcccttctgaagttgaatttcttcccagggtagtagcatccacaaagcatatatttggcagcaaaacagcactagtacattatagataaggttacattcttcccattcagccacagcaaatgagcctctcatcccctcagttaaacaggttctggttttatactgaagcagatttagcctccctcagttcctattcctcgtgtgtggtcaagggtgctaccatgagtaggacggagcatgccaccacctgaatccctggcatattcccacggcactttgaattctcctttggcaaagaacatttgcagacattaagtacaatggtaaaattactgtactataacaaccttcccattctctcctggattctccctccgtacagtgctagaagtgaaaggacctatgtagcaggacttgtaaatgccccctaaattcagttattaataggaattcttccatctgataattacacctttgagatttcccatatcgtctaaccctggggctgttgtgtgtaaagttgtaactgcaagcatgaaggtttttcactaaaatattattaatccacctcctgaatccaccttctcccgattttgtcttacctaataacaaaggtaataatctagctcagctcatgattgccttctcattaaaatattcagatccttttcatactcatacctggggctcgtgtgtaacatacacagccttaataagctgtggttgcctggtaaccagtggaggcgctaaccagtggagacgggtcagagagtctgaagaacataaataactgaagcattgacattagtttcagctgggtcacccaagccttaattctgcactagccatcccagacatttctaatgggctggtgaaacagtagctttctcagaagtagctccttaaatcataaaaacaagaattagcgtttaacataatgtccttctctatggtctgataggagtttggggaatgaccatggaaacaacaggaccagatcctaatgcctttgaaatactttttacagaatacagaataaagtgtttgcaaggactcaacactctcaaacagctttttccacgtgttcctgattctgttttctcagtttcattaggaaaatttttttttagcatttacccattctctaatattatcttttacacattgagtggttaaggattctgaaacattttcccttttcaaaggctcttgctttaaaaagcaatgtagaaacaaagagaaaaatagttagaataagcagactgatagcaggatggtaaaattaacccataacataaataatacctgataacttctgaagaaagcacacacagcttgaagcatacccagtgctgttccttatactgggacatttggccatatgctgggactttcaaagccccaggataagatacccctgtcttaaagtgtgttacattttaaagggaaaagagaacattacatttttatgaaaacaataagaaatacactattgacttgaaagcaaaattagcgtgagtttttaaggggaaaaaaagataggccgggcatggtggctcatgcctgtaatcccagcactttgagaggccgaggcgggcggaacacaaggtcaagagatcaagaccaccctggccaacatagtggaacccccgtctctactaaaaatacaaaaattagctgggcctggtggcacatgcctgtagtcccagctactcggggagctgaggcaagagaatcacttgaacccgggaggtggaggttgcagtgagccaagattgagccactgcactccagcctggcgacagagtgagactccatctcaaaaaataaaaaaataaaaataaggtaaaggaatggcagcattggaaagtaattctgtcaccagacccacctcatgcactgccattgcctcaccttcccagcccactgagtgggaaatttgaagaagtacagctgtacgagatagacatttcactgtttggaaagaaagatgatttttttttaatttaaatgagaaaaaatgtcactactcataaccaaatgatttgtttggactctgccctacatatgggcaggacagaaaattattaaccactatttattgagagctgttcagaggcctgcccactttactctaaagcagtggttctcaaccaggagcagcttagctgtccagggaacatttagcaatatctgtaggcatttttgattgatgcctgggagtggaagtgatactagcatctagtgggtatagtccagggatgctactaacaatctacgatgctcagggcagtccctaaaagtaaagaatgatctagcccaacgtatcaatagtgccaatgctgagaaattcttctaaaaagtacaaaggctaaagtaactctgtaccaggttcaatatgtggtatttttttgttaccattgaatctccaccaccattcctttaggtgggtattactgttacctccattttcagatgatgaagtggaggctcagaaggttaacttgctcaaggccgtgcagtaaacaagtagtggaccctgaattcaaaagcagattagtttcctcaagccaactcctgtgaggtcactgtgcttctttcttcaaaaatacctacataactgccttctgtgttttctgaaactctttgtctccacagggcccctattaaaatgcatgtgtgtcatttgagctggctgacaggatagttaatcatggcctatgattccatttcctgagtaaatttactgggttctagggacctggactggagaagagatgacattgttagaaggggagaaaaaaggttcctgaaaagggaaatttcatttttaaaagaacctctttgatggagaagatgggattccaggacaaggcttagagtgcagaaaaggcctaattgtgcaccggggatttgattgtatgaaatagagcgaggctgtggtagcaagtattgcaggaggaggtgacaacttccttgttctaaaggagaggataggccgattcttcctgctagaggaacccattgtctcgcttgtggcctgcccttgagggaatctgaactactggaagagcaaagaaggcagtcaggcatgggcacagaagaagcccaggaagtgttggtgatcacaaaacaggaaggtgacaatccactttagccaacacttgctgcaaaagaacctcatcatcctcagcatgtgaaaagaaaacagtaacgttattttcagagaatggttctgttccttgattcatcattcccttgacacactccttcacacaatgcgtcatctgcttttcaatgctcctgctgatggccagctgcactctgttaccttttcaggctcttgttgggtcttgcctctccactcgtcctgtgcccagtcatacagaaccatttgtcatccccctgatgtgtcaacattgtcttctcaccctgtagagtcccttttgtgagtgaagagacttttcccagaaactacctgcattagtttcctagagttgctgtcacaaattaccacaaagcttagtggcttcaaacaatagaaattttttctgtcatagctttgtaggcaaaaagtctgaaattgaggtgctggcagggccattctccctatgaaggttctgcggaagaatccccccttgcctcttcctagcttctgtgggttccagtagtcctggcattccttggcttgcagctgcatcactgcaatccctgcttcagtcttcacatggcttcccccgtttgtatgtctctttttacattctctcctcttcttatacagatactagttgtcttatggttctccaaagatacacaactaataggatagatgtacatataaaggagagtttattaaggagtattgactcacacgatcacaaggtaaggtcccacaataggctgtctgcaagctgaggaacaaggaacaaagctgaagaacttggagtccgatgtttgaggtcaggaagcatctagcatgggagaaagatgtaggccagaagactaaaacagtctaatctttccacgttcttttgcctgcttttattctggccatgctggcagctgattagattgtgcacacccagattgagggtaggtctgccattcccagtccactggctcaaatgttaatctcctttggcaacacactcacccaggaacaatactttgcatccttcaatccaatcacattgacactcaatactaatcatcacaacagtcattggatttagggctcaccataatctagtatgatctcattgtgatccttaactgattatatctgaaaagactttatttctaaaggagataataatatgcatttgagatatgaatttttgagggacactccttgtattagtcagggttgtccagagaaacagaaccaatatgtactcacatgtgcacacacacacacacacacatctataaaaccatgtattataaggaatgggttcatgtgattatggaggctgagaagtctccaggtatgcagttcaaaggcctggaaaccaggaatgctgatgtcctaagttccaggctgaatccaaaagcaagagaagaccagtgccccagctcaaagaccataatgcagaaaaagcacacactctcttgctcagccttttgttttattcagacactgtaattttaacagattggattaggcccactcacactggggatggcaatctgttttactcagtctaccaattcaaatattaatctcatccagaaatacccttgcaaatacacccagaataatgtttgaccaaatatctgtgcacctggtgacccagtcaggttgacacataaaattcactgtcacacaactcaaatacacaatgccccgcagactttcccttgctgacaagcctggcaagggaactgcattcgcagtgattgacttaaacccttccctgagactttggtggaggcacagacaacaaataattcagcattttaccagcaaagaaaagggggagaatggttattaggtaagtaactaataaatctgttgcatttctatatatttctttttggtgaaacagacccatccatattagtctatgctttgtattttcaagcaacaaaaagcaaagcaaaacaaaacaaaaaaaaacttggctagcttaacaaaaaagagacagttgcactttagacaaggacagatccaaaagttcaaaggttatactcaggaccctgtctctttccgcctttctcagcaccatttctctctggcgttcaattaatagttaaggagattctatctatgcagtgatgaagaaaatcagcagacctccaagcataaacaatctacccaactatagatcacagagaaaagagcttaactttgaccaccatagaactctaattggctttccttaggtcacataaacattcctactccaactcttattttcaatcttgattgctgcaggatacctatgatatggatgacccaatcaataccctcatcatatccagaaaaatattcctccatttgacctcagccatccacttgcttgaccactagagctggttaccttcaggaaattaaccacttccacaatcaaaataagatacttctgtctccaaataccacatgctccacttccagctcttttgctctgatatctcacatttgtgattctttgtgttcattaaagggtcttttgggcctcattctttctcactatcagactcctcctgtctttattttcttccttacttgcttctattacatagtttatcccttgtacaagctttccttttatataccttcaagtccctacctcctgtcctgccatcacattcaccaggcattagtgaactcactcacctgatttactattacttgtgtctatgtagctgagctttgttgcagaaaaccacacagcagaccatgctgaaatcctactaggctcataataagcacttcaggtgtgcttgcagcactccatgtctatcctactatttctatagtcagctcacactcctcctctgcatggtgactggttcatcactttcccatttgcatcatgcttcttctcccactccgtgtctgagctaccaaccttgcttcttacttcattgaaaacataaaagccattagatagactccctcttccttaggtttccaaacatgcaagtataccatcatctgcagccttcaactcctttttccctagtgtcgcaggaaaggcagtttcttgccacatacactctgtatcctatctcctttcaccctcttaaggactgagtgcattcaaccagccattttctctctcacatgctccgtctctctgcctgtagtggaccactcagcaggtaaatatttttaagagtctcctatatttagaaatctttccctgacttcatatttcctttcaattgctgccctacatttgctctcgtacaaattaaagtttctaaaaacacaaaaagttgtctacacaggctgactccacttccttgacctctatccttctcctgttcctcaacattcccccaaaaaaggttcttgttaagtcactgtaatctccatattccaaagccagtggatgtttttcccattctcatcttactcaacttctcagtagctttcaactcaagaatcacctgtttcttcctgaaaaattcccttgttttcaagtccatagaagcacgctcacatggtgtttctcctgcttcctaggtctccctgagctggggcagcatcctaggcatgatctcgatgtgtgcagtctcttctcttcccaggacttaaaaaaaaattcctctctacctacaacttccacatgtgtatctgcatccaagccctattttcagagcttcaggttaatacagacacagcctatgtgacatctcaaattcaaaactgttcctggcacacacctctcccctcattacattccctcagcgcattcctgcaccaagccagcttctgcattaaagtaaatggcatctccatttatctcagaatgctgggaggttgtttaaatactttattctcactcgttttcccacattcaatctgtgactgatccctgtccattctaccttcaaaatatgtttcaaatgtgtcgcttgtcattgtccccattgtcagcatccagtccagcatcatcagtcagcctccaaactcgtttcactatccaccctttcctctgtcccatccactcttcacaccatagacagagtgttattttaaaaacaaaagttgtgttttatcactattatcattgaaattcttcagaagctttgtgctgccctgagaataaatttcagaatccctaacatgggcttcaaagtcctggtccctgtgtgaccctgtccccatctgcacagtgctccagccacactgctgttcctgcattcctccatcacaccaggcttcctcctactcacggactcgggtctccctttgcctgaaatccctcgcctcctttttcacaggtgtcatctcaaatgtcactttctcagaaaggtcagagataccaccaaatcacctcagatgtgacattctatcctcatagcccattccaagcatggacacagactaaattatcacgtgaagctgcggccagctcccgaagctttcctaaaatcttcacaataacagagacgatacaagtcagaaatcattaaaattagtcttcagcataagtattaaactgtaagtcttgcccttcataagacaactgctagattggcctttcttattcatcctaataatagaatccattggcgtttcttcttgggccaccgtttttagaacttgcttcccccacaggaaggcgtttgctttgacctggaccttatccccacgtccagaacctcagcacctattctctcccttgatctagcccctagtcccttccccattccaattaataacttgtaattttccacctatatcacccataataaacacagcatttttttctcttttacataaagtggcttaatttctttttcctccacctctgtcttccagactaagctatatataagcaatacacctattaaaatttattccaaaaaaaagagcaatcataaagccatgaactctgtagccttccttagaatcttggaaaatagacagttttaaaggtaacaattcattttacccaacctgcatatttacatagagacagataggaaatggtaactataaagatgttgactgtggttgttgggattataaaggattagaaaatatttttgctaacttttattgtttaattggtctgcagtgtgtactgaggatgtcataaagtctgaaacagataaaatagtctttatgttcattctttacatatggttgctacaggtataacagtatggttaggaaagctcaaccgcaggattgaatgtggattgtcgggtttctctatgctctgtatgtatgtatagaagaatttaaatacaaaactggtcatcactgggatgtagagcgttcctacatgtactacaaatataagtggctaatatcctttgaaaattcgtccttgatgaataatatagaatgttaatgtcttcctaacttgtatacttataagccagaattttggtgctgtattaggaggttcttcctaatgtctcgcctggcaaaaacgtactatggtagcttcagtaaaaaacgaagaacatctattcaccattattttcactgggatatacttgcaaatggtcaagtgcctccctcacaggcttctcttccactttccttcctgtttattgttcaccatcttaccttttccagtttctccctttcacatgtcactatgaggctccaaacagaatgcagtggcctgatggagaactgaccagtgtggaacaaggagcatgcctcccagattgactccagggatctctgaaatatcagatgtacagtccttgctggcagagtatttgccaccacagacacccagaagtgttcaaagtgcctgttatctttatattttgggtcaatttatatgaaatttgttcaattactagatggaccttttttattcattccaataatggaattcatttaagtgtatagaatgaaattccaaatattcgtttgttgcttgtctcagtttagtcaaacaatttccacaatagtgtgcatttcttcagtatttccttcttttctattctccccttcttgggaattttgctatgtgttttcttgaaccacatatgcttctctttttctttcccccaaatcaccttatatccttttcaaactgtttcttaatctttgttttaccataataatttattctacagtcttcccttaattttttctaacttgctttattttctcatattctttttttatcataatgtcatcaataattaactttgtgtgtctacagggtacatgacatcgcatttgcttcccagttctctccatcccattatctatgatgcatacacacatattacttgatatgtagttatagttcaccctccccttgcccactgactacataattacttgtcctttccccagggagccttacaaaggaaggaagggagaaagtggagtcactctgtcactcctacatctcatcttggtcactgaatatgcttttagagtacatcaggcatttctccatagagctttagaatgtgtactgtgctgatgtattccaagtccctgaatacaaagtaaaagaatctgggaaaatacacctaatatcccccaaacaaatgctttctaaactcaggggacactgactgggtgatttttcccctccttaacattctgcctaaactgacctaattaaattctctgtctactctcaaatcagttggtcatattccttctcatatattgttatagctacagttagtatttcctttttccatgttcttatctccccatctagattgtaggccatttatatttctttgactacacctagttcattaactgtttttagaaagcacttaattcaaaggtactgaatcagtacatctcatttcagaataagccacacagaagaaactaagaaacaataatctctaaatctttgtatccagactaagaaaatgaattcttttaaaagtgagatctcaggaatttgcctgttttcttgacttcacaggtagacttaattttcagaaatgtccttcccttttccctttagctgagagagaatatatccatcaaatagagatgtcatggctgtgcaaacacacctgggtttacaggatatgggaatgtcacagagagcgaccagacaggtacttattgagttacctgacagtcttccactcaaagcacatggattttcttctaccccaacgtactaaaaggccataaaagaactcagaggccataaaagagccataataattttatatcaatctcagctcactaacttgatgagcaccctgacccttcagctcttttggaatttttccattttgtttcccacagaacagattttgatctgggagaatatttactcctcagtatcaattctgtcttgccaccaatagaaggtgcctttagatatactgccgtgtgggttgtccctgataaaaaaaaaataaaaagcaaacaaacaaaacagcatcacccacctcaaagtaactaccattcctgacttggactccagaacacattcatggggtttcacagatgacatcaaactggaactgagagggaagccctcagagatgagttgccatttagaatcagcatggtaaaattacaaaaagcaaagtggactcacaaagaactctgtttcctttctagcactagagtaatttcatgctggaactttaagcaagttatttcacctctttaagcctcagattcctcataaataaaaatcaataaaatgaggtataatactaaattatgagtattgattctgccaattcttaaattttgttcttagactttctaactcaaactcagtaatctccctccacttccaggaatctattctaaggaaataacccaaggtataaccaaaaatttatatacaaagatatattgcttataattagaaacctggaaaagactaaacatatattagcagtaagggatagttaaataaattctgatatatacgaatgttaaaattttatgccactattaaaaggtattttcaaagaatgtataataccatagtgtgcttattttacatgtctgtctttcagtgaaaaggcaatattcaaaattattctgaatttttttttcgagatggagttttgctcttgtttcccaggctagagtgtagtggcgtgatctcagctcaccgcaacctccgcctcccaggtacaagcgattctcctgcctcagccttccaagtagctgggattacaggcaatacgccaccatgcccagctaattttgtatttttagcagagacggggttcttccatgttggtcaggctggtcttgaactcccgacctcaggtgatccactcgcctcggcctcccaaagtgctgggattacaggcatgagccaccgctcccagccatgaatttttaatgtatgaagaaatacatcaaaatgttgatacttgttatttctgatagttgaattataagtgcttttaatattatttcacaaatgttttctgtatttttcaacttctctacaatggacatgtaacattatcttttcatgagaacatggaaagttacaagtttttattattaagtttaaaaaccaacgtatttttcactaagaatacattcagaatataagtatataattataatttttaaacacatgaaaaaatacaaaaacagaggcttgaggataaatttccaaaaatgatatggcaaaatgattcagagttcacaataggttatctgtaagatatggagccatcaatttcatagtgttatttaaaaacggatattttctgtgatgtactcacagaagaaaaacataaagaaatccttattatttatagccccattgttacaattcaaaggaaaagtgcatgtttgaaatatcttaagggtaaaatagaatatcttgatattaaattgtataaattgagatggcttgcaacagacttgttctttcataagaaatttttatgagcagaatagatactaatccgattaatattttttaggtcagctgctcaaagtggcccaagaaacaatgtgcttgcaaaaattgttcagtagatcacaatctttttttgttgctgtcaacacactttcttttttaatttaaaccagtgccctaacaataaagcactttgtggtatgaaaaaataaataataatttttaactatgatgtgaaaattgcattttcagaggttcaaattgttttgcttgttttaatttcattaacattggccatcaacgttttttgcagccatgttgcttaatttaagcgcgtgacttctgagcccatgttgttaccttgagtttgtaggaaattaggtgctctcacatctgaagagagggcagtgaagcatataactttgaagctccctcctgcttctatgggactaggatttggcaaattgacttcctggggtaccttctgaagcatcattacctatgtctcaaaaactttttctaagtgattgaattcttcatatgaaattaagtgggtcacaagagcacagattatgttgcatattttgttcacatgagggggaagtttaattttaacatttgcaaaaggggatttaaaactttgtgaaaccaaatatactggcgtcgtattccctaggggttaaagaatcaacagtcactttaacatctgacaaaggatgcaccttctgtttggcaatcaatcatattaaatgctctagtaacagtgtaccttaactagataaatgataagctcttacatttacaaaatgaaaaacaattagatacgtgtaatggccacataaccaatctccaggggaaaaaaatgtacaaggtaaacactcctgatgaaatgaatgcagtcagtgagagtctctattcagccagccacacatgagaataggtatgaattattcaaattggggttcaaattattcaaatagtctctccttcatcaactgttttgaagaggattagggagtgctaattttccggtgtagctgctccttgcctttttgcctggtcggcctcacacatttttttggattggatcatcatgagtcaccgcgctgaaggatttttcaaggttggagcagtgccaaagctattttaatcatcccaactgatttgttgtggggcttttctttcttacttactttttaatgatagagaaatcttgcaatgtgcaacattcactttattctttctggtaacttcctgcaatgaaaaataaaattgtttttttctaccacaggcttttttaacccctggctgcttctttgtaccatattcttcaaagggattttaatgctaattttcctataccattggctttggtgtcaggtaatttcctgaatttgattacgatggagagaagcagctaaaagtctacactggtgagcagtttacagtacttgttagagatcaaggtgaccttgtaaaggcttctattgacacaatattggttaattactagaaatgtaatctatgtatataatttatattttaaagccctttatgatgaagattctttacagttcatcttaatttgagaaagtatcattaacaaataacatatagaccattttttaagaatccaaaatgaataccacaatgaactgctgtacttgtgtttttcttccatatttaaagatgaaaaaaattaactaccatgtttaacattcttcccacagtccatttcatactagaaatatgcttaaccttctgactgatcagttgctcctagctggtttgtaggttggagcaagcagcccttgctctttgcctaaaaaggtctctatatttatgctgtgttgttatgtaaacctatgttaggaaacataggattgttaatgcacatcttgttgaaaatgacagtttattcagcaaagggaagtcacgtgccagtcagctttctcatggtccctcttgttcaaaaatcacatattgactaaataatactagccagaatttattgagcatttagtatgcttcaagcttggtgcttcccttggactatctcatttaatccatttccattccttgttaaagtaggaattttacagaagagtaaactgagggttagagaggttaagtaacctatccaagatcacaaaagtagtatgggctagagccagatttcaaatccgcatctgcttgattccacaattgctcttcttaagaactcctctgccttgcctctctttgtgatgtgatgtactaagaaaaattctgtgcagatctctgaagggtttaaccacagcaagccatgctctgaagacagtcctggaggagttgagggaaagctttcagatgccatctttatccattgaagaagtagccctacctagtgccaagtcttttgatggttacttggtagagaaagatgagtaagacaatgttcctgttcctctgggagtccatctctaaagagagaagatagatatgcaaacaaattattgtgaaatgtaagctaagtttgggaaataaggaaggttgtgcaagagcagagtgattatgcgaggcctgagggatgaagtagccatccctggaggacgggggcacccactggctgattaatgtaccatggtgggaggaaggaccatgctgacatgctggcaagcggggaagctccagtcacctgggactccttcagcttttccctaaaggactggtaatgcgctgaaggtgattccttaaatcctaactacatagccattggtttggggagtcccaggattgctcagagtttgtatcgtttcaaatccaagactgctgctcttaatatagagccctccccacctcagcaaatatagcctgatcgattccagcaggctgtgttgcctgctttaaatttaaatgataaattttaaaagaactgaaatctgtttaaataacagttaaacacagggttttgatgaaaagaaaatgaagaattttacctcccacatctaagctgtgattagaagtttgctctagaaaaaaagcactttgaaactagcccttcatacactgatgtagtgttttcagcatctgtgtttactgaatacattactgcattttttaatgtttctaaaggagctgtgggattattgctgcatttcctattgagttagtaactgacatttaaaaatatttagttggctgatgtagtagataatgatcagtatttcaaaagattaatggtgacttaaaatgcatagagatatttcattagttagttgggaaaccttttattcttatacttctgttatttttttcttgttcatgaagttgagtcagcaagagaagcatattcaaattagacttgtcatacagaaaaaaaaatctgactttgtcagggtgggtggaggggaaaaaagcaactttttgtcagtcttttgtatttcagcagctggattcattgctaccatggtaacggaccacatgatgaggtgtattagattgctgtgtgttgagcacaaggggaagaatgaacacagctttttattgaagttaaaggttactttggagtttgtttggaaatgtgtaaggtcaaatactatagttttcagcatatgtagtacttcagaggaagaattaaggggcatgttggtgcatttaactacaaaaccaggtaaggtacaattgaatctatgaaactgaactctctgacttctgtcgcagtggcataacttgctgggtggaatttcactgtcgcccccacccccacccccacatgggcacccgataaatttctcctgcccaccctcctagctcctccacctccggtttcagctgtttttaatttgaaagtctaagatgttgtgaaatgttatagttttatggcagtgtgtgtgtgtgggagtgtgtgtgtgtgtgtgtgtgtgtgtaagtcaaagaaagaaaactgcaaaggaagtaataagaatgcaataactggtgtcttcaaatcagcgtagacctgaacaaagtgttttcttgttttgttttttgaaaatggtccgcttttcttagaggacaccttattagtggcatttgtccaaagctacttgtctcttctactaaattaagcagtaggacaaagttttccagcaaagttatctagtgtgtttattgtatgtgagcttttgtttttctttcatcatattattgcgagcctcatctaacatgtatagtccggttttatctatattttttaaaacatctattatttctattagcattctaatcttttaggcattgtggctgtatgtgtgatacaggatttaaaaatagaagtaaatacaacatgggtgagtgcaaaatgaactcttttgcttagaggctggtaggaactgaatgtaaacaattcagtgtggctgtgtggagcatcaattcccagagcgcagacgccttctcatgcgttgtttacatatcaccctggcagcttgtttcaaaatgggaggctttggtacacacagagcaagttaaaggagaacaatttctttaataataacttattttaattactttttcatggcttttactgatgtttgatgtttgatgtttgactttctcataagatattaggatttactctaattttagccaggggtttacttaatgcaacttctttccttcctcttagaacaaagctgtcttagcagcttttagaaataaaacctaattaaatagtagcaaagccctactgttattctagtgtattcactgtccacctgaaaaagtgcagatataggaaaatctttttgaaaaatactttcttagtgaactaaaatcaattatgtgcccttaattggcactaattaggataaaagccaataaattttcccaagtttgttcatacagcatgctttcttacaaaaggaaaacttagattttattaaatttatttatgctctgtgattttcgtcgctatttccttgatctctctagtttccatatgtccaagccattttctaagtttaagcaaggaattataatcattattcaaaaaaattatttgccatgatttcaaataaagagaactgtttccatgatgacagatatcaaaagtactataatagcatctaatattgtaaatgttcatgcttgtatctgaatttattcctttctttttccctttgttgtttgagtacaaatgagctatgaccatgtctttcaaaacatgagatattttcataaacataagttgttactactagagaatagggagtttctaaaaatcagtgaaagatggtacctggtaaactattctaaagtatgaaattattgaaactgacaatatctgaggtagaaagtgttatgttttattaaaagaaaaataaaagagggaaagaagaagcaagacagagacacagagagagacaaaaaaatgaaaagatatacaaaaggtaaagataaaagtgtaaatgatctcttacccaagcatttttctttcccgccggtactggaaagggttaaatctgtatctgtcagagaagagagtagtatggatgagggaaattactaaaaagtatttttatttcactattccatctttaaaatacatgataaagtatagatagttcctttctattaaataaaatgaaaaaaaatctacagtgaggttgtctcagtctttgtagttatgggctaccagccagcttagatattagagctacaagtgtgtaaaaaccaagatatgcccaaatttctgtgatctttattcatctgacattagaccatatgtacacaaaaacttctgaaataattttaacagagatcacaagatggaagattcttttatagttgttttggtattttcattcttaagaagcaaaattgacttttgatgtacttgctttaaactgtaaattttgccaggatgttttaattgtacagtatttgtttcaactcttgtttaaattatgctttcttgttaattttgaataatttgtagtgtttgttaacattttagctttaatctctagagctgcctagagtcatagaccaatagataattatctgcaaacatttacctctactaaggagacagatatttaacagttttttaacatgttaaaaaacaaccatattgagtaaaatagtatagcctctgctaaaaaattaatgatatttaaattccaagaaaatatttctaaaatagatgaagatcaagccaatgaatgatgactcaatatcatctagatactccatttttaggagttattttttaacctccgattttattaaggtgaattttattattgaccactatgtaatttttgacatgaaaagaattggattttttttttagaaatctaagacttttcaaatgaaaaagaaagtaatggtaccatgatcatgatgataatgataacgacaataatgattaatttggagaataagatagattagaaagctcttgcctctttgtgtagtaaaaggccaatgctcttagaaggaaagtggaaattactaatgggtagtatgattctcagaaattaaccctcaaatttaattaattatgttaatagcatttataagtcactaggaatagaggtgcttggtatgttattatcagactttattataaaatatcttggttttgttcaataagcgatagaggctgtcatcaaaaatgattaaacttagatatgcagcgttatttctgagggctctgttctgttccattgatctatatctctgttttggtaccagtaccatgctgttttggttactgtagccttgtagtatagtttgaagtcaggtagtgtgatgcctccagctttgttcttttggcttaggattgacttggcgatgcgggctcttttttggttccatatgaactttaaagtagttttttccaattctgtgaagaaaggcattggtagcttgatggggatggcattgaatctgtaaattaccttgggcagtatggccatttccacgatattgattcttcctacccatgagcatggaatgtttgtatcctcttttatttccttgagcagtggtttgtagttctccttgaagaggtccttcacatcccttgtaagttggattcctaggtattttattctctttgaagcaattgtgaatgggagttcactcatgatttggctctctgtctgttgttggtgtataagaatgctgatctttgacaaacctgagaaaaacaagcaatggggaaaggattccctatttaataaatggtgctgggaaaactggctagccatatgtagaaagctgaaactggatcccttccttacaccttatacaaaaatcaattcaagatggattaaagacttaaacgttagacctaacaccataaaaaccctagaagaaaacctaggcattgccattcaggacataggcatgggcaaggacttcatgtctaaaacaccaaaagcaatggcaacaaaagacaaaattgacaaatgggatctaattaaactaaagagcttctccacagcaaaagaaactaccatcagagtgaacaggcaacctacaaaatgggagaaaattttcgcaacctactcatctgacaaagggctaatatccagaatctacaatgaactcaaacaaatttacaagaaaaaaaacaaacaaccccatcaaaaagtgggcaaaggacatgaacagacacttctcaaaagaagacatttatgcagccaaaaaacacatgaaaaaatgctcaccatcactggccatcagagaaatgcaaatcaaaaccacaatgagataccatctcacaccagttagaatggcaatcattaaaaagtcaggaaacaacaggtgctggagaggatgtggagaaataggaacacttttacactgttggtgggactgtaaactagttcaaccattgtggaagtcagtgtggcgattcctcagggatctagaactagaaataccatttgacccagccacccataaatcatgctgctataaagacacatgcacacgtatgtttattgtggcattattcacgatagcaaagacttggaaccaagccaaacgtccaacaatgatagactggattaagaaaatgtggcacatacacaccatggaatactatgcagccataaaaaataatgagttcatgtcctttgtagggacatggatgaaactggaaatcatcactctcagtaaactatcgcaagaacaaaaaaccaaacaccgcatattctcactcataggtgggaattgaacaatgagatcacatggacacaggaaggggaatatcacactctggggactgttgtgggatggggggaggggggagggatagcattgggagatatacctaatgctagatgacgagttagtgggtgcagcacaccagcatggcacatgtatacatatgtaactaacctgcacaatgtgcacatgtaccctaaaacttaaagtataataataaaaaatagaaaaaaaaatgattaaacttatcaagaattgtacaatgtgtgggtcagtatctgacaggaaaaatgcaaactcatttctaggaaagaacaattagttatatttttagtatataaaggggcaattaactggtcttcacttcatggtattattagctggatattttagagtggtattactataataattccccactctcaaacacacatgttatgaaatgttcactagacaccatttcaatattttaattgtttttaattttttaattatttattttaaataaacaatattttatatctgaaacctgttaattttgatttgtttggtggaacatttactcagaaaaattacttacctctacacatccctgacatgaaagaaaatactggatggattggcaattccagtataaaatatggatctatgaaagtagtgaaagaaaatatagaacttatgatagaaaaggatgacctcaaagacaaaaatcataaaggaatggtaatatgaaaacttactccttctagaatatgttatatacaaaattaaaaagataaatggcaaattagaaacaacatttgcaacatatatgaaagagaaaaagtgaatatccatgttatgtaatgaggtctcataaatctgtaagaaaaagcacttcccttttaattttaaaaatatctacaaattaaacacatgtcattttaataattagcaactattttttaaaggggaaagcaaaaggaggaagggggagataatgtctggtttaggaaaagtctggaaaatgggaacacatatacactgctatcatatagcagtgtacactgggtgcaggtggggagttgatcaagctggcaatgtgtagcaaagtctttaaaaattgcatatccttgggccctacagttctactactaggaatatgtcctaacaaaataaatagtctaacgtatttacatagtttttcgttgtttcagacaatagcagtctgaaaaagaaaatccaagaaatatagaaaacacatgagctcgtatttcctctctagaagctataaagctgtaagaagtcggccgggcaccgtggctcacacctgttatcccaacactttgggaggccgaggcgggtggatcgcctgagatcaggagttggagaccagcctggccaacgtagtgaaaccccatctgtcctaaaaatacaaaaaattagctgggcgtggtggcaggcgcctgtaatcccagctacttgtgaggctgaggcaagagaatcgcttgaacccaggaggcggaggttgcagtgagccgagatcacaccattgtactccggcctgggcaacaagagtgaaactccatctcaattaaaagaaagaaagaaaaaaagctgcaagaagtcatagacatggctatatgctggtctaactgttgacttcccaactctttagatggaacatgtataggcaacatggtgtagaaaaagagtcttggcttaagaattggaatgcctgaatcatgctactaactagctgagttaatataaatatgcaaatttatgaaattattaaaataataatgttaaagagtagaaaagtctgtgaatccctttacccatgtatatgtgtttgtcttcaccgctgatttgcaaataagaagtctcatatcaagtgggaagggtagatttttataatttcactgaaattcaataccaaatggtaaaatctggaatgccttgactgtgagagaaaataacaaaatattttaaatagggtatacattccaattattagtttttgaaatttattctaaagaaatttctgctcatataaggatgggcagaggataactgggcttgaataactgggccacacctacatttaggtgtggtggagaggcagagctccagagcaatctgttcaaaattctgtgatgctggaaatgctctatatcttcttagtccaatatagtaactactagccacatgtggctattaaacacttgaaaggtagctagtgcgactgatgaaacagatttcaaatcttatttaatgctaagtaattgaaatagccacgtgtgtctagtgctatcttaatagacagtgacactctagaattaagcacaacaaatagggtcttttatttaatatcggaggttaatttcaagcacctctgctaaattcggatgatatagataggacaagaaggtgagtattctttgtgcaatttcccttttatctacagaaatacagatcaatgaaatcctttgattctagtgactgcaagtccaagattttccagagaagtgttggtctcaagtagtctgtagttttgtttgcttaagaattttaatgctcattcattttctcatttattttttttaaaaaaccttatattgaatatatttgtgttggacactgacattgaaaagatagtagtagtgcagagttccttgattcaggaaatccttggagtatcctaaggagtaaatggtgcagagcagatattacagaggaggggagagaaaatgctgtgtggagaaggaagcactgggataaaccttaaagaaatggccagtgttcaataggaagctggggaaaggaggatcttgagaaacagaacagtatgggaaaaccagggagagatgagaatcagaaatgtctggaaatgtaataatggcagcagcacagaaaatagactagtgtgtagacagaaatgagtccagaagttaatgttacaatccagaacaagtatgagggaggttatgagctaaggggatgaaagtagaatttaaaaagagtagatttgagaggtgttttgtctgttgcttctctttacaataagtcaggtagagaacaactgatttatcttttaagcccccttgaaaattgtcgattactgcatacaatgctggagcaggatttttgtggccaaggaaactgagcgtatcttacaatatgcaagtttttcaaacaggaccaacttacataaatcatcctcttggaagtaggcgcaactacatcatgtatgtagttgaaatgtatgacacatgacaattttgtttggggatgtaatgtaactgaggtggaaacttaatatttatgagacttcctctttcgttaaaatcttaacattctttgattttgacaaatagtgtttttatttcttccaaaaatacaagaattttaaaagtatataattaggcatcgtttagaaaggtcaaaaaagcaatcgtctgttgaatttatgatttgggtacattattcttctccagtctttaccccattttgatggacttttttctcttggcagtatatccaggttcatttataggtgggaagacagtagaagctgttattccagcatcaaagcccccactgttttctaataagacgttaggttttatttcttccaaagccttatgatcactgcagtcaaaaaaagaagggtggaaaatgcagaaaaatggtggaggaggtggagtatggtcttggtcataaagaaatgaaaggagaaaggtattactgaagagtatgggcattagtctgactgtaaggaggactttggcagtaactacaagccagagtgagtgaggaaagaatagcagccatttgggcaatgtgctgaccatgtgtggcttgatactaggaaacctgaacatacagcaggacagagaggagcacatcatgtgagagttccatgagttctcggatttaagaaaatagaagactttctaagtgccagatactgttctaagtactttttgtttaacctatttaaggcaattaaccctttttttttggagaacagtcatagaacatggaaatcactgaagaaatgtaagtagtggtgggatgcagtggctcacgtctgtaatcccagtactttgggaggctaaggtgggtggatcacctgaggtcaggagttcaagaccagtctggcaccaacatggcgaaaccccgtctctactaaaaatacaaaaacaaaacaaaaactagccaggcatggtggtgtgggtctactgtagtcccagctactcaggaggctgaggcaggagaatcacttgaaccagggaggtgaaggttgcagtgaccccagatcgcaccactgcattctagcctgggtgacagagtgagacttcatctcaaaaaataaaaaaataaaaaaataagtagttattatctctccatcaatcctcacaacaaccctatgagcagggtacttttaccatctttattttacagatgaagaaattaaggcccgagaggttaagtaatcccccaaacagcatacagttaatcagagagagctctatttaatcagctcaactactacgccatcctgcctactcttaatctatgttaattttataatatgtacagagatgatacttgtaacgtgctcacaaagtgcctgacatatagtaaacctgcaaaaatgttagcaattatcattatgtaataagatttagaagactttccggtatttatgtcattctacaccgacactgctcagaaatagtaacaagatttttagggcagctctggatttttcttatgtaaagtgtaaagaaagctttgtttaggagcatgcccttataaattggagaaactcttcttctacccaaatactgtcaatcagtttgactggcacagttgaagtttttacctcaaagaatgggcctcattgaaatgttctatatactcatctacatggctctgaccttctgacagagaatgactgctgctaatggtactaataagagcaaatggaattcccttccaagcttggtatttgaataatatgtcaatttgttcattgccgtcttactaggaattaaatgcgctaatatttttataacctaagggagctagtgcgaggttggcagccagaaaagggaatcaggccagaggctggccaaggcatagtcatgagggggtggaagggtcacaaagtcaaagtcaagcaggtggacccaggcagaacccaaccagactctagaacaaagttaggttcaaagtttggttcttatctcctttccctataatgtgggctggtaggggtgggttgattgtcatcctctgtacaaaaagaattgtatggaaaattagctggctctgaaatctaactgaaataagaaagtcaataaaagcataattaaagatacttaaacattgtagatacaggcaatgaaagaacaatgcctctgttgtactggatttccagcagggaatgatgctgtttgggttaagacacaggtaaggcagaggagctttgagaataccatggctcaggaaggaagaaatgtgagaaagctagagaggtacaggagactacagaggagaagggaaaggcaaaatctggattctgagtaatcagaagttgtcgtctgctttggtggctcctatagttccctttgtcttcatcagtgacctgagaattcacagggttttcaccagtaatgtcactgggcaagtgtgccaggccgaccacccaataagaggacaaggaagagagagtggaaggatcagcagaactgtcaccactctgattctgtggtgtgggagctggggatgtggggtggggaatctctctctagaggtttgttctctgctgtgttactcccatctgtgatggctttttctccatgagcttaaatggtgatggttttcttccaactattagggaatacattgataatgttagtgattcatagagtgtctgaaataatctctgcaaatgttatgtgtagttggttatctggagaagtaacaagcttttatcaaccataataactaaatttgtatggtgatttactgtttgcaaaatattcaattatgttatatttgaatctcccacaatcctaggaggttgatgacaccatcaattcctttataaggatgaaggaaatcaagctcaattactttcctagaggcactgggtttgatagcaaagcacaaattttaatttactggtttactaatgcatcctgcttcattcaacacctcttcacctttaaaagtaaaaattgtctcagtgatagctatttacctttagaaaatggctattacaaataaagaactcttacatttactcagattgttcagattaaattctccctttaaacatactttcaaggtagtttatgtacacagtaggtatttaataagtgttaactgcttgattattgtctctttgtactcctccagagcaatcattctgattctcacacactggattaaaaggttgtttattttggagtagaagggaatactctgcaattacaactcccaacatgggaaactaatgaaaaaaaacaaacaaacaaaaacgtgacgcagttctttttaacttaagaaaataatctagcttctaacatataaatgagtagacttaaaataactggacaaagccagaaggcaacaaggcagacaacttatacttaggcaaaactaatcaaaggaaattatcatgagccccaaaactactctgcttctcatatccatgcaacacccaaacaatatacaattttatcttgcctatgaaattcccaagtatattcctacgtatgtgtttgtctttgtaccacacactgtctgtattctttaaaaaccttcccttacctgacattgcccttgagtttagttatcttccttgcctatcggagacataaaaaatactcttcccctggctaatgctctgtgagaaccagtgattaaagtctgggcaggagaaaagaagtcggggcatatgattgtcagtattagggttttccggtttggctaaagtgaagctccttacttcagctagtattgcagctatttgagctcccctttccttatactccttcctaaaatgtttaaaaaaagtccaaattgcaacatttattacctttctcatttaaaattgtattaaaataatcctttgggtttaaatattatcttctgttagtaatgctaagatctgagattcttttgattaggttaaggttaggcaggaaaggaatattaaaataaagaagaatgtcacttgctagctattaaatatattataagctataatcacaattaagttgaactataatttaaaagggtgttaatatagacaaaccctggagtataaacaaatacttgcataggtatcaatatatgctagacaaggctgtgcatagcaacaggaaagattattattattatgcagtaaaatactactgggaaggaaaatattttcattcatactacaaaatgaattccaggtaaattagagttaaatacttactataaatcaaattataaggattaatagaaaatatacaggaattttaaaagagctttattgtgatataattgataatgaactaaactatttaaattgtacaaattaataggttttgacatatatatatacatacacacacacacacacacacacacatatcctaagccatctttagaatcaagatagtgaacatattcatcaccaccaaaaatttcctcaagctccttggtaatgcctcccacctgtccctcccccatcccaagcaaccacaaatgaattttcagtcactatagattagtttgcattttctagagtttatgtaaatggaatcagacagtacatacttttttggtctggtttctttcactcagtataattgttttgtgacttatctacattgtgtgtatcaacaatgtgttcatctttcttactttatttattgtttatccattcatctttgattaacattgaggttctttctggtttttgactattacgaataaagctactatgaacattcatgtgaaaatgtttcaacagatacatattttctttccttttgagtaaatgtctatgggaattttaaatgatccatgaaagaaaaaggactttataaatataagaattaaaagttcaccatggaaaatcattatatttgacaacattaacattttaaattactgcaactcaaaaaaaaatgttcttaaccaaacttcaggttaaatgatagtcaaagaaactgtataagtaatagctaacaatgataagaacttgccataagcaaagcatcggcaactctgtctgatctatcagttgatcttcacaacagtcctaaaaggttaaacactatagtgccacatcctgtgtacttaaccactgttcagtggtgcctccctgtgtggagaaggagtatatattatacatagacggtatatttgtcaaaaaaagtttaatatccaatcgtaggaaattatgtgaaacataatagaaataatttatatattgtatatctctgaaataaatatgtgagaccatatgtcaataacctaaatataatttgtgcaaaatatgtaggagaatacaaaggcaataaaatgggcaagggacataagatgttcacaactaaaaaaagtaaaaatagggccaggcacggtggctcaggcctgtaatcctagcaatttgggaggccgaggcaggtagatcacctgatgtcaggagttcgagaccagcctggccagcatggcaaaaccccatctccaccaaaaatacaaaaattagccgggcgtggtgacgggtgcctgtaatcccagctactcaggaggctgagacaggagaattacttgaacccaggaggcagaggttgcagtgagccaagatcgtgccactgcactccagcctaggcaacaagagcgagattctgtctcaaaaaaaaagaaaagaaagaaagaaaaaaaaactatgaaaaatattaaacttcactcttaatcaaatacattcaaaataaaatcaaactgtgacacctatcaaatgagtgaatattcttagatatgttattgtcagtttttattgctttattttaatagtagtaatatgtaatgttagtgaagttgaaagccattctcacactttattggtggtgaaatataaattaatacaatcattctggaaagcaatttggcatatcagtatgtatcaatgacttgacaataattatgccctttgataaaagattttatttttgaaatcacctgaagcaataaccttaaatggatacaaagagttatgtacagaatgtcttttatagtgtgatataatgtcttataacaggaaaatgaatagctaaagtcatttcatagctaaaaaatcctatgcagctactaaagcggtgtttactaagcattatcataaactgttggtagaagtgagaattactacaaatttattgaacagcagtttgataatttttaatgtttttaatttataaagaaaacaggtttatttggctcgcagttctgcaggttgtacacaaagcataatgccagcatctgctcctggcaagggcctcaggaagcttgtaataatggtacaaggtgaaagggaaatagcatatcacatggcaagagaggggagaggtgccaggctcttttaaaccagctcttggtgtgaattgatacagtgagaactctctcattacagtgaagacaacaccaagccattcatgacagatctatccctaaacacttcccactaggcccacctccaacattggaggtcacatttcagcataagatttggaggggtcagatcctaggcaaaaagaacaaagctggaggcataacactacctgacttcaaactatactataaggctacagtaaacaaaacagcatggtactggtaccaaaacagatatatagatcaatggaacagaacattgatcagaaataacacctcagaaataataccacacatctacaaccatcggatatttgataaacatgacaaaaacaagcaatggggaaaggattccctatttaataaatggtgctggaaaaactggctagtcatatgcagaaaactgaaactggaccctttctttacaccttatacaaaaattaactcaagatggattaaagacttaaacctaagacctaaagccataaaaaccctagaagaaaacctaggcaataccattcaggagataggcatgggcaaagacttcatgactaaaacaccaaaagcaatgacaacaaaaggcaaaatagacaaatgggatctaattaaactaaagtgcttctgcacagtaaaagaaactatcaacagagtgaacaggcaacctacagaataggagaaaatttttgcaatctatccatctgacaaagggctaatatctagaatctacaaagaacttaaacaaatttacaagaaaaaaaaaaaacaaccccatcaaaaagtgggcaaaggatatgaacagacacttctcaaaagaagacatttatgcagccagcaaacttatgaaaaaaagctcatcatcactggtcattagagaaatgcaaatcaaaaccacaatacgatactatctcacaccagttagaatggcgatcattaaaaagtcaggaaaaaacagatgctggagagaatgtggagaaataggaacacttttacactgttggtgggactgtaaattagttcagccattgtggaagacagtgtggcgattcctcaaggatctagaactggaaataccctttgacccaacaatcccattactgggtatatacccaaaggattataaatcattctactataaagacacatgcacacgtgtgtttattgcagcactgttcacaatagcaaagtcttggaaccaacccaaatgtccatcgatgatagactggattaagaaaatgtggcacatatacaccatggaatactatgcagccataaaaaaggatgagttcatatccttttcggggacatgtatgaaactggaaatcatcattctcagcaacgtaacagaagaagagaaaaccaaacactgcatgttctcactcataagtggtagttgaacaatgagaacacatggacacagggagggaacgtcacacaccagagcctgtcggggagtggggggctggaggagggatagcattaggagaaatacctaatgtaaatgacgagttcataggtgcagcaaacccacatggcacatgtatacctatgtaacaaacctgcacattgtgcacatataccccagaacttaaagtataataatttaaaaaaaaataaaaagaaagatttggagggatcagaatatccaaatctatcattcttcccctggtcccccgaatttcatgtctttctcacattgcaaaatacagtcatctcttcctcatagcctccaagtcttacctcattccagcatcactcaaaagtccaaagtctcttctgagactcaaggcaagtccttccacctatgagcctgtaagataaaaatcaagttatttgcttccaacgacagtaatactacaggcattgagtaaacattccaaaagggaaaaatcagcctgaggaaaggagtaagaggccccatgcaagtctgaaacccagcagggctgaccttaaaccttagtgctccaaaataatccttcactccttgtcctgaaaccagagcacactggtgcaagggatggactcccaacacttagggcatctccacctccatggctatgcagactgccaccgagtggctgctctcctggattggagttgagtgcctgtggctttccaggctcaggatgcaagctgccagtggctctaccattttcccaactgaaggacagcaacccccttctcacagctccactaggtagtgccctggtgaggacgctgtgtggggctccaaccccacatttccccttagcactgccctaggaaagtatctttgtggaggctccaccctgcggcaagcaccaaggctttcctctgatacatcctctggaatctaggtggaagctgccaagcctccttcacttgtgcattctgtgtgcctgcaggctcaacacaacgtagaagcccccaaggcttgcagtttgcactctcagaagcggcagcctgagctgtacctgaagccctttaagcaaaggctggagccctagcagctgggatgctgggagcagttttctgaggcttcacagggcagcagggtcctgggcctggccccaaaacccattctttcctactgtgatcctgggctggtgatgggaggactgtcctgaagccttctgaaatgcttttaaggcctttttcccattgtcttggcttgataatatttttaatttccttaaaatacttatgaccattgactagtaattttacttttaggaatgtctaaaatggaaatatttttggcccagaatttataaacaaggatactgatcccagtattataatatccttgtgaatcaaggatattgattcacagtattgtgaaaacaaattttcactgtaaaacaaactaaatgcccaacaatgaagaacaagttaaataaattatggaacatctgcatgatggaaaccatttaaaatgtcctttttttttctttgagagagacagttttgcttttgtcacccaggctggagtccagtgcctcaatcttggctcactgcaacctccacctcccaggttcaagcgattctcctgcctcagcctccgaagtagttgggattacaggaaagtgccaccttccctggctaatttttgtattgttagtagagacagggtttcaccatgttggtcaggctagtgtcaaagtcctggcctcaagtgatccacccaccttggcctcccaatatgctgggattacaggtgtgagccactgcactcagcgcctaaaatgtcttataaaagtgttttgtgaaagaggatatgttttttataaaatgccatctactatctaatcctaatattaagagggagggggggaaaaggcaaaaaatgatagaaataaagcaaggtatccttaatgactgtccatgggtaatagattaattttcctatctttactttcctatgttttctgaattttcttcagcagatacgtattactttcgcaatgttgtgatattaagttaaaagtgagaatttgaaattgcatactcaatgtgaatgcagctacgtatagaagaagcaagaagactatcagctgcaatgttaatagtatggtttttatcttcttttgtataattattggagtttttctatatgttaagaaatcaggacaaaaatgattttgacaaagaaaggacaaaaaacaaggcccacttcttagtttatgaaaagcagtataggagaacagaagggaattataataggctcctcctgctgcaggtttgagaaatatcacttcaactagtttaaaaaatttaaaaaaataaaataaataatttttcatgcagaaatattttacatgaaaagtaaaatttccccacctaaaatttctattctcatcccaggataaaactgttgagggctttatatatttccttccagtacttttttcaaagaatattataaaataaagtatttttctcaaaaaaaaataaaaaggaggaatcagcttatgtaaataacaaggacttgggtacagttggctgcagactcatttagatccagaggcccaaagggcatccccaagttctcttccctgtttcaaggctttgcttgtttctgcttagctttcttcagtgattcctactcaaacacaaaaccaaaccttatgcctctcactagctcctggaaagaggcttcccaaacagcaggtaagatggctgccagtagcccccaaatcacaccccaccagcttcactttctgagcaggagatttttcttaataattcaaagatcccagcaagtaagtgagaaagcctggcttggggtgtgtgtacagccctgaatggtcaccatggccaagtgggtggggtattctgacacccggggtcccttcagttgtgcacctctatgtctgaaggaaaacacaggcagccccaccacaattacctggaagagagtcccagagaagtcacaagaaaaaaaagaggaaagggaatattgaaaagagagtatgatgtcaatgtcaatggcaggaactcataggtataataccaaatgtcttacaaaatcatcttattcagtcagtcctcgtggaattatataaggaaaattattatgtgcactttcaaataaggaaatggagggtaagaaaaacaagttatttgctcaagtacatgcaggtagtacctggcagcaaggagatttgaactcaagtgtgtctaatgtcattgccaaacctcccctctaaaatgttttgtcttccttgagttcttatggctgctttacctgcaatcaagagacagagagagacattctgtgtttctgtgtgtgagaaatggcacaggggcaactagaagttttaataccttcctgtaggtggcaggttgctgctctctccttcagaaccccgctctgaggaaagctaaggaagagaacaggacgtctgagtgtgtgactgaggtaaaatgttgtatatttttcacactttaaaatcagatgtaggattcaaataaactaaaataatttaacactcaaatttttaaaacttctgaaggaggctgggcacattccatattgggcattcaaagagtattttccacagcatacgaggcactctcaaagatacaaaagtaaacacactctaaattaggacacaaagaaaagatggaagatgggaaattcaaggtggaaagacataaatggcaaccagaaataatagtcattgtagatctggcagttccccaaccaaagcagacaatctgaaagaaacctaaggttatttatacctgctgaggatttactctacccagtgattaaacctccaggacacactagataagtctagaagagctttaagacttcaagatttgtgttttcttaaccttgctgtttcttgtccttggttctgcatgaaaaaactcatctctccacagttccaaggaataattccaaaaataaatgtaggcatttgcttgaaccaggacattgtgtccccagttttctttccgaagcctacaggatgtacgagttgctcttgaagcctgtctgcagcacaacaaatccaagttctgcatttgctccccagctgagtgactgcactgggcaaagctgcacttaacagataatacccatgggggaactgctgggtgaggaatttgtagtgaaaagcactgacaacagcttgagatttatttagcacaatttatttagttcttcattcagaagaagtaaaattccatgcatgaggtaatgtatgcaaaagtgctttaaacttgaagtgttaaagcagtacacagttgttgggggctctgatgtgagaatggccagcctgttctctggttagtctggagctaattccttcaagaatcacaggtcagaagtgttgcattgtggccccttgttcagtcttggcaaaaactgagggaacatggcaaagtgggaagaatatagaccttggagtcagatttgggttcaaatatagtaattttcatggctctgggacctctctgtgtccatatgtcctcatttggataacccagttgtcagctgggacttcctagccccttgagggctcacataaagttggctcaaaccaattcgaacccttttcaccacctttgggaatactggagttactgtcccctaacctgttattcctctcaccctaatatctatgcacattgtgttctcttttccccctttatcaaattgcaagtgaaactctgtcccctcactggtgaccaccaaagagctcactcatgttggtgtgtccagtaacttcactgaaggtttggggttggcaaggactggtgtggggaggctcacagcctttgatgtctctccagaaacctctatctgcttttttcacccttcacatatgcctccagatagtttcctaggaacacaaatattttccctcttactatgcagagaaatttagctctcttctgttcttgttccaagttttcatactcaaatgcatcaagatgcccagaacaaagggtcttccaatggcctcctctgaaagcaaagctataaatagaaaaaaagggttatctgttatcttttgaaaatggtgataatttctaccttgctatttttcaagatttgtggccgggcgcggtggctcacgcctgtaatcccagcactttgggaggccgaggcgggtggatcatgaggtcaggagatcgagaccatcctggctaacaaggtgaaaccccgtctctattaaaaatacaaaaaattagccgggcgcggtggcgggcgcctgtagtcccagctactcgggaggctgaggcaggagaatggcgtgaacccgggaagcggagcttgcagtgagccgagattgcgccactgcagtccgcagtccagcctgggcgacagagcgagactccgtctcaaaaaaaaaaaaaagatttgtgcgaattttagataaaagggatatacaatactttgcacaaagtacagcacatagcaagtgcataatgaagaaatgatgatgatgatgattctgtattgggtagccagtgtttgcagtaactgtacttctttgagtatcacttatcacaattataattaattatttgtgtaatcatctcttaatgtatgtctccctgaagttccctgatggcagaaactgtttctgtcttgtttacctgtgtgtcaccagtgccttgtacagtgcctggcccacatatttaactctttattgtattaatgaatagataaatggtcaaatggagagtgttaaatgtggagagtttttctttctttacagttttaactttataggggaaagaagtgacagggcaggtgagggatggtgaaaactctgaagatgttggaacattgtcagctgtctaagtgtttgggaaagattagcagagactccatttctttattcactcattctttctgtgcattttctactctcaccaccaaatcagtctcctccctatccaagttccatttattagtatccctgaagctgaaaagaaaagagaatatttatttgcctgtttccacactgtctcactaacaccatgatcattacattttcagactagtccagtgaaacctaccttacccataatttatttgaagtagtttatttttccccctaattttcttcatggcaggtattttgtttttcagctaacttgttggattgcctactaatctaactttagtgttatagctttttctgaagaggacaatgtgctctgtgctgtaatgaagcttgtaaattaactctaggaatataactcattcttatacagcagagtcacctgtatatgccaagacagcgtgatccaaagcaaagacactggatttgcagtcaccttcctctgcgatcctcctttacttatctaaaatgagaagcctgggctaaagaaacaaatgtcaaacagtagcaaaggatgcaacctggactgagctgggttctattctccttccctgtgagagcacctccctgcttacgttttagaagcttggctcaggttatggaattcatttgaatttttaaaaatccatggcaaaaataaaaatcagcaagctggaaaagacattcttctataatcccaagcaaagaaaattaaatcacacaacaaatattttctaagtctaaagtgctatgttagtaggaatattagataaagcacatgaggctcagttaaatttcaatttcagataaatggtgagtattttttagtgtaagtgagtcctattcaacatttgcgatatacctgttgttggggttctgacagctgctaagtatgtctatgccaattatgcattctggcactggggaaatgaccacaggatgagtccggggatcctctggactcactgtaagtcagacctgagataaaactccattaattacctgacctccataagtccctattttaactggaggaccacagtgacgttttgggtcccctgcaatcaatgtcagctcagagccaatgtccagtagtccccgaaatatctgatcacttccctttccccagtgcacagttaccctggttaaaggctggaggtctccttggggaagaatgggagaaagattcactgcataaattgtcagtaatgtagtggggtctttcctcaaaaggagccagcctccccttcattcgaaggcttctgggtctgcaaactggctcaagtctggaaattgattgaggggctgtgattctctggttttataattcaaattagtcttctgtccattcgacctagaagttttcttcttgtataaattaagtaggaatgcagtaggcttcctatcagtttcacttctaggaacaccgtgattaattagccaatgccagagtgctacacaagtcagattattctgattgcaggtctgcttctgctgtccattatggtagctatgcccaccgtgcctttgatggttgagtgccaacttggaccctgccaccttgggatccaattattcccactgtatttaaattttataattgagtgactgcggttaccaccattagatctgacatacagagaagagcaattacagagctcttcaaagatgcaggtgctgccctcacaaatctatttcacaaggcattggtcaagggtatatcttctggaccctcccagctgtgatgagtaggtctaaagtgactaatccactccaccatcccaatctccctaagcctttggatcccttcctttatgttaaaccaagggagatcaggcatttccagctcactcacagtgggcctcttttaatccatatttcagctaaccaagcaaataaactattagaatattttttaactccctgagctgcaacattaaaggcagagtttctacttagtgggaccaaattaataaattcagcctgatccaactctatgttccttctatcattatcccacacctttaaaatccattcccatgcctgttctccagatttttgtttatataaattgaagaactcaagcagttcttttcaagtgtagagcacctcctcatgggtcacactctcaacctcacctctaggggctgctgggattttagtctagttataggtctagaagcaaacagaggtattgagggtggctcctcaggagaatcaacattatcttgcttgacaactgcctcaggagagtcactgttgcctcaggcagtgcagggtttatctcttcagacaaaggtcgaaaggctgatggcagtatgggtcagggaggggatgttgactctactggggatgggaaagctctttcttctggcaaaaaaaaggttcatcagagtttacaaactcagtgtcctcagtttcatcagaatcttcccacacatccccattccaagttgcagggtcccattcttttccaatcaatgccctcactttaacagtagtcacctggcgaggctgtgcatgcatctttcattgcaggtcagccacttgcatgataagagcttgtctgtttttccacaatttcagctctttctctacaggagataagactctcattcagggcaatcttagcagatttgaggctcagtgtctgcttctgaagctgggagacagaatcccccagttcatcattttctttcaacactttgtccactgaagttagaagtaaccaaccagcttcattatgttcctttattctccatatatggtcaaaggtattatgtatagagtcaccaaactccttgcctctcaggagcagtgaatcagaagtgtcaaatgcatttattttgcataactctctaaacagttcacaccaaggactatcagtgttctccatactattagaagtagagtccttagcattttgtggtctaatcatattaagcagccaactccagaagcctcaaaaccaacgaaagaactccattcttaatattctgttcctctagaaccactcctgttaccaaaatctgtattagtcagggttgtctagaaggacagaactaatagaacatatatatacacacacatacacatatatatatacacacacacacactcacatatatatacatgtgtaaggagagccagtccaagtcccaaaactgaagaacatggagtccgatgtttgagagcaggaagcatccagcacaggagaaagatgtaggccaggaggctaggacagtctctccttttcacgtttttctgcctgcttgtatttgctggcagctgattagattgtacctaccagattaagagtggatctgccttccccagcccactgactcaaacgttattttggcagcacccttgcagacacaatcaggatcaatagtttgtatccttcaatccaatcaagttgacactcagtattaaccatcacacctatactaaaaaactgtttgccaagtgtggcaaccttatatgccaggctcttagggactaaaggatgtgcattataaaccaagaagagcacgaagacattttttaatggattcttttgctgttgattttcttttattattattattaccattagttcatgtggctctttgcagttcattgcattatttcattgcctggcctcatgttgcaacacattatcattctgtggaccagccagaagaggcagctttccctggacctaacatttttattttcatttttagttctggggtacatgtgcaggatgtacaggtttgttacataggtaaacatgtgccattgtggtttgctacacctatcaactcattacccaggtattaagcccagcatgcattagctacttttcctaatgctgtccctccgccaacctaactgttaaggtgtactcttcacataaggtggctaaaacagtgcatgagaagctagccatttcctcaccttcatctccttttgttatctcacacaggatcctcacccaactcacccccagagacaccacttcttttgactttactacttttggaatttatttctcattcaaaaattgaagccaatagtgttcgaaatgcataaaatatacctagaggacgtctataccatgaagttggaaattctagttcaatgccctccacgtgaagagctctcacaaacactaatgactgagtactgtagtttgtagctgcaccttcagattagctaacactgataagtattataaaggagagcaataccacattaaactctgaaatgttactttccctaatgagtactcacacactacacatatgtatgcgtgcactatttgtcatttgtttccattttttagagatttcatttctaaaagctgtaggagaatcttttcaaatgaattatatatgaaccataattaatatgaataaatccgctcatgcaaaacatttcaggatgtacatttcccatttatattatcaccaaaggaggaatttcattatttttcatacagctattttgtcatggatcttaaaatggagtcacagataagaagaaaaaatggaagattgtacagacagaatcaaattccaggttctaaaactagtagggtggacagcgaagataaagtcaactttataaagataaaaatctcagtattctgaaatttaaggcctcatttaaatgccttgaacttcttaggattaaaagacatttgcccagtgtgttcttgggatattcaaaattgtgcattaaaataaacgtgatattatgaacctccaaaaagtgttcatagtacattttggccaaaaactgtgtgaatcaaccaagtcatttgagcataggtcctgtttaaaagtaatgatgcaaaattcagtaatgaattttgaaaacctaaaaatagtctgtcttgttctagaaatgacaaaacctgggggataactttgttctcattcttcatataatttgatcttcctgctttgccacagggcatcagttttgtgagaaaggcacatagtgcaggcaacatttctcacttggtatggcttgggaagaatgggcttccttcaaaaccagggagtagtgaaagttcatttgtattcatttttaaacagatgtatagtgaaagtattagtattctaaggatatttggattctttgaaaatattcagttatccaaaattaataatttggggcttaactgaaacagaacggtatattttatacataaaaggctatcttaatcatcaaaggaagaactagctaatatgtattaaggaaattgaggcaagctgtacctatgaaggctgttatctaagttcaaatccacaaacaacatatagtttaaattgtgaaatgatatatgtgtacaaaattactttgtaaagtgattgtgaagcctcacctaagcgaaatagtaattatttcttctaaagacggtctggttcttgccacatttttctgtctcttagaaatatatttgaagccataaggctacaaatgaaagagttctctccttttctttctaagtagttcacttagctccagctgaatcatctgtatagtgtcctccctcttatgatgcatacaaccaagggatgcttagagaaagggagcctcccaattcttgggaataggcctcgatgtgtgaattctcacttccagcccttccaggtcaaatcttccaagtctttagtcgctctccctctccgattcatcctgtgtgtttaccgttggattcatattctgtaattactgcttgcattgtttaagtcctgtgcataggagtcttcgcagaactctttgtttcctccactatgaagtataagccacgtgacccggctgtagtcagtgtagtgctccctaacttcactcattttaggcacaagtggcactaatgaacatcacagagacacgccttcatgaaaccgacagtcctatgaataaaacagacaccaacaaaaacaatttcatgaagattttatgacaattgcaaaaactgttagacaattatgggtatattagagtatatactagagtatattagagaaattcggaaaagctgccctgtggtagacatgcctattggaactagccaggtttggggctgagaggggttaggatatctatgaagagaaaaagagaatattccaagcaatgggatcagcagaagcaaaggccctgaggcacatatgagtgaacacagagacatgggcctgggggccaggtggcttggacatacaaagccactttaaagattcgggacttcaaattaaaggcagtaggaagtccatcctgcttttacttgccattctctcaaaaagcatcttagttgaccccagaggccatcagacacaacacgcatgtctactataaattagctcatgtaatatgagctgcaataatagaagcataatatctaaacagaggaaggtacacacagtacaggcccagctagcaagaatattccaggagcctcagaaacaaagcaacatagtatgtttactttgtttaaaacaaagatgcccatattggctttttgccatttaaaacatgatttactaaaaatctagattaccaagcaaaccaggctgagtccagctttgaagctgggctggaggccaccctccttctactcctttctcttcaccctgttccctctgcacctcggtctctttatcctcttcttctatctgccgtcccgatgtgacaaatctctccctgtgctgtgttcagggtttaggatgtctgatagaggacagcgcgtgacggtgaggaatgccagtctgcttagtcatgcctttttgcacacctctggagttttgtgcatacatagctaacagtctggagctgcacattaatgaaggattagtgcagaatgcatgcctagagaaagtttccgagatcatgttgcaaatcacttttgacaagttttgcagagaaaagctgcataattcacttgaactgtttttacaacttttattttagattcagagggtatatgtgcaggtttgctacctgagtatattgtgtgatatgatgctgagatttggggtgtgaatgatcacccatgtactgaacatagtacccaagagttagtttttcaaccctttctccccttcctccctccctgctctagtaatcctgtttctattgttgcacaccatggaatactacgcttgagctttttaaactaaaatatgcctggctgattctctgagattaggatataagtgggatttatattaaaaataaacacatttgtccttctttaaaagtgacatatttaaaaacttaaaataattatcattttctttttgtttggaggtgcaaggtctagttctttttcttttcttaactctcacaaatagtcttcccctcacagacctccataagatattggcataatcctcaagtttggacaaacaaaggcacatcatacttttaaaagctttgtcattcaaaagtctcatttgcttgcctgctttgcagactattaatggaccttggggaataaaaactgaagtttaaaacatttccagacagatgtgccacagagcaatgatttgcttccttgaaaggacttctgtggacccttgtaattatgacaatcacttgcaaactccaagtctctcattcctcacctccgcaatccctgacactccatattcatttcatgataggcattctaaagtgttttttacactagaaggaggaactggctcaaagaaatagatctctaaatcagaaaacagaaaaacatctctaaccaggaccccaaaatgttaaattctggctttggctttgctgtttcactaggcagccttggaccttttgcttgacttctgagtttcattgttctcatcatgtgacaatgcaaagtagggaacagtagtacagatacctattactagaggagaagtaatggtgagaaacttcttggtgtgactccattattcacacaccattcttgtttgccctgacgtgttatgcaggtctggcttttatttgagatgtcctgaccttatataagagataggactgattcaagtttcaagcctaatgatgtaacacctctcagctggaagggagcatctctgagattgattcctacactgtgggagttccaagtatatattcatcacatataataaacttcctaagtcccagaatccctttcgccaccttttgctagcttttataggacagttttttagtagttatttcttaatcagtgtcttatcatttccaggtagtagtttagactcattaagcctttgaagttactggtgctattaagtgcatcattgctctgtgcattgaaggacagtgaagtggtggctgcttgtctgtgtgcccagaaccatcaggaaatggcttgagtaccccctgggaaaaaggctttgttaaaaaggaactgcttgttcactctgggacacttagccttctgcttattagtccttttgctgtgttcttaccaggttgagggacacttctttccataaatgcagacactgaagctggaatctggaacatgtgttttcagtatttagagatctgcagagtggacacatactggcacatcacaagcatgattgttatggtctcaaaagtgtgggaggatctcccaatcccaagagttttgagagcagcctgggtgacatagtgagaccttgtctctatgaaaaaactttaaaaaataaaaattagggcatgatggtgcacgcctgtggtccccattactcgggaggctgaagcgggaggataatttgagcccaggaggtcaaggctgcaatgaactataatcacacctctgcactgcagcctaggtggcagggtgagatgctgtctcaaaaacaggaaaaaaaaaaaagaaaagaaagtgtccacagtagtgttaatgctttttggctgcaaatattttgttcatgtgccacagtcttattttgtaccctggtgactgtttctagcagtgtgtttgtggagtggaggtgatttgaggcacaggcatcatgaatcagaggagcatgatgtatgtgtgggtatttttatttgttccatttacaaactctaacttggtggaattataatacaaaaattaactttgtgttctcgttctctgcgcaggtccattttctacataatcgtattgtatatcactttgtcctttatattatagtaagaataacataacataataaaaggatgtgatattttaattaggttaatgtaattcactgaggtactggctttgggggatcataaagttcccaggagcaggcactttattttcataccctttggctagctagctacttttatgtttcgtaatatttgaactagaataagcagggtatcctcccattcaggcagtccttgatatgtggtattggggttacaatgattcttctatcatgatagccacatatgtgggctgatattttaataacttcaaaataatctttgctatatttacctctattaaatttgttcatattaattaagcaatcagagctaactaaatatattgacacttaaatggtttcagagtgtagcctagctaattctcttcaggaaactcgagattcaaaagcttatgtcaatggtaactttatgtccaaggatttcatcaccaatcctttggagcagaatattcctggagcctagttgctacagtgagtcctgtgtgagccctctagatatcttcaagaagtactgagatccaaagtactcaaatttgagtttctgttttatgctggcatttatcagatatgcaagaaatattcactaatatttatatctgatattagtcaatatattagtcagtacttatctgatattggtcaatttattaaatattgagtaatatctgatacataataaataatagtcaaatattagtatataacaatatgatgaagaggctacaagttggaccaaaggtcagttagactgacgtgagttcaaatttgagttatttaaatttgagttctttaaatttcacttctctaagcctgagtttcctcatctacaaaatgaggataataacaccaactaacttgaagataaaattaaataattaaaattaggaatcacagtaggcctgtctaaaggatatttaggaggtagtagagtctaaggaggattagggaggtagtgcagcctgatggctaggaagccttaggagagacttcttaagtacaaatcctggttctctggctacctgcaatgtgatcttgtgaaagtttcttaactcttctcagttgtattagtttcctcttgttgatctaacaaataactacaaatgtagtggcttaaaacaacacaaatgtattatcttactgttctgagatccagaagtctgaagtgggtcttactgtactaaaattagagtgttggcagggctgcgttccttctggaagctctagaggagagcccatttccttgccactgctagcttctggaggccacatgcatttctcggtttgtgggtcctgcctccatcttcgaatcctctctcaacactttatgagaactccaataattgcattgggcccaccaggataactcaggttaatctctccatttcaagatccttaacctaatcacatccacaaagtcccttttgtcaagataacgtattcacaaatttgggggggttaagatgtggacatctctgattatcttctattatctatctagatagatagataatctattatctatctattcccattatcctgtctatttcatcagccttcgttttctcttcttaaaaacagggtaatatagtatggcctctctcagagttaggataagaaataaataaaataattcatgtgaaatgctgagtacagagcctactcacaaagaggaagcacttaataaatgtttattattattgttatgacattcaatgaatgaatctcagggtctcttccggctaataacccaggcattcatgcctctgcctcaccgggacaatgcaggaggcctggaagactgaaaaagaaggcgccttcccaccagctattcttcctcactcaaattcttggcaatcaccaaattagagccatggctctcttaagaaacacattctcccagtcttcccttaatttcagaaaaaattctcttcaatggaagggacataattaaaagccttataatttataggaacagatccagaggcaagaaataagggctgcctctgtttcttctctttccattctgtattcctgtcatagccagtcaacgctggtcttggggaaaggaaccgtggtgtgcaaaatgccattgtttactgctggagatcttgcagccataacttttggctgctcatacccccgcctgtttcttttccatgtggcctatttagttttggcatctatgttcattaaccccatctacttggctgtgttttcattgtataacaatcaccagagtccctacaatgttgttttctaagttgtttctaaatattgttgttttctaagttgttttatatcagcctaggatatccaccacagaaagaatttaagtggaggaaggaaaaaatagaataatattactaaatttaatatttagctatgaattaatctctattccacatgttactgatagataaaactagattgtaaacttgttaaatgtaggttctcttatgttctcattgtaaatgcatgtttattaaaaatcaaaatagctccttctgcaacatagaatttttgatactttttaaaaatatttttggtacaaataattttgcagaaacatatagtagaatcagtagcgaggaaggggatttaaaagaaatttttaatagacatactctatcatcttttcctatccttcttgtactgactttggaaccctgtgctcttaagttttgctattggtcttaaatctgtagatacacagtgatggtcatattggcatcctcccacccacccatcttagccctcatctgccgttgaccctctcatcttccttatctcaaaagacgctttcctcgtgtggcctctggagaatatcatccagagctagactcctcagaaagcacacaagagccattattatttccttttcccagcgaatcaaaattgccacctcttcactgtgtttatctcaagcaggtatgaagaagaaagcaaccaaattaagtatactaattctgattttcccaaggaaatttgctttattaatgacataaaataaacttcccatggtgaaatttcaaggtacatctcaatgacacatagtaaatgagaggtttcatgttaaagagaactttctagtttcactaaaaatcaccccaaataaatggcaaccctctccatcctcactgattcattcaagaatcttcatgcctatgcaaaagcagctctgtgttctgagtatacagtgatataaagcaccatgccactgttggattcacacatcatggatatcatgattgttaggaactctattggtatttcttttcccaccataatttcctggtctttcttgaccaggaaaaaaatatcatgaggctttctgtctaccttgttggttttagtcacatttcctataacacacatagaaacgaagaaggtgaataaaggaacagagttaaggaaaggaaaacaaagagcagggagggaaagttggagcagagaatgagagaataagatggaaagaagaagagaggtggaagaaaatgggaggaatgcagaggagataggcactttcggctcacaggtctctttccttggcaaaagtgggccattgcacaacccgtgaactccatcctgcccagctcccctctggaattcactcacacatgtcttcagttatgctttagcctatgtccgtgtgtgtctgtgtgggcagtgccccacaaccagtaccctcgggaaaaacagggcagttcctttgagtcttttttcatacaattgcattttggttctcattaagaagctcagtgggatttgtagtcagacatgtctagtcttaaaccttacattgtccacttaaggtacatcttagtctctgaatcttggttttcacattggtaaaatgagactaataataccaaccttatggtgttcttacaagaacacagtgagaaggggcctgcatagtactcggaacatagtaagctttttaagatgataattgtgttaagtagtgtcgtggctattactgttattatttattattatttcttctcccagaagtctgattttttgtcctattgcagaaaacaatatattctcctgcctctccccttcccaactctccaaactcagcactaaaaaaaagaaaatgttaaagcatacaagcctccctagcctacatctagttcaatactgcactttcactctcttttccccaattctcctatggaaatcaatttcagaagcccagatcacaattagcccatggccattagcagccccagtaatttttctcaacacattagaattgggggaggatctatttctttctactactctttctaatatcttcaaaaacaaacaatggtttagaattctttaagcaccaagagtcatgccaataatgtcctaaaacacgtgggattttcaggatgcgagtttctgcctgaccatgattattgggttgtgtatccaggtattctggttcctagtgcatgaggagcgcatcactgtcttctcccaccttcactgttccaccttagcctttgcaggtcgccagcaagcttcttgccctgtcccttgggcagttgctctgtagatgtgtccactgtaattggctgctgccatttcactaatagttggcactccccataaaataaaactacctttgattctcaccaaatcctgactttcttcttctaaaccagcccatgcaagaactgtaatgcctttagttgtgtgtgtatatagacatgaacattttggtggggtccataccttcatcagctcattaaagggtctaaaatctttaaaatatagacagggcagcatcacaccacttagccagctaaatacctccttgtcctgttgcagcctctttgttgggatgccaagtttagctcagtcacttgaaaaaattttggaattacatttttaaaagtattccaaaatattttacttttataaatgtttatgcatatatacaatatactccccactttgataagaggagttcaaaaattcaattacaaaattcaaggttgtcttattgcaaggttaattaaaaaaacagtcttctaatttgggggggggactttttaattatttggggttttttttcatttatacctaatcctgcagattatttgtttttatttatttaatatgtaggaaaaagaaacagatatattttcatgaatagtaatgttctacactgaattgagacagtcccaaatgatcagaaggcagtcatttcctaataccctttccccaagacttaaggacttggctaccacagcaggaggacaagaaagcctctctctccaatgtgaggctcagccatcatttccctatgacaaagtgggcctatgtgtataatattattgctagtgagaaatacagatgcacacatgtacacagtcattctgccaagatacatcgtattgaataaaacatgattctctaaaaaaaaatctgaggtcctggtgcagttctaaaggcagcagtacagctgaccccacctatgatagtctccccacagggactctggaggtccttttgatcaagctcaacctttggcagggctccccagtccctctgagacactctaataactttgaacctcacatgcataacagagtctgaatttggatcatcatccttccaaaaagttcctttccacccatgccaatctgctcccagcctggctctgcagtctttcctcatagtaagggggaggtgtggtgtgataccagctgctattgagcagaagtacctagcctcttaccaagccaaatgtcatcaaatgaaaccaaacgaaaccaaatgtccttaagcaacttgtacagtcttacccagaataagaggtttcttcctgacttgaaagaaccactaagagtagttctttagagaatacaaatggtcctgtcattttttaaatggcatttttctgtttcttaaagtttgcctcattagatacccatatctatatctatatctgtatctatatatatatatatatgtttatgtatatttatattcctctaaaagaaataaatatcttctcccttggctcaaagtaaattttaaggtgggtcttaagttatagaaacatactgcaaagcagcataagaattccaacctaatgttgtacaagtaagttcatgttcaaactcaactagcatcatatttccactcaacccgagccatgaatcggatgcacttagggtgcttttatttttttttaattttttatttcaatagttttgggggctataggtggtttttggttacatggataagttttttagtgatgatttctgaggtttggtgcacccgtcacctgagcagcaaacactgtacccaatatgtagtcatttatccctcacctccctaccatccttctcctctgagtccccaaagtccattatgtcgttcttatgcctttgcatcctcatagcttagctcccacttagaagtgtggatatatgataattggttttccattcctaagttacttcactaaaaataatggcctccagctccagccatgttgctccaaaatacattatttcatttttttatggccaagtagtattccaaggtgtatatgtataccacattttctttatccattcgttggttgatggacacttaggttggttctttatctttgcaattgcaaattgtgctgcaaattgtgtctttttcatataatgacttcttttcctttggggattgctggatcaaatggtagttctacttttacttctttaagggatctccatagtgttttccatagtagttgtactagtttacattcccagcagcagtgtaaaattgttccctttcaccccatccacaccaatgtctattattttttgacattttaattatggccattcttgcagaagtaaggtggtatctcatggttttcatttgcatttccctgatgattagtgattgagcattttttcatatgtttgttggccttttgtatatcttcttttgagaattgtctattcatgttctttgcctactttttgatgggattagttgttattttcttgctgatttgtttgagatccttgtagattcgggatattaatcctttgtcagatgcatagtttgagaagattttctcccactatatgggttttctgtttattctgctgattatttcttttgctgtgcagaagctttctagtttaattaggcctcatttatttatttttgttcttgtcacatttgcttttgggccttaattataaattatttgcctaggttaaagtctagaagagtttttccaatgttatcttctagaagttttatggtttcaggtcttagagataagtctttgagccatattgagttgatttcttaataaggtgagagatgagaatccagtttcattcttctacatgtggcttgccagtttttccaacaccacttattaaatagagtgtcctttccctaatttatgttttgtatgctttgttgaagatcagtttgctgtaagtttttggcttcatttctgagttctctattctgttcctgtgggctatgtgcttatttttataccagtaatatactgttttggtaatgatagtcttgtagtttaatttgaggtcgggtaatgtgatacctccatttgttctttttgcttagtattgctttggcaatgtgggctcttttttggttccatgtgaattttaggatttattttctagttatgcaaagaacaatgatggtattttgatggaaattgcattgaatctgtagatttctttgggcacaatggtcattttcacaatattgattctacccatccatgagcatggggtgtgtttctatttgtttgtgtcatctgtgatttctttcagcagtgttttatagttttccttgtaggtattttttatttctttggtttagtatatccataagtattttattttgttttattttattttatttgcagctgttgtaagagggattgagttctggatttggttctcagcttggtcattgttggtgtatatcaatgctactgatttgtgtacattgattttgtatcctaagaccttactgaatttatttatcagatctaggagctttttggactagtctttagggcctcctaggtgtgcagtcacatcatcagtgaagagcaacagtttggtttcttctttccaatttgtatgctctttatttgtttctcttgtctgattgctctggccaggacttccagtactgtgttgaatagaagtggtgaaagtgggcatcctttgtttagtttcagttctcagggggaatgcttttaactttcccccattcaagaaactcttagtataaatgctcaggtccaactccagattcagtaggtccaggtatttgcatttttgattaggtctccaggctagcgtgagaggcagtcatagccgagaactactatgctggacacttgataagggaaaccaaatcccggataacccatctagctggtcgctacactaaagtagtgagctcatgcacctctctccaaaaaataataataataataataataataataataataacaaataagataccagttccaggagtagaagatgatattcaaagtaaaatacaaagtcagaaactcattataaccttgtattttagtaacagcatttttgtactgtcatgggctcatctagataaaggactaggaagtgaaagcaaatgcaattataatttgcctcaggaaagagctctgaatacttttttattatattgccaaagattaggactagaatgtaaatctaagaaagtaatatcaaaggccttcctcattaacagaaatggaaacaggcatttatatgccaccaataaatcaattaaaggaggaaaggagcttgaaatggccttcattgtggttattaacttcagggagtgcagcagttggggattgctgaacccagcattttcttttcattcacctggagcaaaatgtaggaaaataaagcatggtaatgctgtcatcatattaaacccaaagtctgcttaagtgtttgctaaagtggagcaaaacaaagcagagccagacgtttccaaaaacattgtcctgcttttgtggattttaattgcgagactgtgaatcagtgtgtgacttggtgtgtttctatgtgtctggtttacataaatctggacactgggaattcttttaatctccctgattatttccagtgtaacaatgtcctaaaataggaggattcctttaagaaataatacataaaggaacttcccagtgaagtttgagagagctgtgacccttctccatccttcttttggcctgttaatcgccaagtcctatttacttttttcagtttaccaatttcagaaaatcttaatttgcattgaacagtagcatctggaataaggttactggtgaatggaatctatactagcttagggatttaataattaacagaaaaaagagaattcaatatcttgtcatgccagaaaatgccttatggtttttaggcagccactttaccttcttgagtcttaagttccttagctataacttgggaatgtaatatctttttgacttcctaacaaagttacagggaaaagcattttataatctttaagaagttatacaaatgtaaggcaccattagtttcagcttctgcctttaaaatttcttatatatcatgcgtaatagtaatgtgtatttattatggatggtgttggatgaaaggtgtgccttgaaggaagtaacttgaggatgtgacatttcaatgtgaattcatttcactatgccaaaatatagttcacatttcttctaacactgtattccctacctttggatttattctttatttcttgctggttcccaaactgttttactattattttatccttccccatacatgggggcaaagagttggagccatccctgtccagcggtgcaaccctcttttaatgaccattctgaagaagggtgacttggtgacttcacctcctacaaattcattaatgccatggggccaaaagattatttcctaatatgggagagaaaaagctgaggtcctctcatctgccattctctgtgtggtctggtagtcaccaagtcctatcaaatgtgtcttctaaatctctcttaaatcaatgctttaatgcaacacatgagtctcactcctgaaacacagaagtatccaattcactggactcttccgttagtcgtgtgttcccacgcctaccctcctacctacccagtcttccttccactcaccatgctggagttgtttcctaaacctgaatctctatacatcaatttcctacttaaaccttggatggcatctagcgtcgattggaaagccctttatcgtctaaacatgacaaggatggctttccagatttgatgcctgttaatctctgaagtgtctccactcacacttgcacccagcaatactgagcaactgcctgttcccaaatgcaccttacctattttaaagctccctgcttttcttcacgattctatttgcccttcctccactctttttcatctggaaaattcccgtttatccttttaaattctgtttcagagtccctctttatttgatcctatttcagatcattccagaaataaactactacatcttacagtacatattttcattatggtacatattactccaaattttaattatttgttagaaaaatttgtttcccctttcaaagttgtgagcttcttgaagacaaggatcatgttgtattaatctttgggtctcaagaaactaccagtgtgtttgacaaagtatagctactttataaatattgcttaagtaaatgaatggatgggttcttataagcgaaaacaacatatgtcctgtataatttgtgggactgagctttagtaaaggaaacatctgacagggctcatcacttatttatcactgttagttcttttcacctttttgacatttatataatcttcttgtaaaatctaaggttgtaagcatcttatgtacatgaaggagcaacaaaaactgaccaaattgggctcatcggtgagccatgtgccctgtggtacacattagtgtcatcacagatgggttattttcctcttcacctcctccatatgactttgggcagctgttgttgtactgaaattcatgaaaagcacagctccttgtcaatttccctcatttcagaaataaaactgctctctgtaaaagcacctgctcctttccctacagaatgacatgctcttctctctttcaaaggcagtgagaatgtagtcaggcattgtgtgtctcagatcccattgatgagagttaaattggaaaccaaggagcccacagtggtgttccctgcctgttgaactcatgagcttactttgtcctagagtccctctattgaatcagtgtaaagtgtaatctagcaggcctcccatttttactattatgactacgatcaatgagtaataggtgagtattctcaattttatctgactacactactttccagaaaactctggggataaaatgagaagtgtgttatttttctcttatatttataattatattctgtgccttgtattatttcataccacagagatttttctatctcttccaaggtacacatttgacctggaagtgagaattaatacctattgtgtaactaatgatggttcttttacaagttaattaatcaaaaaaaacatgaggaatagaacaaaagttgacatcagtgtactttgcatatttttcaacttcttcataagacttgattttgctttaaaatgtatggtcctagattataaacaatgtaaattagtttctgtcatttcaaataattaatctctgaaactagtacaatttgaatttcacacttctgtaagtcagatttgggaaatataattgaaagttcatttcatggaaaccaaacttagcttgttttgctgttttctctctttcctcttttttttctctttcattcatttattcaataaatactagctggccatatcatttgttggttggactttgctgggcactgtgaaaaattaagatatgtgaggttagtgctctcgaaaccttacagagaaacagacaaagtgttaaataggagtagagttgtcacaacaccgcaaaacaagtagtacaagcagcaaggcctgcaagttcagatgccaggctttacctctgatattttctgtcagagctccctagactaccatcctttgtgatttatttatttatttatttatttattttattttttttttttttttattttttattttttttttgagacggagtctcgctctgtcgcccaggctggagtgcagtggcgggatctcggctcactgcaagctccgcctcccgggttcacgccattctcctgcctcagcctcccaagtagctgggactacaggcgcccgccactacgcccggctaattttttgtatttttagtagagacggggtttcaccgttttagctgggatggtctcgatctcctgacctcgtgatccgcccgcctcggcctcccaaagtgctgggattacaggcgtgagccaccgcgcccggcctgtgatttatttttaatcattcttttcatctcattctaacacacagatccaggaacacatcacttgttctatcctctatctctcttactgcctcaagtctacttctgagcccttgaaataaaaattggaagctatattcatactattttgtgaaagtcagtattatctacccacttcttctgaaataaaggagatgaggttatatgaattaggaagggagtgtttttttctagatctatatatcaactttacctgcgtatatgaaatcttataaaaagaaagtatttgaccatgttcagcaacaaattgttaccaaattgatgaagcttcattagtaactctactcctttccaataattatttaggatagtccctggtatattatctaacccattgttaatatgtgcacactcttcccttgactccataaaccaaagctactctacgtccttccctcccttcctggcaatgggcaaatagtgcttcacccataaaagcatctggtcaggctactggaccaatttgataaacatcacttttaccaccaatttttttttttaattttaccctcaggtgagtcattttgtacacagctcattaccttttgagcagtcttctgctgtagttttgttaaatttatcctcaggaaatcaacccctctcatggtcacacctttctttccacttctatggctataattacctcattgtgtcttaattgcttttatgcttcggtatctctgccactacagtataagcaccttgaggacaagcactgtggcttgatcactgtagtgcactcagaggacagcgtggtcctggcttgatcactgtgatgcgctcataggacagtgtgatcctggcttgatcactgtggggcactcaaagtgtagtagggttcctggagtatgaaaggcactcagtaaaggcttgttttgtttccattcgtttatttttaattgtcagataattatagtgtatatttatggggtacaatgtaatgtgttgatccgtgtatacattgtaggaagagtcagtcaagctaattaacatatccatcacctcaccaacttattttttgtggtgaacatgctgtttgttgagtgagtgctcagaattgaaaggcattgtgtgctgtggaggtgcagaggacaggcaccaaacccaggcagttgtagaaagttggggaagatttcagaggaagatagacaaactgagatttgaagggtgacagcaagttagcttggcatagggagaggacaatcctgtcaaaaaagagcatggacagagtcctagatttgagaaagagcaggggccatagccataggcaaaaaaccatgcagctacaccttttgttaactatgcctgagaatcaaggcagaagtcagtgtggtagacatacgtgtgcatctatatatgtgcacatgagaggaaactttggtttttgaaagtttaattagatgcaataaaaagtcaaatccgtcagcctctaaaactcttgatatttagcccaaagccctctacatgattaaacatatccattaactttctcattattttctttttcctcaagctgaagtttattttttctatcacattttaattctctgttttaactgttggcattttagtagtatattttaaatagttccactgcagacaatagtatggttaaggaaagatatttgaatctaaccaccttgcatgaagttgttatatacaggaactgttgcaagttccaaacactcaacttagaaatgaacatttagaaaattacctgtttataaattgaggttttgagtgtataagggacaactggcaacaggatgagatggaagccatactggtcttagaatccaaacgtctgcatccttcattcaccaagtccatcagactcttggtttcatcatctgttgaatgggatccacaatatctgttctccagtcataggtattcttaaaattgaaagagaaactgaatgggaaacgagtcacctaacagatggtagattgttgtatttagttatagcacaaggtcatttgctacagtagttatttttatgttagacaataaaaattttatcccccctccaacaactacaacaataatatatatggaaaaatatgcgcagcaatttaggttagtaaaactaaagctgtactttttaaaacaaacagttttaaataggttttctatgtgtttgtgtcacaagtacagcaagtacgtttacagagaaatggcttcttgcctcaatagcgtgaggataatacacattgtaactattttgtctcatagaatgattgaagatagtgggaaaagaggaaataccatggcagaaagaagacagctgtttgcagagatgagtaagtatggatcttttaaggaacaccctatagtttccattgaatactcatggaaaggctagaaataaccatttatctttatgatatttgtacttttccttaggatcctaagttcctttcatgaagtgtacattttggccttttttacttcttacttggcaagagttcagttagtcagtaattcatcctaatttgctattagactgtctattttatgtggaagaaaatgtttatagatttatatatttacattcacacatatatgcacatacacagacagttgataaacactatttagtgttgacattaatacagtccactaaactttaaagtctgtgttcatcaccctgaactgtcacagcagctggcatattgtaggcactagataaaatttttgaaatgaattattgactttcttccctgcaaagtgatatcatatgtttatgtggaaaggagaagttaggcacaattactggaccaaactataaacttgtcattcagacctcatgtagaaaaggagaatctattctgcaaactggtttttttaaaaatactaaggaaaataaaagataaaaggagcttagagttgacctgctacacaagggaaaccaaactaagttactgactccagtgaagaatctattcaataaaggctattggtttatgtaagtgcacagttgctgtataagtaattggttggtagcatctcccttgtagaccatttttcttattcataaagaaaaagaacttgacattagggagaaaaccacacatctcaagttgaatattataaaggaaaaagcatggttctcttcatgtctttttatctcttcttcctgcatacggaatgaggatgagcaagagtgagtggtaagcctttttccctaagaaggcagtagacaaaattaggtttctactaaagattggaagtgactggcaagaatgagggtcagaacagaaaaaggaaagtcccagataataagattcatattttcctttatcattccccaataatctggtggtaccaagatagcattagaactaacaaggaggaaagaaaattaaaattgatgtggggaatctcagtcgtgttccttgctttttccacttttagagatgtgcttagagtgtttgggagagtttcagccaggccttccaatttcctagaccccatgtgtggtactgtgtcttcacctggaattgtgacctttgtgcagttacaaatccaacagagcaaggagcctagtgagtacttgtccatctaaacaaaatccaaagcagcacaggtatcctccaacagcacattcttatattaaaaaggcataaaattatgtcttatattataagacatcatgggacaatgtcttctcagacacagtagaaaaaaaatatttaccataaaaaggcaataaaatctggggaaaaatatttgaacttatcattataacactaaagactgtatcagacagcacactgtaagaactataaaagtatgcttattcaatgattttgtaaatccttctttgagtttaagtatcccagtgctttctgaacctgatatagtgcctggctcagacaaatacatatgttacaaatgtctattggattaaaattgcccaactcaaagaaagctcgatatgatttttagagacatagaaataagacaactctaagtttttcttcaagtgacagagacttaggaaaattgtgcattcggttcccaaattataactttgtgttttcatagaaacatcacagtgatgtcttgcagctttattagttctgtgagttcttgtgattaacggtcagaatagataaacaagccaaacaaatatatatctttcctccctgggtgttccaactcaaatgttggcaaaaacagctaaatacgtctgaccttaataattcattagtttgagcaacatgtttatatcagcactaagtagggcacatccacaataagtaggattcggctggataaaacaattggctggtttcaaagggagcaattgattttgacaggtagactgtcatacaaaagagaaaggtaatatcactgcgaatgtgttaaatggttgaaaaatatatgggtatcccagctgtatcagcagcacaccaaagaaaggaaaggaaactcttatcagagaagactgacatcaagattcaaaaagtaacttctaggaatctgtgctttctagacagggagcaaaaaaggactagacttgtaaatcttctcatctaagtattatatagaaatatttaaagaaaaaacaacaaaagaaagtgccaatgagattctttgctttagaaattagaaatgtgaaagaaaagttgtaatggccagagttaaacaggcagggaagacttttatccaagactattgcaacaagggagaaagactgaactcaacttccctggaagaaaaggcaggaagtactttaagcactggggaaaaatactggaggacttcagggaggagattggtcaatgtgattaggccatctgtttgctaattgtcacatttaaaagttaggcttctaccctcctgataagacttggagatagaggtgataagtccttcaattattatatttcaaagggctggcacccaggttcttgagaaagacattcctgggttgtaaacttggcaagatatttacatctcaaaggggcagagaaagaatttacaatgaaaagttttctaaagtaaatgctgtaagaaaacagaggtcagaagcctagagcaaggaagaagtctatctaaagttaggcaagttgaggaggtctaggtcttagaaaaggtaaagaacagagagcaattgataagaaaaatggataagaaagtttggcaaattcaggtgattgcagcacatatgtgttaaacattcactcttagctcattactataagcagcagaagcaggaagaaacagcaaagaaatgaaattaagagaagcatagactaaaaaacaaacagaaaaaaatagctttatataaaaaattgggtgaccacctactttgatttaagaaattctgtacaagttctcccttaaccaaaaattctcttcacaataatgccttaattatcagtttgcttagtaccttggattaaagctgaaaaaaacaaaaaaacaaaaaaaccctctagttaaatataaacatcatcctcaccttggctttttcagccatcatataagtttagcagcttaaataagtttatcagactgtcttttaacagaataaattgtttgttcttggaattaaactctccttttctgttgttttactctcagagcacatttacttagccttatatggtagttacttgtgaacatgtccacaacactcactgctgtgaactcctttttagggacagacctaggacatgtaccttcaaatccattccccttagatgctgaatcaagccttgtttaaaagccgattgggcacaggatgggtaggttttaatggaagggaagtgattggaaaacacactttgagaacattgaaggctgcctaacaaggtaaggaaggtcctggggagaaatgagagtgatgccaccggcctgtcagcagagacaggacttgaaatcaaaaggaggcaaatgaaactactcaacaaataccatttttggcttttgtttttgcttttgttttgagacacagtttcactctgtcgcccaggctggagtgcagtggcgcgatctcagctcactgcaacctccgcctccctgttcaagcgattcttgtgcctcagcctcccaagtagctgggactacaggtgcaccaccacacctggctaatttttgtatttttagtagagacaccctgggtttcaccatgtctggccaggctggtctcaaacttctgatcttaagtgaaacacccaccttggcctcccaaagtgctggaattaccacttgagccactgtgcccggcctaagtactgttgaattatttgaaggcaggccatccttgagagtgttggctgaagtcggcacatgcacgattggaaaggaacctagggcatgattttgaaacgcacactatgagtttaagaaaaccgatctcaaaaattcagaaaaatgacatgaatgaccccaccaccgtaggttcatggatacggtgactgttttcacttgcttcttcatttctcatgctcctcagtctttttaagatattaacaccatggatcgccaccccagaaattctctctatgtcatcaccctaacatagtctcctgctttttctgtcccctctacttctctttttctgtctcttagtaccctgtagacactgaagtcagagaatttaaagatttcttcttgaccagttgtctccatatacaatttgtctttctctcaagcctttacctttattgctataacccttgagtgttcagagtcccccaaaacaactctcatttctcatgagccagcttatccaaaataggcagcacataaactaaacttcccttccagccttgcctacttgttttcaagtgttctgctaatgaagcagtctgaggagggctcattgtcactccactaatagtgcccatcacaaaaatacctatcatccctgccaaggcggctgccttctagtgttcccaaagcctgcggtctttgaacaactgccaagcagctgggcacagctcagaagtggggagagcactcctgttcccaagtttgtgcctcattttgtcgctagaaatatagaatagccctacttgtgcacagagtctcctgttggcaatcttggcccagtcacgcacactactacattttgtgtgcttgttgataatttctggaatatactaaagctctaatccttatatccaactgtcctgtggatatcttacttggacatcttacaagcaactcaaactctttagcccaaaactatcttcacccatcaacaaacctattcctccctgtttgtaccttacttagctcaatgagggatactctattccactcagctacctaaggtagcaatcattttttacccccaaactcctttatcttcctgtcagtatctctctctttctctctctcagtatctctctctctccctccatccttcacacacacacacacacacacacacacacacacacacacacacagagccaatgataaagcgtggcagagttcaggcagcaggttcatcataggcttcatttttattctggaaatatgtattgagcaaaacttttaaatgaatgagatatttaagaatcaaaatggctatatattaatagagctatcaaaaatggctatataatgagctatcaaaatataaaaggcaaaacatacaaaaattgtgtgaaaatgttcagagtgcaaaagctaaaaccaaaagttagataagactggttcgttgatttgttggttgattggttgtttgaatgaacaaatgaatgggtagggaaaaggtggaaggaaagaagggagtgagagagggagagagagggaagtagggacagagggagaagagaagaaagagaatcttttcaaaaagggctaaagaaaggaaaaactgctgttgataacagtgtaaacaatctgtgtctttgctgtcctatttattacttccttccaactatgacatgggtacaagaggcttgaggagacggtgcaagagcactaagttgccttaaataaatttgttttagtttttttattatgaaaagtttcaaatatatgtagaagtagagaaaatagtatttatctcaactcttaattatgtatgccatcccccactgtattagtatgaagcaaaactaataaatcacttagatcagttgaatcaccagatttaacgaattatattccagtgatataattcagaaaacaaccactatccattattttgaaaaataatgaagagtacattgaaaaaaaatgtaacgagaaaattctgtacttttttattaaaaagaaaaagtatagattctttggagtttagggtatgaactggttataagtttcataacaaaatggatgttttttagatcttggccaaaatatagtggtaattctagacatatcaacatactaaaagcaaagattgccctgctgattttatttctttactcatttatttaaattccatctttttaatagataaattaagtcagctaatacgctttttaataagactaccagactgctagatcagaaaaataccatctgataaaaattaaccttaatttcagcaagatattgaccaaagctgttggactgtgcatgtgttggggaattgtggactgggtcacaatacagttaggtagatttatgggggatgtcatgaccatgtctaaagccacaactaatgggtctatcaacttggaggaaggcgtctagtagtatcctggaaggctctgtttgtggacctgttctggtccttggttttaatcaatgactcgaatgaagacacagaactaatcccaaagtaggtttttgggtttataaactttcaagaaaagaccacacatgtaaaactgggttaagttcattgtttgctggggcaaagaaaaatacatttattttgacaaggcagataaacagagtaagaggctatgtatcatatctcagcccagcttcttctggtccctttctggatggatcctgcagctaacacatacattgattgtgcacggttgtgtgctgctatatctgacacactaaattgtattgttcaccacatcccttttaatattcagggcttacatcatcagccaggaagaatttatacagcatttatagacctacagacctcttcctgattcttgaacaaaacacagggtcagttaagtccacacagtgatacgacaggagagagcagtcagtgcacttcaggcccaaagcagcatctctacatccctctttactgcatcctggagaagtgcacctttgccgtatttcccccaggacttcaatcagaggaaagtgcagaggtgccagggttactgtgctcagagggtaaggtcttgcagaaactgagaaacttaactatgtgccacatcacaaacattttttcatctggagcttaaatcattatgcttgaagaacttacacaaataatctgtgcccctaatgttttcttttaagtgattatttacagatattgagactctcctgattgctgagccaaacttagcaccaataaaagtacatcctcatctgggagcaaaggcagatttagcattcaggtatttctaaaagtctctctgtctctggttatcgggcatcttagagagctcattccccacgagtcacatttacagagggcatgaaactaggaaagatttttgaagttccagtgacaacttaagaattttaaaagattcagaaaagttcctagtatgagctaaattttaaaagtaactaaccagataaatatgacgtcctacccttagctccaaaataggcatttaaatagcaaatagaaaagatttgacttatatagaagtgcatatgatttttcaaagcagttttttaattaacttcaaacttaataaaagctggcataatgagccgtctatttttaaaaaaagatcacattagttaggagtccttatcaaaggtagtaataattgctttctgtatattctatacaggtaaagcaatagctatttggattaattttggacacctaattttaaagagatattagccagtcacagaacagggtgactagaatgtttaagggtttcaaaccatgcttgatcataatgaaaataataataacaactgccatgaattgaagccctactgggtaccagacagataaacagtatacctgaaatggctgtggagttgaacatcttttaccctaaaaaaagtcaaggagaagctacctccccagctaaattttaaagtccatgatgacaaggactgttgcacataattttcagatggtaatgaggatgctaataatgataatgtagctgctttgcaatatttcagaaatgaattctcaaatggcagggggaaaagagtatgtgactccaggggaaactagatcaaataggttgaagttacagggaggtaaatcaaagctcaaatataaaaaagaaatttctatcacatatttttgttcagaaatggcacatgaagcctcttaaggggcccatttactgttaagtggtcattatgttctcagtgcagaagtcaagactttatatctgtattaccagccagtaaagttgatattgttatctcgctttatccatgaggaaattgagatgccaaggaaaaacttggtgaaactcacacaactgggaagtgacagagttaaattttacttcctttaaagttcatttattttcacaagtaataatcttctctatcattggaaataatcctacgtggccattggctaaatgttcatctcttgagaacatttctaagggaattcctgcattgggtgagggtagttccccatctctttgatccctcaagtgctcagtgtcactaagcctgtttgtcaaagaataagctttattaagagtgaccgtttaatgatctgctttgtaaaaccacaaagtaataggactattggcaacacttcaagtgaatctgaagatatcggtttgagttgaagaaatgctaaatcccctagtgggggacacttgctaattcatgctgagtttcactgggaaagcacttaattggccgtctaatataatcgcttccaggatagttcatttactttctattctgttttactctaaaggattcacatagcacattttattagtatatgactggtaaagataaaagttcaatacatgcctttatatctgttatggaccataaacatgggcttagaaaaagaaaatatgtagaaatggagaaaagcagacatttattgatagtctaatgtgttctagacaaagtctagagattaactcattcaaaggagggtgggaggaatactaggagctcaggtcttgatgtaacaagcagcccatctgcagggtattgagatgagactgaccaaggctacgagagattctgtggtagaaagtggtgggcaatgtcgttaggcaagtaagctggaaagaaactgcagacgagcttggattctgagcagagcttttagacctgatgttctgggcatcaggagccatgctggactcctaagtgggagagtgaaataaggaaagtagtttaagaatatagggaatgtgttccctctaagttaggaaggaactggaagccacagtaaaagaaaggttgttttagaaaggcatgtcttcctctgagattgacaggaaggatcacaagaaagttgttagtaataaaaatgaatacttatgcagcatttactgtgtgccagacggtgtttaagtgccttaggtatattcactcatttatccttacaacagtcctgtgcaataagtactattattatcatcatccccatcttccaagtgagaaaactgaagctctaaaagcaattggcctaagggcacacagagaagatgctcagcagtcagtacatggtcacctaacagccacattctaatgaccaatagcaatgcactttaaatgcttatttgatgatagtatctatatcatctcgctgtttcactgtaggtcacagcttgagcagactgttttcagaagtggtggacacaacagggatgacattgtgtttcttgatccaagaatatggtttacaacctaatctccaatgttgattacatgtgtgtgctctttttccctagaacctgaggaacttgtccttgaataggacagacctgttcaagtcttaaagttatatttatattctaataaaaataaaattaggggtaaggatcatatctacagttgttttatttgtaaacattgtaaatttctttctgcacacatggcataccttatgtgtcctttttccccgcactaggggctcaagatctggatcgcatccgactctccacctacagaacagcatgcaagcttaggtttgttcagaagaaatgcaattgtaagtatgccagttgtttggactaattaccatcatgaatcctatagtttacatttggtactaagtttattaaactagattctgttacaaatattgctaatattgttatatatgtttacacaacaataaaaggggtattatgaggcacaaatggtagagatgactcctaagtagtcttgaaatctgaaaatgcttaaatactaaagcatatgaaccgtttagttcatactaaaaggatgaacctctggatacatatacaatataattctgaccttggaatggtttaaatctggatggatgtttttcttcttttctctaaccttggtatcataaatgcagtgccatcaaaatggtttccaacatcattctcagcaaactatcgcaaggacaaaaaaccaaacaccacatgttctcactcataggtgggaactgaacaatgagaacacacaggaaggggaacatcacactccggggcctgttgtggtgtgggaggaagggggagggatagcattaggagatatacctaatgtaaatgacgagttaatgggtgcagcacaccaacatggcacatgtatacatatgtaacaaacctgcacattgtgcacatgtaccctaaaacttaaagtgtaataataataaaataaaataaaaatggtttccaagaactttataaaatatcaaacattaaatcccccttatatttgtattttcttttacaagcacaggaaaatattttaaagcttttggaaaacatttaagtttttttctgaaagaacaaaattagctctttgtgtcagagttttaaccacatttgtttacatgagacaaaaataagaaaagagacaatacttaaagaaacaaaggaacttgctccagtttttttttcaaatttaaaagtgtaagcaataagctagatcactagtaacaatgagcagtcttattctctgctgggtcaacacttccattgtattaccatatccattttctcttggaaaaaaatattgattcatagttcatgtgtaagaacgttttcttttctttttaaaaagtttacttattaaaaaagtctcattttttaattaatattggatgaatttttaaaaatgaaaaccgtaatgttctcctgatacatacacatagttctatgataactggcatggtaattagactcatggtaagggtagaaaccggcatctccacatgtctaccctctcagagtctctagaagatgtttcctagggccctgggcaggtcaccttagccccaggcttctaggcttacagctaatcatgactgtgaggatgcaaagtacgcatctattcctcaagtttctcctctacatcttattccccagccccagtggataaaaatggggctgaagtttggggaaggaggggatggaagaaaaatataagtaggttgtcttattttcattttctgtggcttataacagaatacttgaaactttgcaatttataaagaaaaggaatttatttcttacagttatggtggttcagaagtccaagtcaaggggctgcctctggtgagagtctgcttactagtgggactctctgcagagtctcaagatggtgcagggcacacatagtaaggaggctgagcatgctaactcaggtctgtcttccccttcttataaggccacctcactcctgtgattactcatggattaatccattcatgagggcagagcccacatgaccaatcacctcttaaaagccccacctctcaacactgcctcacagggggttaagtttcaacatgagttttagaagggacaaacattcaaaccatagcattggtcacacatcatatatgtgttttgactcctcacaggaagctaaagcaatctaaaatgagtagtgagaaaagcattacagatgttgaaagaatttgttactgtatttgtagtcctaatgagtcaataaaagccatttccactgcttgcgataggggccaaggaaaatgttcccacagaagaagtttcctcttccccttcaaacacatcacccagattacaaataaaaggaagaatctccgtgttttcagcaattaaaagggatatgattgtcccacgttcttatcatgtgttaccactacaatggcctcagaattggaggggaaggcagagggtaagtggtagacactctgtcctccttagagctttgccaagcggagccttccttaggctcctttcaggagagctagagatttccaataaaagactacaaaatggtaagaaggaacgcccccccaaaaaaagcaaaaaaaggaaaacaaagaaaagaaagaaaggaaaaggaaaaggaaaggaaggaagggctcagggaatcagggacttggcaacactgcactcaacattaaggtggacacactgtgttgtccccactcaacattaaagtggacacactgtgttgtctgcagctgtggtccacaggccttatcccatgcctcctgctctctgagaaaggcactttctcattcttgggcatttccttttcctctttctgttcttttctggtccacatccttatcctgcatccagaattgtcttggaatttcttgaaaaacagtagagaagaagtgaggatgctaatccatccctgggtgaaaatagaagcttatacctgtccagtggcccttcagtctgtccattcattgacctcttaattcagttaagtgtataatgagctcctgctatgtgtttgacattgtgctaggtaccaaggatagtgtgatgatgaatgacatgcaataccttccttcaagttgctcaaaatctaactgagaatatgggcttttaagcagatttataaaaccatgtagaaagataatgatagaaatatgtacatggtatgtgagagcttcagggagtcagtgccctgagttgttgggggtgagggtcactggtaggactttcctagagaaggagatatcaggaaagtcttatttattttataatgtaccttataaaattcctgtatttcaggatgagaaaagatattacattctacaaaattagacaaagttaaggcccaaggaaaaaaaacaagcatattttgaatgctttgctaaattaaggttttaaaaattgtttctaccttcatcagaggcattaaatgcaagtactatatgtctttgcaaagttttcctttctaacaataaatgcaacagttgtgatattcagaggtatttgtaaaatgcttacataattgatcttggcttatcttaatcaaagttgaaaccttccttctagaaagttagccaaccagaagcagcaatgtttacatgacataacattagtcaacattgaatatattcgctgattagaggaaagtaattttagtctgcaataaacctaacccacaataaattatgataccttataatggagtttttccctacagtaaaagaaataagaaacaaaatgtaggtagcatatttgtaagtgcatttttttattggaaagtgtcaggctgctctaacaaaaataccataaactgggtggcttataaacaacatttatttctcatagttctggaggctagaaaatccaaaatcaaggcactgccagatttggtatctagggagggcagccttctggttcataggtggccccttttcactgtgtcctctcatggtggaagaagcaaggcagccctctggggctttttttttttttttgacagagtttcactcttttttcccaggctggagtgcaatggtgcaatctcggctcactgcaacctccgcctcccaggttcaagcaattctcctgccttagcctcccaagtagctggaattacaggcatgcaccaccacgcccagctaattttgtatttttagtacagacagggtttcaccatgttggtcaggctggtctcaaactcctgacctcatgtgatctgcccgccttggcctcccaaagtgctaggattacaggtgtgagccacaacgcctggcctggggcctcttttataagggcactaatccccaccatgaaagttctgccctcaagtcctgatcacctgctaaaagtccccacctggtaataccatcgcattaagggattaagtttcagcatgagaatttggtggggcacaaacattcaaacaatagcagaaactcattatagtatttacttcgtagaaatcagtggatctgaagtgaaaatagattgtttacttttaggtccataccttatttaaaatttattgcgtatactaacaaaactaagttttaaaactacataaaggaggaaaaaacaaaaacggctgttgtaaaactatcacctagaaaaaaaatgaatactgtctgcatacagcacagactgtgtatgttttcaggagatttcttttttatctattatctaaatccaaatttcataaatgttggttaattccctatagttctttccccacagcccttgcctactttgtttatgattttgcatgtggacaactggttcctatcactgacattcatgtttattttcttctgttcaattcctaatgtatgctgagaatagtcagttcccgggattctaaaaggactctgaacaagaggccactgtcacccatgaactaaatgaggcccagaacctacttttttatagagaatgaactaatggattttatagatgaatatttgtaatcgatttgataacagggaacactaacttgtaaccccaatttttaaaaatgcatactcccaagaagaattatattcttttttttttttttttgagtggagttttgctctttttgcccaggctggagtgcaatgatgtgatcttggctcactgcaacctctgcctcctggattcaagtgattcttctgcctcagcctcccaagtagctgggattacaggcgtgcaccaccacgcccggctaattttgtgtttttagtagagagagggtttcaccaggttggccaggccaggtggcatgagccactgtgcctggccaagaattacattcttctcattggtagaccagcattttcttaatgtacccaattattggatatttaacttcagtaaaaatgttgtgtaaattctttttctctcttgttatgtatgtactgatataatatccctgattttgtcccttggtccacaaaaagaatgttgaccaatccctgctataaaagacacttgtaagtccaggcgtggtggctcacacctgtattcccagcactttgggaggccgaggcgggcggatcacaaggtcaggagatcgagaccatcctggctaacatggtgataccccatctctactaaaaatacaaataattagcggggcgtggtggcgggcgcctgcagtcccagctacttgggaggctaaggcaggagaatggcatgaacccggggaggtggagattgcagtgagctgagatcgtgccactgcactccagcctgagtgatagagtgagactccttctcaaaaacaaaaacacacttgtaaaaaacccatcttctttttgagtcaaagggttctcctttccaaatcgcttcttccccttaccattcatctttgtaccctgccataccttccccatgatgtaactagcacattctctaacagaataaaagaatgagtgtttctaaaaaattaggggacaccaagttgattatttgatattctaggaggaatggagcagaacaaagaatacaaataatattttaaataatcctttctaatcagtagtcttctcttcagcttccagattttttgttaactttccacaaaaattaataccccataaactcttataaggatatataaaatggcatcatctcagcctttattttagacaaatagctgtttctaccataacattatttccttggtcagcattgacgtggttaatgatccagataccctgtaatgtcagcagatctttttttttttcagaaattactttggagtcaatgaaatgcagccctaaaatcatgaacaacaaaggacaacaagagaaataaatcagaaatatctaatccctcctgtttaatagtaggaacaaaattaagaaggcaagggaatattctatcctacacccacagctaacattgcaccatcttttagtcctactggttacagcctgaattttctttccattagtcatatcaactaaaatttaattaaaattttgtttaaaaggcaaagaggagaaaaggtctataattatatctcggctgtcagagtttctcaacatactctttttctagtaattgaaatattttaaaggtatccttcattcagatatgttaagttagaacacctgctttttctatgttactgtctctaaatttcttttcaaatttcttttgaaccaaaaaaatgcagttacctttttacctaaatgtttctctatcaccataaaagtaagccaagtgagtcccatataactagtcggtcctgaatcaatattctatgaatgaacgaatatgctccactagattcatttctcaccagtcaggtgactagaagaacgctggtcttatgtggcaggagtagccttgagctatgtttttagtagtaaacactaatattccactcatttttcttccaactagtgtatcagtattttcctcttccctgcttcatgtttaaatatgtggatttttagctgccactatgaattttctattcttggtaaaaaattaccataaatttagcagcttaaagaagcacacatttattatcttacagtttttgtaggtcagaaatccaatgcagcatggctgggttttcggcttagctttacactcaactaaaatcaaagtgctggttgggtctgtgattctcatgttgggatcaaggttctcttctaagtgcattcattgtgggaaagtgttattttcttgtggttgtaggattggggccccgtttccttgctggctgtcagctggagactaccttcagttcctagagcctcccttattctttgcctcatggcccctgtgggctgctcagggcatgggtgtttgtggcttcttccagcccagctagagtgtcctctctgacttccccatttatgactagccagagaagtctccttgcttttcagtgactcacgtgtttatatcaggcccactcagatgatatccatattttaaggtcagctaatttgggatcataatatcatctgcaaaatcccttcactgcagcccctggattcatgtttgaataactaggagaaagtatgtgacaccatgcaccaggaatcaaccacactgctcaagaacatagactcttgtatttctcagataacgatgtataaaatcttggatgtaaaaataaagtttaaagtcggaaacacaggcaagagaaatcgaaccagagaaagatatgtatttaaaagagagggatcagaggattctccctagtcaaggagccagcaggaaaagcaggaatattcacagttggggaaataaactgcagatgactaacccttggagcacaattatctatgttagtgttgttgcaaatgtttttactacatattttcattcctgatgttgaatcattctagacacttgtttagaataaaggaaggtgcattgtgctagaatgcaacgttcccaaaaattccctgtgggaaagttggtggtggcagtggaatataaacaaacctattaaagatgcctatgtaataggacaatggaaaaactgctcctctctggcaccctggacctatggcaaaattatttccccttaatcagagtaaacctctggatgagaaaagcaatgattttaaagtcctgatgattatgatatgggtttaattaaagctgcttcttccctttaatggtttttaagatcttaaaaatcagggttttgtttccttgttagtagacttttgttttagagaatgccagaagctttgcttaaactgctgccactgcataacctgtgagctaagccacacctgtagtctcgtttccaggcatctggatgtaacacacagtgacttccttccctttcttctgcttctgcattagacgtgaaagctgtgccaactaagcacttttactttcacagctgaggaaaaaccatcatcttaaaatgctcctgtcagttgggaaagagtgatgcatacagaggaatgcgtttcaagcttcccaaccctatctaacaggtgccaaggcaagattcgatgaccttcccctggtggcctgccaagccctgtttctgggaaactgcctgcttggcttggagccagtcagcagagcgatgaagggatgcccagaaggggttctcccactgcctggctcccaggatctcaggactccagcacacattgtaagaaaacagaagtcagtcgggaggacagggatgggagagcagcttctcccatgaaatcacacctgagattccatctgaaagtcactcctgatgtcacctgggttcactcctcactgaggttttgttaacattcattgttattagcaatcactcatttatgtattcactccataaatagagacagcacttactgcatgccaagcattattctagatcatggggagaacagtgtgagtacaaagtggaccattcagaaattcatccctatttgcatattctcttactgaaactttacataaatgcatatttattttagtgtacttcttcagcaataaaaatttcattttcaatatatcactctcacctgtcgaagagtaaagcaaaagagagatagaagttggtaatagaaaagtggaagatttattcagcgaatccttttaaaagagaggttgcttccacagggtaccaagactcatcaagtttctcaagtcataaatctgggcatcatctttgacctcttatctcaacccagattgaatcaatcataaaaatctcatcagttatgctttcacatatatctcaaatctatccacatctttctgtgctgactacaaatgcctagtccaaaacatctttacctgaattacaatctaaaatggctcctaaaacttcctatcccctgagcaatcccatgcataatccccaggactgggaatttcgtggaattcactcctgtgattagattatgttacattgcacagttgcaacaaaccttaaaataggggaatcacctgggtgggcctgaactaatcacctgagccctttaaaagcagagagttagccaggtgcagtggcttatgcttgtaatcccagcactttgggaggccgaggcgggcggatcacaaggtcaggagatcgagacgatcctggtgaacactgggaaaccccgtctctactaaaaatacaaaaaattaaccaggcttggtggtgggcgccagtagtcccagctactcaggaggctgaggcaggagaatggcgtgaacctgggatgcggagcttgcagtgagccaagattgcaccacggcactcctgggcgacagagcgagactccatctcaaaaaaaaataaaaataaataaataaataaaaataaaagcagagagttttatctggcagccgtagaagagaaaatcagacgtttgaagggacagatgaatttgtcatgccattgctggcttgaagatggaaagtgccacatgctcaatcactagatgttgggagacagctggctgacagccagcaaggaatagggacctcagtcctatggtcacaaggaactgaactgtgctaacaaatgtcttgaaagtattttttttcctcagagcttctaaaataaaactgagttcagccaacaccttgatttaatcttgtgataccctgagcagggaaccagtcatgccatacttaactccttaactacagaactgtgagttaataagagtcttgttttaagattatgagtttgtggttatttgccacacagtcataaagaactatacacagtaaagcatggacctgtgctttctgctatacacagtaaagcatggacctgcactccagtgacatctgtgagaaagaagactgctcagatatgtaagagccactgggacatatactttgtataaaattcaaagcaggactgagactgaataaccctgtaggtttagaaggggagtggacactttgttttacacaactgatgaagttcagcgctatttaccgaaaacttttcccttatcaagttccaagtcccttatcatcatagagggagaaaaaggaaccaaaggcaggatctggacaaggagcaggataacaaaggtgggagagagaagtcaaaagtcaaccattctgagtaatgacacccccaaagcatcctccaaacacggagaagccacacagggaaataacatatgagtattttctttttgagacagagtcttactctgtcgcccaggctggagtgcagtggcacgatctcagctcactgcaacctctgcctcccgggttcaagctgcatcagcttgattcacctgcatcagcctgagtagctgggactacaggcacttgccaccacacctgactaatcttttgtatttttagtagagatggggtttcaccacgttagccaggatggtcttgatctcctgacctcgtgatctgcccgcctcagcctcccaaagtgctgggattacaggcataagccaccgtgcctggcccacatgaatattttctaccacaaaatgaattcaatctcaaagggatatctaaacccagattagatcttgtcacttctctgctcagattcctgcagtggctccccacttccctcatggtaaaagcatagccctgacaatggcccagttggctccactggatcaagtctttttttgttctgccctcatctcctcccactctcctatctggttactctgttccatccaccattggcctccttacttcactgggaacataccaggcatgtgcccgcatagggccttagcactggctgttcccttcacctggaattctcttcctgtagcgaactcaatggcggacctcctcgtctttctcaattctttgctcacttgtcatcttctcagtgagctctctaccttggcaaccccatttaacactccagttcccctatccgccttgtcctattgtttgtatttttcctaaagtatttattacattctaatatacgctatgctatgtaatttacttagttgttatgtttattacaccttcccaacttgagtgtaggcttctttgggcaaagatcagtgtatgtcttgtgtactgacatatcccccatacctggaacattataagtgttcaaaaaatacttactgaattagtaaatcaacattttgagactactggggaggagctcttgaacaagaaaatgatgtcaaagatagtgtatggttcagtacctattaattttaaatgaataaaataccactggaggtctacctagtgtgttgacattaagttgtatttcagaaatgaaaaatatttatagatatcttctgggtttaccccaatgctcagtatccatccattttcacactgtattagttcgttttcacactgctataaagaacttccctgagactgggtagtttataaaggaaagaggtttaactgactcgccattccatgtggctggggaggcctcaggaaacttacaatcatggcagaaggtgaaggagaagcaagtaccttcttcacaaggcagcaggagagagaagagagcaagagaagaactaccaaacacttataaaaccatcagctctcatgcgaactcactcactattatgagaacagcatgggggaaactgcccccatgatccaatcgcctccctcacttggcacatagggattacagatccctctctccacatgtgggcattacaattcacgatgagatttgggtggggacacagaatcaaaccacatcaacccctaagtctgttttcctcttaagtgatctgaactttgacttttcttgccataaggcttctaaaaatcttaaccctcatcattgtgttagtgagggaactgcagtagctttaagaagcctagctattgaacctatgactagaaggccatgtgacaaaacccattacagagaaagccctatggatttgtgaggttttacaggggcagaaggatctcgcagcagattgaggttttcttttcctaagttatttgggagacttcagaatcaactggaacttaagagcatcattctaaagcttgatacatagaagctcctacaggagatggggagggatgattacatcaaaccttaaaaatataaatatcaaaaataaaccaagccaatttactatccaaacagctaatgtatttaggcaaaagacttttaaaaagacaattgcattttttattacattaagtgcaatgtagagtggcaccgattgtctccacttcactctttttatagcatattttatctttttctagttaaatgtattcaatgctttttaaaaaggttgttaaaatgtacataacattttaaccatttaactgtatggttcagtggcattgaatacattcacaatgttgttcaagcatcatcactgtcaatttccaaaattttctcatcatcgcaaacaaaaattctgcactcattaatttttttaatatcctggaaatattgtctcagccattcttttcagtgatggccaccaaatagactaacctctggggtatagactaaaatggctaaaagtcaagcacatggttaagtgaccttcatggtacccctaaaaaatgttcgtgaaaataaagttactttacaaaacaaccctatttgtcaatgacttgtaaaataaaagctatatatatagggaaagtttgttgttgttgttgttgttgttgttttgagacagagtcttgctctgtagcccaggcaggagtgcagtggcgtgatctcggctcactgcaagctccacctcccaggttcacaccattctcctgcctcagcctcccaagtagctgggactacaggcgcccgccaccatgcccagctaatttttttttttgtatttttaatagagacgggatttcaccatgttagcgggaaagtatttttaaaaatcattctgcaaatatgtatggatcaccctccatgtgccaggtgctctgtagacagaacagtaaacaaaacagaaaaaaacattcatgtagcttgcattctagcaaacaacacaacaatttcagataggagcaagtaatctaaggaaaacaagacagaatgataagaattgttttgtgtcttatcactgtttacatcctccacagtgtctagcacacagaatgcatttgacccatattcatgtgcagatgggttcataaaatgtctattgagtaatgactctatgcatgacatcttactgagtaccttgagggacatggagattattcagacttggagcttcacttcaagctccttgtaaatgatcataagaaacctgatatgcacattctagaggtagctatttgataacttatttagctttttccttggcctaaacccagtttttatttcatttttctttccattactctaatttcccaggccctttctaaagtctttgctcagcatggtctgtacaacttactttagcatcttcaaaatgttcagcagtagcaagaaatctaaaagcctgaattgtccaataaaggattctccctttcttcccttttcaaagccccctcccccaataataacaacaacaatccatcctcaggaacagttagatgtgtgtcaatcagataatgttggttcttggcactatctttgcatttaaaagggaaaaaatttaactggggcagcataagaaaacaaatgcaatgagatttttccattagtttaaattattctagatagtaatattccttagtatacaaatttagtaatagaataacctcaagtttacaatccaacgaatgtgttctatttattataatgctcctgattttgtagattggtagtatcagacagtggatagtggatctactatcaaatagtaattcccctctcatgctttgctgcataaactgatatctgccctatcaatctcatgagccaaatgtcattttctgaaggaaaaaggggttacttataattatggtagttacaaaatcaagtatatatatatataacatatttaaataaattgtcggtagctgtttttaaccattgatggtgttgggctaggacgtctgctttatctccttgtctgtcagaaattataaagttctatttgttcaaggtgaggagagcatagtacaaaagatattaagtggcttcccttgggtaaataccagataaaatcatgtaattaaagagccttacttctaacttcccaatattatccaagtgttatagtagacagtcagtgtcctacaatgtctgtcaagccttgtcaccaaaaaacactggaacattgagaaaagcatgtggaccagcaaacctgctgtaaaactgatagtaatggcaccagccctaagcagcttactttctcagaaaaataatcagcctttttgatataatcaagtatgatacattttatctttcaatttaaatagtgctaaataaaaaacaatgatattatattgtggagaaaaataaagtgagaaaaatttatgtaactaaacaagaatcagaatctgcttcaaacatggtcataatcatcattttcttctcatttattgttctgggaggattcagccaggaatagacagagactttattaggatcagtgcttagtctgtttccccaggaagcagacctcaggacaaaacttgcatggaagcagctcactgggatagtgaacccagaacaaactgaaaccaggaagggaggaaagctgatagacagtgcaggaatttccaagaaaccttgtccaatgcactccagaactgtccattcaggagacaaaaggagagagttctaacctagctgctctgtcctgcattggtcaatggttgcctacaggagttaatgtcctcatgcttctaggttgcacatgtgtgagtggtagctaagttccaggtgtttgtactgagatgtcagaggtattcagaaagaggctgaggccagccattgtccggttgcagctgcatcaacctggttaaaatctgtgtggtaccagtcacgtgtgcaggggcaggagaaagaggcagggccaagaggatttccaaaggtacacaagaaggatctgaaatatcactcacttgattttcattattcagggttcttcatcactatttttcatgggctttttaaaaaattttgttttaattgaaaaagagtagtatacattaatatgtatggagtacaatgtgatgttatgataaggtagacattgtgtaataattaaaacaggctaattgacatatacatctatcttacatacttatcatttctttgtgattagagcatttaaaatctaatcttttagcaattttgaaatatacattattaactttagtcaccatgctgtgcaatagatcactaaaacttatcccattggccttaaaagttttttttaacaaaagatacactcctcatgttctttatactatattgatttatggatgacctcactcaagatacctataaatgacctgtactgctgattaaccacctagagatctcttcatcccaaattctagtcctatttcccaagcaattttctatgcactagggagctgggccacagctattttctgaatgaatgaatgaataaataaataaataaagtggattttctgttatttatttgtatttattctcattgcacagagaattgtatagatatatagtacagaatgaatgaagtaaaagtaatgcagttgctacttactcacttttttcaatggccaggtatacttcatctatttgagtttatgttggccagatgggcacataattcagggtcagtgagttcaaatttctaaaggacaagtaggagacagttcctcatggctgccagccctatcggtgctctttcagaatgtggcctctggcttctaggattctggccacagttcaagttactgcataagaaataagaaaggttctgtggaaaactatgcccaataaagccttgtggagctttcttagaacactgaggtaaagggaaagcttctaaagattatgtgtaatgctgggcatccagtaggtgccctactctattccattcacttagcattattgagaacccagtttgaacaaggtattatgcagagttgagaggaatgcaaagatgaacaagacatagcccatgccctcaagatgctagcacgtagttctgtggtttttaagtttacccccacgtatcttctggagaaactgatgaaagccatggacctatgtttcaaaatatacatgaccctgagcataaaatttagctcatgattttatattaagtggaatttataattccaattatggaatgatataaaacattcaggaaaaaacttgtttattaataactatggaaaatatgtagtgtcataaatggtccaatagatatgtgaagtgctctgggagcaacaaaagggagaaagtaatcctacctgagggtataagaatgagcatcctcagggacatggcatgtgagtggtaccttgagggatggtgattgtagggcacacctggtggagggagcaggctaagtaaaggcacatacaagaaagccaagggaatgtcctggaatttatgaagtccagtgtggctagagcataggactcttggaagaagctggagaatagtgggagatgggactacagactagtagactgaggtccaaacactgattttcatgcttagcctgttgggttttactcaataggcaatggagaacggcatggccagagcagaaccttataatatttcttaggatagacagaaagagacagaaagtggaggtgagtaggaggcttgcttctaagtagaaggcttttacaagcctagattagggcactagaatgtagggaatgataagaccacattaaagatgtgagctctaaaagccctttataaaatgactgtccacaggagaaataagatacaagattttcttgcttctaaagtgattaatattctgaataaagttaaacactggcaatgagaaattagttatcattcagatctgtcttttcatttaccttctcttattatttttgtaatccttggtataatactttaaaaataatgggcttaataaatccttgttcaattgaatgtttttagatttaatttatagtgtgacagctactgagtcaacaattttcatacctcactttgaataacgattctggtctgcagacacaatttaaggaatactgaataccttttcctaataggcaatggatgtactaccagggcctgtgaagattggcatgatattcaatttgattttacaccaaaaatatgttgtagaccttttcatgaaggtttattacatcatcttaaccaggaaattaaagtgaaactaaaatgttatctctgtaagacatgatgcttctctctaaggatccttagcaaagagaactaccttggagataaaagcatgctttcagagccagaaagacgttgagattggaagcataaaaacgcctagtgagctactcagctgttgtttgggttcacattttataaaggtatagctcatgctcactaatggaaaacaaatctgaagattgtgcctttagtaacattttctttctgatttcaatgtttggttaatgtgggtgatggcggatagcttcagtgtaatcacataaaaatgtatctattgaccctggaaaagcataccatttaattgagtccttcttccctaaaagatttttaaataccattttctcatgataagaggcctgaacaagggcataaaaataaattatttattttagagctcttaacaactaggtaatttgcacctggctttcttggccacagtgctcccaggaaattcctctgaatcaaaggagcatctctattcttcctgtctcttgtctaactccattctttaagttgtgctccatagcagtggttctcaaactttattgtctaacaaaatcatctaagaagctgattatacctagggatgccctggccacactctagacctatggattcaaactcgatagtttgagacccacttatggctctaaagaacagcccgggtttccaccaccatacctcttagctttagatggggctctgaattaactcacatagtagtctgaaaatgaaattaaacatttaactttaggagattcaaatctttaataaaatataaaaacaaagatattccctcattgaaaaattaagagtgttatatactgggcagtataaatgaatagttatagaccctgctttcctctaagctccaacacaaatttctctggttctaggtcaatataaaatctaaatgcaccatcatcgttctttgctctgtgccattgctcactgaacccacttcttcctggaatatccttccctccttatccccatctatgcactttctgctgtgttttaggaatcaacttgagccttacctcctcttccaaatctttacatagtttccagcccataaagcattcctgtattttgagctcctgtagcacttttctttttaatctgcactgtggatgtgggctttggataacacagtgtcttgtggtgatcttcagttaggtcatctgagtgtgtctttccccatgagacttacaatcttttttgtagtcaggctctcatattttgttaaatcaccaataacatcaaccataatgcattgtagagccttaaaaatgctggttggatttaatttctttgaaactattatggaatctagctgcttgttccatttcccaactctgtgtgtatatgcatatggcaatctttctccatatgttacagcctgcatgtatgattgatgcatggcaactagtgatacactgaaatattcttttttttttttttttgagatggagtcttgctctgtcgcccaggctggagtgcagtggtgcgatcttggcccggtttcacaccattctcctgcctcagcctcccgagtagctgggactataggcgcccaccaccacgcccagctaatttttgtatttttagtagagacagggtttcaccgtgttagccaggatggtctcaatctcctgacctcatgatccgccctcctcagcctcccaaagtgccaggattataggcgtgagccaccacaccggcccctgaaatatttgatttgaaattgaactaaactcgtaatcactgtgatacagtctctcatggatttataacatcatttcatccactaaagggaaaacaaacctcaagttatagaagaaagctcatattaagggacaaatatatttataccagacagagtgaggcaaagaattgaaagaatttttgtgagtggaaaatttttataattctacctgaatatgagagtaaattttaatgcctctctgtttgctctcaaaaataagaataatgcctaaaatttatatagtactttatattttactcttttcccatgtacattttcactgttcctcagaactctatcagaaaggatattattattcccattgtacaaatgaagaaacacttgaatcccagtgtctcagttcatgtttctctataagagaatataaatagtatgtatatataaatgtcaaatcccattgtatacctctgaatatatacaatttttatatgccaattgaatattttgaaatctaaaaggagagaaaatagattattattgcatgctcaatgcacttatttaatatctctatctcctccctctccgacacacatgtaagttctgtgtgattagggacctattttgtacactccaattctagaaaccagaacagcactgcaacacaataaggactgaataaacacttattgtatgagagaagttataagactaagatggaagactacaaaatgcagccagtgagcagcttagggtaatgagtctcaggaacctagtgtcactcctgacattctcaaggggctaagttcctctccctacctcctcacaccccagttctgtgaagcctggcccacatgtgagctccttaaaagcaattttttcttaaagtctacttggtgcttagaatactgaatgaaactttccatttgagagttgtcgtaggaacaagacaatgcttatatgcgtgttcatctgttcattctaaggacattggaactttgtttgataactaaaagaatgagtctccataattaacttttctacaagctagcaaatgtattttaagaatctgctatatgaaagaacataatatggcacttcaaacccggtgtgtaaactaatcagaaatactacctgaactttgttcttgtactctgaagagtgtaattgcaatggaaattcatgccgggaatattgcactgaaggtcaggaaatttacatctagggaggggagaactgaatgcattttcaggagaaactatttatctttgttgctatggggattcctgcatatatctgcatatctcaaagaggggaaaacaagtcataacagaaacctcagacaccagtcaccctcactttaagcacggagggcagggtggagattgagggagcatgcgcatggatatacacacacacacacaaaaccacacacaacactgtctacgcacaagaagatatatgtattcccaatagcagatcaacagattatatccaatttccagcataactacaatttcctgttctcctaattaaagcacatcataatgcaatgagtgaccttcttagggattaagcctcaaacccttctaaaataatatgtatatatatccttatacaaatcactgttaaactgcataaattaatttatggtaatcagcttcttgcaatacacctcacaacctacgaagacatttcaggctgtcttgatgccaaaggactgagaactactgacttcaagaagcgcttcttatacttaaatgtgaatacaaactgcctagatatgttgttaaaatgcagattacgattttctaggtctgtgtgggagcctaagagatgcagcatttctaaatagcctgtgttttgttactacaagtgtgatgttggaccaccagtatcaccaggaatccattttacatccttgcaggtgattccattgtgaagccacagttaaggatcactattccataatgactaaagctaagtcactataattgtctactgacctttctcagctgcaagccctttgaaaaccttctaaaagtttataatcagtggttgtcagaatcacctggagagttttgtcaaaacccttttccactcttttatattttggactcaggaggtggtagagtctgggtttgagaattttgagatcatcaaatgctttagaaaaagaacatcatgcttagattcagaaacttggacccagcctcagggattcaagaaaggctggccctggataaatcataaaatagactaaatcttgaagttgtctttttgatatttttctcccccatattttatctaacttatatgattctactatttctaataaagtttatgacatcagccatctctatctagatataactaggtttgtcattttagcacttttcctacggatgcttggatttaagtcatctctgtgaatgaaggactccatctcccattaaaatagtgcaagatgtcagaaaacacattaaaaatatctcttgagataaacaaactctcctttacccatctgcaactctccccccaacacccgaacctagcccttttctacctgagattgcctggatttatagaaaaccattgaagctttgtctatttccatttatgtatgtaaagacaaatcttaggtcttaataattaatgcctgaaatcaacactattatcgttacttttaagattccatgaagaactaaatattaggttaagaatgcattttgtctattctcgatgtggttattgttaactaaggaatttcgttatgcaaaccgttgcctttcctagtatattaatgtaaaatatatgcaactgtatagatgagggaattcctcctatctcctgtgcctagtagcaggtgctctattaatggacgactggtttgatagctatttagtaaaatgcgcgcagtgccatctagtggttcatagtcattattacacaacctaaatgtcatctaaaatgatttaactagcacagcagtaagcaacatatttatacaactgtcagacttttaaaacaaacttcttaataacttcttaatgaatctcaacttagcatttctcagtgtcactatttaaataaacaaaaggcttatgttacttaaatttctcaataactaatgtatactgaatgcttattatacaatgcttattataagcactatgtggagtgctttatgtgaagtatctcatttgacccccccaaaacaacaatgtagtagagaaaatagtattgtcctcattttacaggcgaggaaactgaaacctaaggaagttaagtgacttgcccaaggtcatagggacagtcagtaggggaccccagccactgccccggttcctgcaccttctgcactatgcttacacctcccaaggtagtcgccaatgaaataaagtttccatgaaacctttgtgaaagatagcctcctcaccaggtttctaatgacccgatatggtaaaatcaacttaaactccactaactcaaaatttatgacaacaaaactaagtgtctgcttttgtggctgcaatgcactttgtgattcttttacttcacccacataatacgtcatcaagattatgggttgattaatttattgaaattgggatacttggctaaaatttagttttggactcacagatcttataaattagtagtagaatagtatggctttagatcagagtgtatttagttattttatcacaaatagctcatttcttgatcatctattatgtaaatacacgttctcttttaatctcactataactgcctctggatggcattcgtttcctcattttaaaaaaggaataatacaatgtataaacaaaatattattacattttatttttattaataaaatttgcccagttttgcagttatttccagagccaggaatgaaaccttaatctctgtggctgcaaaatctgaattctttccactatgccaccactggaaaataaggggtacaatgtgcgtgactgcagttttttctgcatagtaccaccttgtagacaaaaataccaccatcccttactggaactaaaacaatatgctccaactacttcccactgtgtgcctgtccgtctccgctcctttcttcccttaaagtcagaaatgacatttttaagctgcattcctgatcatgttgctgtcctacttaaaacccatgtcttcatactcagcataaagagccaaatccttattgtagttatggtgctcctgcaaccttatcttgttctggcccaatcaagaccatatcgtaatcccattttatacctagcatgctatatgtcacagtatgtcactatttctgatcacccgtttgtgtgattgtgtgagtcatgtctgtattcccaccagactgttagctcccataggcaggaaccacatctatattgtttgtattgagtcctcacaatctaccatagtgtttgcatataattatgaaaactagttttacttaaatcatttttaattatctattctcacagttagccagaattattttatttttcatgaaatatttttcttttacgttccttatattaggaccttcaatatgtaagcacataaatgcagcatatttatgtttaataactttcatataatttctaggtatttgattataataataaacaactattgtctcctacatgacatgccctattccaagtgttttacaggcattattttattcagctgtcatagtaatcatccgaaagtagatgctattttcagttccacttttctaacatgaagattcagagaagttaattagactgacagtatacctaggattcaaaccagtgtctctgtgattcttcatgactatgccttattgcattttagaaagcaaatgcatccttagaaaaccctgtttcactgttgagtcatttctttgtcattctctcatttagtcaaaagacatttaccaagttcctatgtgtaaggatgtgtaaggcagtgtgaggggcactaggggtgtgaacagttatcacaatagacacagccttgtcctgtgccacatgcaacgcagaatgggaaacagacaaactgttggtctacacaagagtgcccactacatgctgtgatggggaaggacagagctctaaggtggtgcatgcaaggggtataaaacccggagacagggtttctgatccagcccagaaagatatccttgaggaagtaatgttgacgccaaggtatagtagatgagatgtagatgagaagtacacaggggctagatgaaaaaagaaaagaaagaaaaaaaacttcaatccttgtttagatttcaaattaatgggaagttattaaaggactttaagcagcatactatatatatatatatatattttttttttttttttttttttgagacggagtctcgctctgttgcccaggttggagtgcagtggcgcaatcttggctcactgcaagctccgcctcccggcttcacgccattctccaagcagcatacaattttaagcagcatacaagtgatatgtcaaattacggtttagaaatcacactctggctgcagtgagtagaaagggagtacagaaagaatgaaaaaagaactgactcagccaaacagtaagcgtgatagcattgggtaacgaaattgggtggtggcaataaaggttcatggaaatggtgggattacagtgatgtttaggagatatacagtccataggactaggtcattgatagaacccagaaagtaaatctccctggagggagaataggcagcgggaggatggtggcattcaccaaggaagggaatcccagagccggcaaggggagagatgagtatgggctgctcaccctgaggctgaagtacccaaagaacccttacatgggcatgcctatgtgggaacccttatgtgggccactcctgtggtcactcccatgggcctggataattccaccactgggaattctaaaagggtttcctattccttacaatggctcgtcaagagaaatttaagcatccagattccctccctttgccaacagccatttagctttcttgacatatacccatctccctcccatgctcaagttcccagtccatgctcctctccccagatgtctgttccacatcatccacaaccaggaactaggtgaggataggtcacagggaccaagcaggacgacaggctggatgtcatcagcactgctttctttgcatcctgcacccagacacatcctgatgactagatccagaagattcacagatcaaatctatagggagtaattagaggaatcccagctcttcccaactagaatttaaataaataaataaatttagtttataaatgccatttccctgggagtgttttgcttgctagatagaagagttggataaataacaccaagaaatacaaataatttccttgttgattaattcttgatatacagaaaagcttgcaaatttgaaatcacttaaatctgaatttttccaaaactaataaatatttattttagttggtatgtgatttgtactcatctgctccaaatcagagatatattgcaatatatttttcttttgacatgactcacattatttacttgttcatctataatgcattgtctgctaggtaccaggaactaccactttttactctatgcatttttccattttaggaatgccagccccatttcatagatgaaggaagtgagactctaagtcttagaggtcatgcacttgtcgtagaagagccagatttgcaacctaggtctttggactccaagtccagtgctccttgagcacaggtatcttcccttcataacataaaacattattttgagtaattgttaaaattaacagcaaaaatccaagtaaaggacacagtaacggttctatgtaacctgttgtttttttttttttagtttaaggatttgcataatctactcatctcttggatctcaatgtgcacacaaagttagttatgagaaccatactttaggtttttgtttttctttatgcctaatttgaaaataagaatgtctgaacagattgctctctctctcttagggttctgtggttacagatcctgcagttaaacctagcctgggaaaagggtctgacttcaaaagactgttggctagttggctcatttgttattataatggaagaaattggtgacaagttctcctataccaaaagtcagaaaccatagatctgttctgaaaagcaaaagtaagagagaagtcaagaaaaaagtcacatagctcaattcatagtagaagctgatgttagttttgcttattaggtatatagccaggagagagcaatgaggtagaagacaaaaaaatagggagctgttagtgaaaaaatatatatacagtgcatatttctcaaaaacggaaactgttatatttcattgagaataaacaaaatatttatttgcaaatgcaaaagcataatgaaaagtcaaccttaaatggtgaagatgtggaggaactggaactctcgtacactgctgatgggaatgtaagatggttcaactacttttggaaaatactttggaactttctttaaaaattaaacatacacttactgtgaaacccagccttttcatttctaagtatttacttaatatttttaatgattttaatattttgaatccctcattgtctaagagaaatggaagccacatatctatacaaagacttgtacgtgattgttcatagcaattttattcataaacaaaaactgaaaaacaacccaaatgttcatcaacaagtgagttgataaccaaattgtgatatatccatataatggaatactactcagcaataaaaaagagaaaactattgatactttcagcaatacatgtatgaatttcaaaacagttaacactaagtaaaagaatccagacccaaaaaagagtgtttaccatatacttacagttattaagaactgaagtttgcaacagaaagcaaatcaatagttgcctggaacagggaatgaggatggattgcagaggagcatgagaaaacttttgagggtgaggacgtgttctttatcttggtcgtgatcatggtttctgggatctcataacaagacctcagggcaaatagggaagaaaacagaaacagctttcttgactaccctagtgaaagtaaccatgacttaaatcagctggtaataatgtagccaagaaacttcttgttcttgaccagcctagttcagtgatgtgtgacttagttctgctgctgctgcagtgtatacataacttttcctttttaccttgtcttcctgcctaccttaactttctttttttttcttgtttccaacagcatactactaaaaaacacataaataaatgaaaacattttaaatactcaaatataatttggacatcctttcaaacactagaatttaaatgttggccttttctttttgagggggcagggtgtgcaatggggaaataacttttaaaccgatagacttggatctgaatgctagtcttgccattgactcctcttctacttttgcatttgtcagttcagtttccagatcctcagttatcttatgtgtaacacagggataatagctgtatttcaagagtgattgtgaagattggaaataactatctattgtggtggtcagtaaatcatttgcttgctattatgtaatgcacatcaagtcttagagataatgcacagcctatgttcatttacttatgttgaccccctgcaacagctgcacacatgtgagatacctagaaaaaaacaggacagagggtcatgtaaactgatgtatttgccttccattactttgggctgatgtgttaactctgctttaattgtagtgcacctggtggacatatggaatgtcatagaagcattgcgggaaaatgctctgaacaacctggacccaaacactgaactcaacgtgtcccgcttagaggctgtgctctccactattttttaccagctcaacaaacggatgccaaccactcaccaaatccatgtggagcagtccatcagcctcctccttaacttcctgcttgcagcgtttgatccgtaagcaccctctgaatgtctgttcctctctacatgtttggctttcacttcctgtcttacttggtctttttcccaaacaattttatatctctctctttttttttttactctcttttttcttacagtggatgcttatgtcagtaaagtctccatgtgtttaatataaattttaaatcctgtgaaaaagactagagagtaaaatggtgccagaggaacttgaggacaattgtattttatgtgctgacctttagttatctcatcccatgcttcctggaagctgtggatgcttgagaggattgcctgtggtgcgatttaatgaagcgtgaagtgggaggatctttttaactctcttctttgcaaattgtttaagacagtgtttctgaggtgtcctaacaaggccctacagcaaacaagaaagaaattgaaaagggtttcttgactatcccagtcaaagtaactatgacttgcgttaaatggactggtcaatttaagtgtttcgatcataaaataaggggatgctgtccacagaccacaactgaagctcagcttcatttttgtataattttcccttttagaatcagagaatttcagggctggctgagatcttaaaggctgttcgtccacatatctcattttacagatgaaggaaatgaagcacaaagaaattgtcacttgtttggtgtctcgcagcatgttagtggccgagtggggacttaggtgttcaacaaaggtttctttaccaaggtatatgtggattcccctgaattacattctcagcctacaatttcaagagggctttttgccaatagcctccaacctggacgtagtaccaccccctccacttccactgcttgttttgaatattaaaaaggaaaattgctaacctgacctttcagcaatcacattttgagattctcagaaggttttacttagtctcattgtctggccaatgcctggaagtatttacccccgcagtggagatgttccagccaggctaatgttattttgcaattcacaaaagctaccagctgtcactttgcaacttagagtgttaacagaatcgttcctgctcagtttttccagtgtgcattattgtcttcgtgatatttatattttgagaaattcttcagttaaaataaacaattttacaactagcattccaggttggtagagtctttgcttcggctgtgcacacttcagaacgagatgtacagctctagcttaatcactatagtaactggatgctggggcaggtaaagaggactgtggttccacatgacaggcagcagaggcagcagaatggaacctggccatggcatttctgtagtggcatttctaacctggccctgtgacaagagtgtggcagctttcagatttgcccctaaagatgtcaagagacttatttgttagaaatgtaacaatggaaactgcaaaaagagaaatataatatctcactaaatcctggagtactgctagagaactcataaagaatcaaagccaaataatcatttgcacccactccataaatatagaccagaaaccagactaacaataaggaagggggtattttgtgagatatataggattcacacaaatatagttagatttttcacttttggtcagaaatatttgctagatcacttctaaatatagagctatgaacggtctctaaatagctgctgaaaatatagctgaatcatttcaagattgatgaaaagctaagtttgacatctattccaaggtaaggaacaattcacaaaaaagttcagaagaaatctttatttggtgcctattcttcgtatagataggaagcctcctgatgtgtactttcaataatctcactgtagtagatttataaacacatccacatagacaaatttcactgcaaagatttataaacatatccatgtagagatcctactctgcagacacttctgcgtttgctccttcagcgtagcaaatgagcataggcagtcctactgacactcaaattttccatctgatggcatggaattttggatatgaaatgtaagccatcaggaagtacagctaactggatatgtaatttagaagtgaatataagaagagaaacttaagaataaaataaatgttcaaattctatttcttataatagtaaactccaatttatccaaatgagacccagcgtggaaatctgatgccacttcctaccacctgtcccacgacagagtccaagtgtttaagagaaccgtctgtattttggcagacatgaatgatcctgatactactaaaagaaagatgtgctgttgctattacagaatcactgaaacatttaggagatttttctcccatttgtcgtattttaaatggacatataaataaacagggaaaaaatccaaaataaaaattagagatgccttaagaacctagactctgaagaagagttgctaaaaataaataaataaaaaagaaaggcagtatagtgatttaaactcatgaagaataagaacttggattcaaagaaacttggccattttgtgggggaggggatggtgccttaaaattcactagactcccaggtagttgaacttcgtgaagaaagtggtaacctgagatgaggattgatgcctcctttactgggatgtacttctgagagccagacttaccttcgcacagccatagctccccaagaatagcattccctctcccaccaaaaaaacatccggatctcaattttcataccaggatgcttactgcagactgtaatcagtttcctggttgcaagatttctctctgctcgttggcaagtcagcctctcagaagatatgataactacatctgtagatgatttgtacaatgttgggggtgggcagtggaccccagtggtttatgctcatgcttgccattctgtccctgaagacacagttccttgagtccagaagatttttgttttttgtgacattccttttaaaaatggctgtattcctgggagggggtcacccagggagcagttaccaaccaacttctaagcaaatctctccacggccagaggttatcttttttaaggcgtctagtggaatggatgagtgtgcctgagaaggatgggaaaagagatgtcagaaataagaccaggggctgagagggaagaagatatgtgagggagcagccagaacttgagccagtctcttcctcttgtccctttcctccgatcaccccaggaactggcctcccacctccccttctttgctgccaggagccttccgctcctctgtctcctccagaatccccccagcaaactggcagcagcttcttctgtcacctcttgtccatattctattgaggagggggaaaactctttgaagtcttcaaaggacctttaatgttgttcttattattttgtaggaaatagagagtaactcaaaagaaaaatattgcagaaagttaaaagatgaaaataattcttaaaagcctataatgtgcagcctttttgagaggtgcagtcacaaactctgaggttctgtgaagcctttcgcctgtcatggtcaagttgatcacctttccacaggtccacctctccttgcacctgattctgctattgtcttatagtgcatgtctgactgtttatatgactgcctcccaaagacttctttaggaaagaaccatattttattcttcttatgaacagcacctgagaccatagccaacacaagaatgaatcaatgaatgaaaatccaaggttgatctttctgagctcttgtcgtactaatttcttttaactatttttttttaagaccgagtctcactctgccgcccaggctggagtgcagtggcacaatcttagctcactgcagccttcgcctcctggcctagagcaattcttgtgcctcagcctcccgagtagctgggactacaggcgtgcaccaccacacctggctagtaattgtgtttttagtagagatagggattcaccatattgctcaggctggtcttgaactcctgggctcaagcaatccacctgcctcagcctctcaaagtactgggatttacaggcatgagccaccatgtctggccagttttcttttaattctttttctgagattaagtcttccttgatctccaatatattacaaagactagcgggtcccagtcacctagattcagaccctctatttttacttctgctccacagaaaaaaaaaacaagtgttcatggttaccaatgttggtgatcctatttttacaaaagacttctatgtactcctctcaccttctccctgcttccccaggaaacactaaaaacaagttgtcttgactcaatctcatttcaattcagtagtatcttctttcgtaagacagttcttcataaagtagattatgtgactctagccttgtttttagcaaataacattatcatatatactcagtcactcaaaaatcatagtatgacagttaaaaatattaaaaggaacagtgattttcctattttcagaggtcaagctatagtcttccatgataatcataataattgtattaaaaataagatgtactcagtatttactatatgtcaatagtcttactgacttggccctatattatcatgattttccagtagaggagatagaaagaggttaaataatttgcaggtcatacagcatcatactaaatgaggtaaatgagggaaaactcattttgtttcaggaactgttttaagctcagctctattcatgctttctgtttcactttttaaaatgaaaattaattaaccttttttctcccagacttgttttgcttattacaggatattattctgatgcttacattcctaatctttccagtttctggtatttatacacatttgaaagagtgtatgtggaagaaatatttggacttaacatgttttacattgtagcattaggatcagttttatgacagctacccagaactacaagtccatcacataatagtcttacgtagagaatacaaaatcctggtattttcctccctgtttgccatattgcaccttactgggccatttgaacacccatgcccactgctgagccttccaatgctacaaaaaagaccacagaactatttcaaatgcatggatatgaaatgcctggtactctgccaaaatccttctgtctttcgaatttaaaaaatgattcgatatttaatgcaaaatgtactacaaagtacacaaccatttctctgcaccaaaaaaagtattgttcatgtttgagactatgtagatttgtgaaagcaaagaagaaaaaaagagaagagttataaaaaaccaaatgttcttctcttttattatctatacagccaagactagatatttaaaacagtgtttacttggcgtggtgacttttttctttgcacgtcttaaatttcaagatgtccatagaacattctcctctactaactaaaatcttgttgtagtgaaaaatactttgttcaaaatttctacatcctgctaaaatggaatcactttccaaagaattttcacagctgtagatacattaaatatcctaatgtcactcgttgtttatctgacatactttgaatgagtagcaggtagaatttcaagagagatgaggaatttcaaggggtatgggggcattccaacagtattgaccccttctgttctggagaaacccctagcaaactcacctgccccggcgctataaggagtacttttcccagatgttttgctaacattgtggagggcccagagagaagccagatccaaataaagggtttctgtctgttcacaggttaacttcactacgccccaaaccagagttaattatgcctgtgaacacttctaaattcaaagcatcacataactgcacaatctaaaagaaacagccataaagccaatcattatcatcgtattcaaacacgttatatttctcaatataaatctcaagtggtaaatcagaaagttgcttctcacttgtgcattcattaattgaactgacatatgtaaagagcttgctatgtggtaggtgttatgataggctgggaataaatgataagacaagatgaaatgagatgagatacccttggaaaatgggttgtattaaaattaactgtttctgaccctttatctccaacatgttgtgagcaaatgaagagtagagaccacacctttttcatctgtatatccccaacctctaggacaatgctaatcaatatttattgagtgactaaatgagtgatccatatgagcaaaataattttcagataaaaaatgtgttatagtagaggcatgttgtggaagcagagggaggaagcaattctctccgttaattaagccaccaaaatgtgtgagaaagagcagtttgagtgctgtgcctctgcttatcaaaaatgcttaccaaatgtttttgtgaaatatgttggtaaaagaagagcttctgattttagtactcttaaatagagaaataattccttctgtctgtttaagaaagaatcagtcagaattgaatcttacttaaaagaacttcaagtttctcatgggattttgtaacttcaaacaggaaaccctgttggcaattcggagacaatttacctcctgtacttagcatccagccctaccgatcaatatctatttgttgttttatcttcttgtcaaaaacaaatattctcttccctgcaacttttccatataaataatatattcttagttggaagaaatcagtatgtctctttataagattatgggaaacccagggcagactaaagcagtttctcacttctttattatgacaagtcaaattttgaagtaattcaaatttttaacataaaacaccctacaaatcactatatatattttaaccaaagggtaagtgccttcctctttccattttcaatcagttgtcccctagaataacttgaaaagtctcagagtgagaaaacaaaatgtaaaggaagataaaagatttcaagaaacattgatttatgaagccatttcagtttgtgcttttgataatttgcatatattagcctggttctcttaaataccttgttacatgttaattatataccaatacacaattttattgagaatttttgaatgtcgatctagaacaagaaagtaaagtttgtataggcaaaagttccagggtaattggcttagaaacagaacatattccactatgccaaaagactataatggagaaaatgaataaagtatgtattatgcgctgttttctctctgcattgaaatggaaaacattacaaacaaaatactattattttattttaaaaataaaataacttttttttttttttttgagatggagtctcgctctgtcaacaggctggagtgcagtggcgcgatcttggctcactgcaatctccgcctcctgggttcaagcaattcccctgcctcagcctccgaagtagctgggactacaggtgcacaccaccatgcccggctaattttttgtattttagtagagacgggttttcaccatgttggccaggatggtcttgatcacctggcctcttgttctgcccacctcagtctcccaaagtgctggaattacaggcgtgagccatcacccctggccaattactattttaataataaaatgatatactaatattaattctttaagctttttctgtgccttttatattaccaaagaattaactgtactagcagccttaattcacaaagaaagacttacatggccatgtgattgaccacatcacagactcctaaggctgatcccgcccctaaaagtctgtgattcatccagacttgtgccctgtgatgcatccagtctctcaaacacatctggctcttttatgtcttgagatggcagtcagaattgcacatgaagttgaaggcatactgccatggcttttcataaaagcaagagaagtatacagactttttctgtgcacttcctgatgctgccccactcccaggctgtttggcctgaagttttagggaaaatctatgtttttcaacctcagcacacactggtggttggcttcctgggttgcagctgacagccagcattccatcggtgcagttttactaccttactgcaaaggcattgccagagacatagtcattttggagcaatatgctgctttcctgctcgtttgtacaggactctgaggagcttcccattatccatcctcatgcacttgtctttctgcttcctagacacttaacagattttattggctgtttgtaaatcaaactggtcccaactaatgacaattcctgatgagcatagctcctaaatttttccatttgggatgtatcagcttttctctactccttgcttcctgtgttaatgccagtgccttttttcacaatgaaatagggaccctggtcccatgttttgctcaaaatatgggctgataaccagaggaatatatgctacctaactgtggttggctaactagccaacagaagacgcttttcactttgggtttcataaaataattttgtgcagaataatctcacagtctctataatttatttaaacaaatcttcagaaacataatttttttgttagagaattcctgaatttgaaattagggtaactatagggactttttcatcacaaatttttttcaaccattatttcctactcacaatacaactgtgcttatgtgatatatttactcttcaaaaaaagctgatattttttaaaggccccctctttaaaattggacaccctcctcttcaccctgttatatttacaaataatgttcttttaaaaaagatccatttgtatttaagtctttagtgctcccattctctgttgtagagtcagtcatctctgctcactcctcaaaccgcataaatatttatccagtgcctgggataagcaaagtatgaactcacccagttttggtgtgcttgccacgacctaaatccctgcatacccccagaatccttcttcatgacagagtcacatttgcaatctggcacagtagcttgcataacaatagattccagtggcctaatttcacccttgagttcctgtaaaaccctcattcggctgccctccacttggtgatttatctagatttattgtgtcaatttggcagaacagctctgatataaccactgttggatctagtatcatcaatcttccatttccaggaacaatacaggactggcaatctccccatgatcttcttcattaaaagctgaggtctaagagtacacctatgagctatcattgtttcatcctttggagaactctctgttccaaaatcattggtggtcaatcctctccttttaaataaattattctctcggattcattgaaaggaactgtattgctcttgaagcctcacatataatgctcctcgatttctttgcattttgagggccacattattgctatgtgattgctaatcttccataccttgtagactttactgttgtcattatttgaaccatgttacagtttaggaaaaaagctaattacctcctgaggtcaaatgtttgatacttccagttatccatgtaatgggaggacaggaatgcttttgaataggctggtttttacaaaatcattgcatttctattacagctacctgctctaaaattaataactcactgagtggatggacactcaaaattctaggtgtaatttttataatgattactaatcatttcttaatataagaaatgtattagtcactaactctgtgtgagaccaagtgctaggcactaggaattcaagtaattcagaaaacatcatctctgcactgaaggatctcacaatgtagaatccagtcacattgtggacatgtaaaaatcacatcaaggtcattcattgtgacagatgccacataataagtaaaaagtgaagggcagagtgatttcctagacatctaggagaaaagctgttttcagagcagggtgaataatgatattgagtggcatcttgacaaatggatgggagggttgtgggcagaccatgttaggagggggaggggccaggaggcgttgaacagtttgaccatggtgtgcagtacaacaacagaaatggtagcagaggagactagacgagactgctgggtgtgccatgagcaaacgttagaacttcgtcctgagggcaaaaggcggccagagggttttaagcaatgaaataatatggtcaaatttgtgatatgagtgtgcaagcagagagatcatttcagaggttatgaccgtgttaaagcaagagctgatggaagcagtgacagtgggaatgaaaagaagggaatggattcaacatacaggtaacaagtctagctgagtccttcaaacatttgttcggagtggtagtaattaaggaagagcaagaaatcaaaggcgaccccaactcaggattcattttcaggtaactaggtacatggtgtttctaataaccagcagaaggactgcaggaggaacagcaggttagtactacggtgagtctgagtattatggaagagctctgtaaagataatgagttctcttttgaacatacttagtttggcatgaggtatctaagtgaaggtttcagataaatgattacataaatctggtgctgaggcttagaaataaatatgaaagagtcactagcatagggttcagtcaattttgcattctggctggttgtatttgaggtattacactaaaaatgacagcgacagtgataaataacaaatgatccctctctgaaacctagtaaggaacaaaaccacgattatttatatcttatttttcttatatataaggcatatgaatcttattcatataaattatttattccatgtactaaagctttgccaatacaagctttacttacctttcagacacattattattttaaataactcttttgaccattcttaagattagcaactatcaaataaatgaattactaatatgatacagtttctgattccaaagtataagaataaacagttgattccagctggaaaatcatttagctgaaacattatactttttatcatatcccctttatatcacatttgtgaaggacagatttgttatacttcctgaatcaatgaggatttggcagcacttgtgtcatttgggtagaaagaaagtgttcaaacagagcttttactttttttttaagacagagtctccctctgtcgcccaggctggagtgcagtggcacaatgttggctcactgcaacctccacctcccgggttcaagcgattcttatgtctcagccacctaagtagctgggattacagacgtgcaccaccacacctagctaatttttgtattttcagtagagacaggatatcaccatgttggccaggctggtctcaaactcctgacctccagtgatctgcccacctcagcctcccaaagtgctaggattacagacgtaagccaccgtgctcggccagagcttttacttttgcccctttaaaatagcagctctctttgaaaagtaaatatatcacataagcacagttggcttgtgggtaggaaatgatggttgaaaaaaatgtgtgatgaaaaagtccccatagttaccctaacctcaaattcagaaattctctgacaaaaaaaaaaaaaaatgatgtttctgaagctctgtttaagtaaattatagagattctggaattattgtgtgcaaaaatcattttatgaaactccaagtgaaaagcatgttctgttatttaaatccatagttagctagtagatattcctctggctatcagcccatattttgagcaagtgacatatacaaagaataagctaagagattctgatgtctcttaaggaaacattgaatagacagttcttcagatatgtgcattgaattgttttcacaaccttttataaaatggatgtgcccacataaggcatgcagctatgtatcctgtgatttctacagaatagaaaatgtcaaaccttgttgctggaagtactccaaatgacatcatggttttgttttgtttttgtttttgttttttttctattaccattaaacagggaaggccatggtaaaatttcagtatttgctgtcaaaatggctttagccacattgtgtggagggaagatcatggacaaattaagatgtaagttattattccttgtgtgtctgtttgcttttccttgctaggtaccacccttttctctccctcattcctctatgtcccctccccatttgtatctttcctcattctatgagagttgtttgaaatacatttttcactgatgtttggattttgtcatagcgatattttcatattagataaatgctaatgaaatgaatgttttcctctacttataacctgttgagtatcaccaactggcctctttctgaaattaaagtaaaataagcactctttgcagttaattgtgttatactgccttacacgtggtacaggatgataggcacgtgaaggcttagtgggaaaccttcccctttaaatcttctaaaagcaagactcttggcacatttcctcattcttctcagccagcactgttcaaatcactgggaactccaaaggtttcaaagccaacaatgtcaggaaagaagaataggaattacatagagacagcattggcagagttaactagatgccagtaaaagcatggtagctaaagtacattgagtaattgtgggccttaatgaacattttgtctctaaatatggtagagttccttaaccaacgacacactggggattgtttgtttgtttgtttgtttgctttaggtaaagaaactgagactcagttaaccatatggctaagacgatgccaggatttgaaccctgacttttttttctacacaggtggttcacaaattttagcatacatcagaatcaccttgagggcttcggtaaaacatagatttctgggtcccaccccaagaatttctgactcagtaggcctaggatgagggtgggtgaaaagcatatttatttctaactagtttaaaatgatgttgatgccgctgtttaaatttaaaatttccatttaaccctatccttttccctaaatagtatgagttggggctataatgctgtgttagaaagggcactgtcctgggaattgggagttccaggttgcaagcccagctatgtgactaatttgctgagttatcctttgtcagttacttcacttctttagtcctcagcctccttctgtatcctaaattttgggattttgtaagatacccatagaatcacacctggctgcatgcagccatctgtgtggctcacagcacaaggctcacctgctgcctgtcctcttctgagtgagatcgcttgcttcttgatccacccaaaaggaaagaataaaggaagacacagaacaccttttgttcctttgaaatttccctggagatgctccagggatgagtcattccagtggaccagtaagtaagtgaaagggacaacaaagcctcaggtagccacacagcttccctcacttctgggacttccctccatggagagccaaagacagccaggattcagagaagcctagccagaccttaggaggagccatgtagcttctcttttgttagcctgaaagatatagaaaattaaaaactatctacctcagtgcttatttgagagataatagctaaattagaaggtgctgacaccgagggcttttttttttctttttttttttcaaaaaaaaagaaaaaaaaaaagcttcagagtaatcctcgggcatttccttcagggttaagccagaaagagaaagtttagcaaaatgaaccaaggctaaggaaggaagttctgagaaccttgtctgccaaccccaactggccatttacgaagaggacattagataaatgtaaaaaacaaaacaaaagctaaacaaaaaaatccacttgagagacatctaaaaatacctgtttaatattatattaataggtacctggatagaagggtcccatattaaaataggtttaaggaaatctaagaaaaccagttttctgcatctcagaacgtctgtcaacctttaacataccaggctaattctgagccctcgaagtcctggtgtttgctgtctttccactcagctttgttcagtgtaagatttcatcctcctccaagagtaagggtggagggtgagggaggggggcttggtggaggtgacagtcacaggagtcacatctcactacagaggtccccaagcccttacagctcatcacctaggtggcgtctcagaccaattactaaactaattactggttagagaaaaagtatgacagcaatggccattgtgtaatccactttcacctcctgtgctcagaagggccatccctttccctcaacccatgagcaatccatgaacaaatgtgggtcaaataaagatgaagggaatggctggtaggtaagggactagcaatgtcagcacagttacaaagttcaaaatataactaagttattgattagatctttacaattgtgaaaacccttccagttctctcttgggcccaggagttcaaaggaaacagtataactgctacagtgctttctcctcaccccatcccatcaccctccaaaaagcactctctagtggccaaagtctatcctctttagggcagtgaaagaagcaacaaatgcatgtgtccccttggaggtaaactaagttttctagtctgcagaaacaagcccacaatatcacagattctgtagaaatacagatagtgtgaccccgataaatcgcattccccactttgagagcagtgcacctgaatcacacccttatgtgtccctggttctctgactgaggagtcactctttgtatagttaatcctgggaagatggttttagcagtttccaggtaacttggttaaaatcaatttgaccaaaaacaatttagttaaaggtaatttggtcacaaaaatctctccagaatgttaactagtcaaaaatgaatatcctgagttatgaatatttctagtttctgtgataattattaatggaatgagcgaatgtgggcaaatttacccacaaaatctgcccgcagagaccagtggctgccccttggtgagtgggattgtgggtgttcctattgtattcttttgctggcttgcattttaatgataaaacagataaggtagccaggcatggtggcacatgcctttagtcccagctacccagaaggctgaggcaggagaatcacttgaacccaggaggcagaggttgcgtgagttgagatcacgccactacactgggcaacagagcgagactccatctcaaaaacacaaatcaaaacaaaacaaaacaaaaaaaacaggtaaggtcatgattttctacgttgcttctgtaataagaaaaagtaaaatgaagggatatggaatgtttcaggcttgagggttttgttttcccttctttaaagtttttctaattcacgttaagccaaaatgccagctgtgcttgtttggcaatttttctatttttgtgcatagggttgagagatatttagctcgttccagctactcccttattgttggtgaacacagagcaagaataactggctgaaaataagtcggaaattttaaaaaacaaagagaaagcaacagaaaatttgaagttgattttcttaacgctttaaaatgcattagaagagaaaacaacactatgttgcaacataatttccagtaattagggcaccattcagtggtagggtgttccctgtgtaattccagggagcatcattgacacagcttaggagatgaagggcgccccctgcagtcatgtgccatggcaacctaaacataaacttacctaataacactactattttgtcagattgttcttggcccaattataagctgttttaatgggttggaacatttgtttatacttctgtcttagggctcctggatagttctaaggatcttaagggattctaaatccaatgctgtaagcctggtatgtcatgtgctgttctaaagctttggggaggactttttaagtctttttaaaagactagtattatggaaaatactgcatatttattgagtttctattactgaactggttgttttgcctctacgcctacccatagactttctaacgcactgacctactttaaattcttcagtatctccctcagcatcttctggacacaacctaaactcctcagtacaattcagccataaaaaagaatgaaatcctgtcatttgaggcaacagggatgagcctggaggacattatgttaagtaaaataagtcacgcacggaaagataaatactgcatgttctcactcatatgtgggagctaaaaaaaaaaaactgaactcatggaagtagaattgtgcttattagaggctgggaagggtagggggctgcaggaggttggggggatagggagaggttagctaatggctacaaaattacaactatgtaggaggaatacgttcgagtgttctatagcactgtagggtgactatagttaacaaaattttattgtatattttcaaaaagctggaagagaagatgttgaatattcccaatacaaagaaatgataaatgtttgaaatgaaggtaacgcccattatcctgatgtgatcattacacattgaacacatgtatcaagctatcactctgtagcccataaatatgtacattaatttttttactcagatagaatctctacagtctcatggttaataaactatttgaaacagcggaaaccctttataaatggagtatttaatgaaaatgagagtcaattcatgttctcaaaaccataatccgataaaagcctctgatatgcttaacatctgactttggtgtaaaaacaatgttcccagattatattttgaccttgaaaaattaaacctaaagtgaatagaggtggcacattcacagcagtttatcccagcagctgtgctggcctggtgacaagctagttagcatggtgacaaactatataatagcaaaccctttcattctaatagtgatttgcacagaggaattataaaacaccttgggaaattatgccattaatattcattaaatgcacatagtggcagaaattgaagaacagtggttcagtgaagccataggcccttcagagaaagatccaggaccctgactttacctcattgatcatccacaagaccaggcttcctcttcactacacgagtcagaaaacccttccctgtaaatcaagtgccttccacccagaaaactgtaattcatagaaagttttcttcttctgtaggaagttaatcaagtgtttgtcattacatctttatcctcaccgtgtctttgattttcaaatatcttacaccaaaatccgaaagttttagtgataatataaattggtaaatttctagctagataaatgaatatacgcacaccccaactttatagtaaaactctcattgtgtttcaaatgaagtcagcgtctctctcatatatacaaaaatttctcttgttgagctacatgagagttaatagttgacctcaaaacaaaaatgtagtgtcttattaaagacatttaataagtgtctctctcattaaaatgttaactttacccaaattacttgtgattgctatgtgccagaatcatctacaaaaagaaaccagagaaaacattatgccaggaatatttcagcataaaaattagcttttatattattctttcataaaaaatgtttattttgctacttttttgtcatttgtagcagatatattgaacaaaaacagtggagaatgttcatgtgatgaataatatctttccttttcctttcatcagatattttctcaatgatttctgactccagtggggtgatggtttatggacgatatgaccaattccttcgggaagttctcaaactacccacggcagtttttgaaggtccttcatttggttacacagaacagtcagccagatcctgtttctcccaacaggtaggagaaaaatatgtttaaggaagtatctctttcaaacagtggttgctctccttctagatgtcattccaggtcacagatactcagacaaattattctgtgtgatagcaacctgtattgtatttttcagcctctggcaaatgacctctgagccagtaactaaacccagcacatctggatcacaataatagacagtgtttactgaccatgaggcaggcactgtgctaaattttttcctttcattgtctaatttaatccctacaacaacccttctgtgttagtctcttttcacactgctataaagacatacccgagactgggtaatttataaagaaaagaggtttaacagactcacagttccgcctcaggaaacttacaatcctggtggaaggtgaagggaagcaaagacctaccttcttcacatggcgacaggaaagagaaagaatgaaaagcccaggggaatctgccatttataacaccatcggatctcctgagaactccctcactatcatgaaaacagcatgggggaaccaccccatgatccaatcacctcccaccaggtctctccctcaacacctgggaattacagttcaagatgggattgggtggggacacaaagccttaccatatcacctacaccctcagtgtcattatttttactatcactgcactttcaaaagggcttaattgtctcactcagcctcatgtgaaatatatgcttgacccggcaacaagctttaacattggtttagcaaaggataccagaaaggaatcccaacatctgccacatcatgacctgagaggcccaaaatatggtaaacacagctgcctgaatcttctacagcatgacacatttggggttccaagtgatgtgttttaactgggtatggctcaagctaccctgggaagctgcatagtttagggggctatctatgtgtgtacctctctggtcatgtagagagactccaggcccattctccagcgtagcccagtggtagcatagaaatccatacattaaaggttagtttaccattttttgagaatccaaactaacttttttgtcctctaaaaatgcctcttgactgggtgtggtggctcactcctataatcccaggactttgggaggccgaggctcaggagctcaggagttcaaaaccagtgtgagcaacatagggaaaccccatttctacgaaaaatttttaaaacatagccaggcatggtggtacatgcttgtagtcctagcttctcaggaggctgaggcaggaggatagcttaagcccggatggcgccactgcattccagcctgggcgacagagcaaggccctgtctcaaaaaaaaaaaaaaaggtatatccctgccccataaaatgcatacaacaaatgctcactacacagctttatggattaagagtcaggaagtcttttctttttactgaaattaacttttaaaagtgtcaataggccgggtgaggtggctcactcctgtaagcccagcactttgggaggccaaggcgggcggatcacaaggtcaggagtttgagaccagcctgtccaatatgttgaaaccccgtctctactaaaaatacaaaaattagccgggcatggtggcaggcacctgtagtcccagctagaagcaggagaattgcttgaacccgtgaggcagaggttgcagtgagccaagattgtgccactgcactccagcctgggagacaaagcaagactccatctcaaaaaaaaaaaaaaaaaaaaagtcaatcacttcaaaacacaaatctattttttcattcaattttactgctttccaacttttctcatggcatgctaaatgtatggctccttttatttttacagtgctttatgcctcacaaagtgaattatctgatttatggcttgcaacaaccctgtgacctaacaaggaaaatatgattcttttttaacaatataaagttcatagctagtgagggcagggggctgagtttttaactctggtcttctaattccatctgttaatgttattcttgtgttcttgttgttgttgcttttgttttgtgcactttcagttcatatttacaaatatgcagatgatctgactcaaggaaatgtaactacctgttgtattacttcacccagtcatggaaacaagaataatttcatttataactgaattcttgaattttagttagtgtattatagaataattggtaaatgtgctaatgcctcagaatatatgtctcattcaaaatcagctagaataataggactgggttttaaaaaaaaaatcttaaaaggacctatgctggtgtgatggctcacacagtaatcctagcactgagaggctgaggcaggaggagagcttgagtccagcagttcaagaccagcctggacaacatagtaagatctcatctctgaaaaaaaaaaaaaattaaacaattagccaggtgtggtggcacacacttatagtcccagctacttgggaggctgagatgagaggatccctttagcccaggtgttcaaggttgcagtgagctataattgtgccactgcactccagcctgggcagcagagtgagatcctgtctctaaaagaaaaaaaaaagagaaaaaaggacctatgtgttcaagaattatatgtgatgttgacatgttcaaaattccttttgaaatatcctatagactgttctgttatatgatttatatatatccttaatgataagcaacttatacatgttgaaatcataatagcattgttggaaacttccaggagtgctttttagcaagtatgacaaatagtcaaaatgaataagatcatttcaaatatgaaaagaggtaacacaaaaataataagaccagtttatttttgtacttaatgaattggctattaacagctactcaagagtctgaggtaggtaggaggaggtaggaagacagcttgagaccaggagttagagtccagcctgggcaacataatgagaccccatctttcaagcaaataaataaaatattttaaaaaataaataaataaaattatcccatcccctttgatattctagttcaaaatttcaagtagtgatttttgcatataaatatgtatttttttatttataccattacagtacatgtattaatatagctttcttacttttatcattttgaaagaaacttatagatacaatgcattccttttgtacatccaaaaggacctggatagtgagaaagaagcagactgaattgagaggaattatatataaagtaataaaaggagcaaatttttaaaaatgtagatggttctgtcctaacaggattccctcctgctcttgtataacagaaccattcacattaaccactaaatatttagtacttaaggaagttgaggaagctcagaagggaagttgttctataaatttagaagactgactgacaggaaaattgtagagtgagctatgatgcgttcttgagtaaaattccatggagaatttccattctttattttgcttcattatttttatactgtctttcatatatacaaatgatgctcttggaattgtttttctcctggtgatactattgactcagcctcagtggagagaattcagtcctatgtctgcttaggtataaaaagcaaacgatgttttcagttctaaactagtttaataacacatttggcaagttctgtttcttcagatattagacatttattgagtgctcttttgtttcagtctcaaatgatatgatatttacatagcaggtaaattgagatgattctctgtcctaaatttatggggggtttttttatgcagaaaaaagtcacgttaaatggtttcttggacacgcttatgtcagatcctcccccgcagtgtctggtctggttgcctcttctgcatcgactagcaaatgtggaaaatggtgagtagttactaaggagcaaaggtgattttttaaattattgaaattaggccattagttctacagttagtaagcccaggctgttgttttagggaagcctatttagtggctcttagttttgtttagggtagaactaacccatctccctgttcgggaaggccttaaaggaccactgaaaaattaggactgtcagttccaaaaataaatctcatggtcttcttctcaattacaagtcaggtgtggttaaaagacttggcacgatagaaggcgaacttcaacaaggagtgtgacattattttgtatttgttttagatccgaatttctcatatttgcatacacggtactgattatttcttcccaggcactcagccagaaataggtgggagaaatgagaaaaaaaaatagatgatagcaccctgttaatctttagtcatatgttccagattgtgagctttcaatagttgtacttacgttaaagataagagtaaaataactttcgtatcatgtctttttttaaagcaagtatttctaggataaaaggaactactgttggcatatccagatttaaatatgaaataccatttggggcaaaatttacagaaaattaaacatggagcagttcagtgcctccatctaatctttaggtgttcctacttattgttcaatgtaactctgaaatttctccagacttgacgaggaaataatttagtctctatctcttactgagatttaacttaagtctctatatattactcaacttctgtgtatttctttaatatacattgcagctaaagttagcttaattttaaattatcattcagaatttttagcatctgcccttatttatctgttagttagaagttatgaatttatcctgtttttctcatggagaaaatttaaagaatgaatttattttatttttttgcaatcactaacaatcatagtttttttatgtttatccatatgcagaagcgaagagcaatcaaggtccatgttattatgcaaaatgagttcacgttactgtttacagttctagaactagtcattttccaatcataaagctataatttctttcgttctctctcagcatttcctgctgcaggagatcagtttcttaggcaccatcccagaacagttgtccctagattgaagtcccactctagtctttctcaagagccgggaagaaaggttatgacacttgtttagaagacaatgcgtccagagctagttatgtctttgtttttacactttgctttttatcttcatttattattattttcattgtttttcctgactggttaggccggagaatagctttaccaaaggcaagaattgttattgttgttttagtatctagctcatagcatgtagacaattacttggatttgatcacttaaatctaatattttactttgcttcaaatctagtattttgctttgcctgctttataattcaaatttcctaccaaagaaagttaaccgtctcttgaggcatttgaattatttagaactgttttcagataatttgcacatcttttttagggccctatacacctgcctcaggaaagaaaaaaaaatctgtttgtcagatgtaggcaacaccactcgttaagtaagccattagtcactctattttttaaaaaataacttaattatctcatccacaccagttttccattctctgcccatcttcctttcttttttcttcctctcattctccgtgtctctgatattcgctctcttcccactggacaatcagcattcaccccttgtgcttctgagtcttccagtgagctgtgctggtctcctggagacagagagcagtttggggtaaaggcaagtctgtttggctaatttaaattcttgtaatgtgagagatgggaatagaaagagcaaatggcattacagagatttttgttgttaaaaggacacctcttctccatcccatttcatttcatttccccacaggcatgattgaaaagggttgtaagattccaggaatgaactaaatgtttctctgagcccaaatcaactatcatctgaaatcgtggtgcagagaagaaaggtgcaattcctgtaaggctgtatttttccttcttctggttcatacttttgttttcttggtttttcttcacttacttcccccttagtcttccatccggttgagtgttcctactgccacagtgagagtatgatgggatttcgctaccgatgccaacagtgtcacaattaccagctctgtcaggactgcttctggaggggacatgccggtggttctcatagcaaccagcaccaaatgaaagagtacacgtcatgggtaaggcaaggtccaggcaatacttggagttggatgtgtgagtgttgcccagagttaaagggaatatcaaggatggtggcagaattaaagggcaaacttaccttccatcccaggtctagtattcagtcccccttcctcccactctccaccctactgcgtgctcttacttattctgttggaacccagtgtagcttcctgagatttaaaatataggaagactcaaaactatgttacttcttggaatatagataattcagtactgatttaaataacaactgaatagcaaggaccttctggaacataatcttacattcacagtaagttaaaatcttttccaagttttgttttgtggaaacggcttaaaaattattgttagttttatttttcttagattctggagttcttttaagtgcgtgactagaatattaaagaaacaagtatgagaggagagtgtggacttaataatactgttccattttacttttctgcagagggtggggaggggagattgtggttatattagcaaaccatcttttcatgaagagtgtgagtgaccaacctggcaaaggtggcatgtgagtgtctgtgtgatagatgtattctcaggagcatgtggtaccaggtctgtgggaggaaatgtgactccatgtgctcactgttcaaatggattatgatttactgatgtttatcttcgttaaactcaaagatcagttccagcaatgttgccctcgtgcatctcttcaaggattggtttttgtaaggtgtacagattggttcttgtgggatataccatcagcccttccagcacctcttggaatagttccgtcacaagaaaatccaacctatttatgagtttttctatattttaatatatttcaattcaacctttagtctttacttaaagaagtcttcagaatatacatcttaaatcaaaatgttcttcctaggaattattattgggaaccaatattcagtgtaaatatactagtacttcatcaccggtcagattctgaattcaagcaacagttcttcactaaggaagagtatactgagaacttgccaattccaatgcaactcctcactgttgtttatgtcatgctgaggacagatagatacattaacacggatcatgaactacaacttagtttagaagaaaggagctaaaactttctattttcttattgttagcatattaccagttttcaaacttctaccccatatcctaaaagatttgatgtttgaaaactaatcagatttagttgttttacataaatgctaaatctacataaggagcctctttcttaggggttgtagacctaacattatattccagggcactatctgtacaaagaaggatcagactccttgagaggacagaaggccctgtggtttgtggggcaaagagctgctgttgctgctgtcttaactgttctaagaattacatctcctaacaaaagccagagggatttcttgagcaatgctcttattacttagcttttaaaaaatgaggacaatagtcacttcattatattaccaattatggactctaggtataaaagaaagtgacaaaatttgaaatggtttcttatggaaaggaaaaacatggttaaggttttattattatgttggtgcaaaagcaattgcggtttttgccattactttcaaatggcaaaaaccgcaattgcttttgcaccaacctaatgtatgtggtaggctactttttataaaattttgactgtataacatcaggataaatttcccaacaatctaaacgaagaagaggcagcgtgattctctggaaataacctgaattttaaattctgaagactcagattgaagttccattttcacttctaactggatgtgttcagccacacctgaaacatctttcttgcacctggattcccgcaaaatcttccactcatcttcattccaagcctatttcctcacaaaccattttctgttcttaagtgagagcagtccttctagaatcaggtctgatgctgtcatgcctgtgatgtaaactcttcatggtctgcctctgtcctggggataaagagacagttcttaacaagccatataaagattttgatgatctgcctcctgctttcctccccagaagggctcccttcactgttgctgcttcctccattctcgaatgaccttcccagtctgctgagtttttgtcagaaggattcctgcaggcccattaagtcccagcgcaggtgccccatgcacaatgcctgcttccatttattgtagcatttgctgacactgagcagcaggaggcagcttgttcggaaactcttttccgagcattgagcaaacttccagactcagaatcagcactgaaaaaggatttcttccgtaaatgaatatctattatgaaaagcaaatcatttgataaaatattacataaatattagctgttgtcacttctgccttccttcttctttccagaaatcacctgctaagaagctgactaatgcattaagcaagtccctgagctgtgcttccagccgtgaacctttgcaccccatgttcccagatcagcctgagaagccactcaacttggctcacatcgtgtgagtatccctaccctcccagtatagagacaattttcttcaagggcacatgtctggagccacacaaaagcaatttcctatcagtggtcagcaaccaagatttttaatttagtttaaaaaaaaaagtcagagtaatgccatcataattttttgttgttgttgaggtgtacagtacttccaccaggctggacaagtaaagtatgcaacactaacataattcacctggaggtggaaaatatttcagaaagcttagttataaaatacggatgttagtggtgtctgcacattggaagttaacaatgggatcactgtggtaaaaaatgatttacagtatattattccttaatttcatatgtgctttgagttccaaatataaaagctgtttgttttatttctctgcagacccagtttaagatgccagcaaacctagaaattacttttgtttttcatcccaagctgtataactttagaagaatcatagcctgtgcaggggaaggttgaagagggggagtggcgggaaaatttatcagaatatccatagattcttttcttcaaagtatgtgtgagtttcgtggcagaaggtgttgggccaacaaacagtccttccagccatccctgctacctcccagaagtttcatgcctttgaacctctctcaggcctgggtggccaagataacaagggggcttaggtagaagaaacaattttttccttggtgttacctggggctcataagaagaaagagtctcattacctgcttctatgcacaattagatgtcatgtagtcacagatgcctccttatgaactgcctgtagttttccacacttcagtgggacctatcacaccatagggcctgtgtttgcatgttgacatcaagaggtgggtgacgggacctaccggtataggaattcaacaatgcaaagttcatgcttcaggcagttcagcatatgatccataaggggcactgtggtgggtatgagaccttcgtggaagcagcaactatgttctctgatggaccttagcaaataccaccaaacgatttgtgttgggtcacgtctgtgagctttgtataaatactttggggctttgttttgcttgttcccggggatgctctgaggcatctctgacctcagcagtatacacagcctggaggctcctgtttctcagcttacaagctggcatgggctcagcctccagaaactaatgtaaactaattctgtagaatgtggctagcttatttttggaaattatgtttctataaataagccttaaaataagccaggggtaaataaatctggggaatgtcccaaagggccaaccacttgcagaaatctacctcacagatgcttattaagaaccttattaagatctagactttccttcccataaccaattagacacaatcactaagttgctaatgaatgaccacagcgaagtgagagcagccagtgctccctgagctctgccgagagtaatttcctaccagccctgctgggagtttcaccccaagagagcagccttcaacagagctgctgggtgtcatgaagatagagggtgtgggtgtgaatagcctggctctaagagctttgctgcttcccactcctccaaagaattagaacgtgatgcactgcaacgtaaaagtccatttcacagtgagtcccactggagtattatctagctcagggcctgtacccagtgggtgctaggattgggtggtgtgtgtgtgtgtgtgcacgtgtgtgtctgcatgagagagagaaagagagggagaaagaagtatttaattggctgagtaataatttttacattttgacttacggggcaatataatctgttttgttatttattgaattaactgagggctatagcctcacaatgcgttcttagtttatgttccatggagagattttaaaattctgtacaaaatgtgtcttctgagaaaaacctctatgtattttaccagatcctcaagagtccttgaatcaaaatactgatctctactcactgataacatattttcccaggatgaaagttttaattttaaaatgcaaattgtacaagatatttaattgttgaaataacatacaagacattctggatgtagaatgttaagtctatattagaaaagaattttttttctatttttagccatagaaattttttccatatttgtttctttttcaaatgctattgtcatgagtagatatccatgtcttttttctgagatttctaattttaaaatgcattgctcatttaactattctaaattatcataggcacatcaaggccattgaaatgaaaaaataaatggtattaagccttaatcatttacaaagaagaatgctctcttaatctgctataatgaacatgtacatggaattaatgaatattcacacttcttccaaatgtatgtaaataagattttgataaattagacaaaaatatatgacattccataccatgtcattttataataagcccactacttttatacagtgctgtacaatggaaataagtgaaatttaagaaataaaacacaccaatactcccacctccacttaatgcgcttaatttattactcccaaatatgacttaaattataaaggtcttatgcagaaggaatattgtcatagtgcagaaatgtgtatagtaagacactttatcattgagtctctagcaaaaatcatcctaaaagtatgttccttagaactatacatagcaataaacatgttttctagctatagctctgtcttggtcatcctcattccctctctgatctttccccttgctttactaaataatttattaagcaatctttaattgtagtacaaaccacatctttgtcattctttggatgtagtgtcacaaaaatatcccagtccacatcagttacacccatagataagcttacagacagaggtaagaagggagcagtgagtggggtgcaagcattggcaatattgatgggcatcctctgtcctgtactgatgacctgaggttctggacattgggaattatagcacagactcaaaataaaacatttttttgccactgtgaaaaagtgtgttgattttgtaaattaatacaaattcttcaaagacatattcagaaaaaaattccatgatgtacatgtttaagtgaaggataactgtatgtccttacatagtgctgaaatatgtagaacattatagagctcatggatataaaatttgatgttgaacattatacagtcttcttaaatgcacatcttgctgtttaatgattgtgttaaaaattgctggccaggcacagtggctcacgcctgtaatcccagcacttggggaggctgaggcgggcggatcacgaggtcaggagatcgagaccatcctggttaacacgatgaaaccccgtctgtactaaaaatacaaaaaaaatagccgggcgtggtggtgggcgcctgtagtcccagctactcgggatgctgaggcaggagaatggcgtgaaccagggaggcggaggttgcagtgagccgagatcgcgccaccgcactccagcctaggcgacagagcaagacgccatctcaaaaaaaaaaaaaaattttttttactacatggcacatgtatacctacgtaacaaacctgcaggttctgcacatgtaccccagaacttaaagtaaaataaaaaaaatgctgttagtcctctaatatatattgcatccaaaggtgagcagcaaaagcattataagatacaaataaaattaagaaaataataagtggaaaatgctttatcaatacattagaaaatatttttattactcatttaaaactcaagttccaactttttcttttttcttctttttttattttttgtagaaatagggcctctctatattacccaggctggtctggaactcctaggctgagattacaagtgtgagccaccatacctggccacaacttaaatgtgaaaaaatggcaaaaatatggcacagtctgactatgtaacaagttaacattttacaggtagccttagatacagtaaaaaaaaaaaaaaaaaaaaattaaatcaataggatttttaaacaggttgcggtactaatacacacacatatacacacacatacatacatttgtatatggaaatgaagcatgtgacacacagaaaatgccattttttttttaactatagccaagggactttttttttctacccaccttgtagagaggtgctgccagtcatgaattagtccttaaatagaaatgagcaggtggtgacattttggtattttgacatttgttcttagctattgtattgcttgtaaatattaccatgattaacggtctctattctgttcaattcttcgctgccaaaagtgatacttggtaagtagtgcagtcatttccagtctacttacaaagatgtataatcatgatcataagtggggatgagacacaaaacaagtgagcaatatgaggctagtttagaactaagtcttcttatgctgtacactcagttcacaaggatgccacttatataaaaatgtcctctgtgaagatcttgtccagaaggccattgtgacttactctcttttgtggagctgtttcttttacataaaaccaaatatgttcaaaattcccagtgtgagccatttgttagataaggtaacttgccatttgattgtggaagaaataggaatttcagtccctctgaaaaccatcatttggtgccagagctagccattctttgtccaaagttcaacatttcagtggtagaccttaaacaaagccatttgctgagaaaccttgatttcagctttgtagtgaccagattcaatagaatacatttatcaagctagttaaaaagcattctaaatccacttgttttctcatttttagacagagcaagaaggaaaaatttttaaaaaaagacaaaatcagaagtgtggggtcaagtatttttttcaactctttgcaaagctacaatgaagatattatactctgttcactgttttaaaatctaacagaccaaacttttcataattcacagaggacatttgtataaaattagcatccttcttccaaagtgctagtgttcaactcaaggcagaattagttttaaactagccttgcgttgctcccttatatatcaaagatatgtcttagataagtaatgcaaaacactaagattgttttcagaacttcagttttgtctagagtagataagtagctgttgttttggcttcatccaacagatgacatgtcttacaaaatctcagagtatagtttagcaccagctaccttgaaaaaagttttgatgaatttgttattttttatttttttatttttatttttccataagttattggggtacaggtggcatttggttcatgagtaagttctttagtggtgatttgtgagattttggtgcacccatcactcgagcagtatacactgtaccatatttgtgatcttttatccctaaccccagagacttattctaagtctcaatgaatttttgcatgtagtattgacattttaaagcctgcagagcttcaggtccattccattcaatacattgggatatgcaagtctacctttttcccagaatgtcttcattgtagaatccaaagctgttctctaaggtaaaaattaaaccatttacaaatttggatcttaattatgccaatataaattgattctttaggctgctataattaatgtctcatcttcaaaacgttctatactgtcaaactcaaatatagaattatagtgaaactgaaatttcctctgattcagaaaatgctccacctcattttccatcttttgaactctaagtcccatctcatattaccattcattatcctatattgaacctaaaaaagggtaaaaatggcttggagatgagatagggatcttagccctatcattttacctgaactaaaacattcatgatggggaaagaatgacagaatgaaatgaaaatcagatgaaggaagacagactccatgcagttggtgtgtagaaccatgaacaattctgaggaaaattgaattctgttttccttctcttatcataagaaaacaagtgaagcttatgggatgctgtacaccacatactctatcatatggatcacccaaacaacagaaactaacttcatatatccttgtggagcttacttgcatcttcacttagaacaaaggcaaataaggtatgatatgattttacagcctgtgtcctttcagaccaggcatgttggagaggcccatcatcatggagaacacagaaggaacctttcaaagcctcaggaatcttcctctttccaagagaatatagattcaatgatcaggtcttcaaggcttcttgagaaggcagtagaagtaaagccactaccttcttcaaaatccttgcttcattccagaatattatacaatgaaacatcaaggctcaaagctcatgcatcagtattcacatggtgtctggagatcttcctcccagtgtttacctgagattatatattctcaaggaaatgtaactttaaaacacttaaggaatttaattggaaaatataagatttcttgttgatcctgggaaaggtagaacccagatcttcccatcccgtttcctggagggatgagggagagttttaaatttgtgacttttatttgttttaactttccattcaccctgtgttttgttttaggcctcccagacctgtaaccagcatgaacgacaccctgttctcccactctgttccctcctcaggaagtccttttattaccaggaggtaagttccaaccctattataaaataagccctttctttggtaatgagccttgattctgtggtaagaaaaatattctcatgcaagccaagggcagaatattgttactagaaactaacttgcaaatatccattataagttttcaatttcattcatttgtatgcatttaaagaggggtagggtggctttggggattaatgtcatgtctggaaacctgcatttataatttacccacagtaagaatgtgagggtatgtttcagttttactactgacacacatgcatcccatctcattaaggaagtcacgttcatagtcctcagagttgaagtcaaagaactggaatttcaggatgcaatggtgtgttactatataaatggtgaaatgtgtcattatttaaagctaagatacaaaagaatcctttgttggtgaaccctggagttcctgaggctagaggataaagaccaaacttggaaatgtagtttccatataagtaatttcacgataataataagaacttttttaaaaggtggatctgcatctcatttctttgcacaagatccattgccatgtgagcaagaaacaggagaagcaaatatttctctaagagttagcatcagacatatgcagggtcaagaggtgctctgagtcatttgatcaaatattgcaaatcaagcaccagataattattttataaatacatggagaaggctcacgggaaagcaaaaacaaaggtaaggaaaattggagtgagtaattgaacataagatttcaaatgcctttcagcagaaaaaaagtacagcctcatatttcacaaaatgcacataattcatcttttccctgaagaggtttataaggtgccagtttcactgtaatatcctggtacattcaactgaggatttgaagacaatgagactaagaacacagctgattttttttcctctgagttcctgtatgtgcccatcaacaggaacctgagatgaagatgttccccataattgtaattagcagaataaacagaatatggcagaaaatggggtttctgatgtataaacgaggtctgtaacaagtggaaataaggaaacagttatacagcagaacatccacagtaaaataatatggtttaggccctcagtaacttccttttagcactcttttttagaatcaccagcaaatgcaaccattttttttttctggaatgaaatcataaactgtaaaatctgtaaaagacacaggtctgtgcatctatctagggaagacctgatgtgatgtttagaaatatgtacttttattaggaagctctgcattctgcaaatatcaagcagaggtagaccccatccttactgaaggtcattttatatcatttcagctcggacggtgcttttggtggatgcgtctagatggataacatgacttcttctaccctaaaatattcctataatactttgagctgttctggttcctccagggtgcatggtacccattaacccaaaatatgattatttcccttttttcccattttcagtcattttggaatgttctctgtgaaccacagttgtgttgtttaaagctcacatttctttctgtcaccacagagattggcctacggtttctgttttgagggtgctgttcaataaagctgtgtacactaaatgtctttcctctctgagtgggccttgctctgtccatgggaagttttaatgaggtctcattgtttgactccctcaggttacctgagggaataagtgcatccagccctgtggctgaagagcattccctcataaagctgtacgtaaatcagcttgatcacggtgcacggtcagtatcccagccctgaattgctaatcgtagtagtagttccatagctagactgataagtcattctactctggcactaaaatcctctcatagtacgtcttattggagatagaggtcttctggggtttaatgaaattgtgttgagacttttcaacttgagctggactttgcagctctttcctctcctttccacatattttatggatttcatagcctcataccggtatataagagatgtatatatgtgaaatgtatcaagctggatcttgtttggacaagtctctgcttttgtacaatttgcaaaaaacccagatggtaatttctaagactcttgaattaaggagtctgttggaaagatctttagcattaactaggtgaggctaggacaatgtcatgtagctggacctctttgcagttaaagacttgaggacttgtacctttctgtcctattggacctggtccattttccccccagggagggaagtctgattcctaatgaagtaacaatttcaaaaacagtttcttgctctctgtgcttattctctatcacttgataatgctggtggtgaatcacttttgttttcttaatcgtgtcgataaactaagatggatagaaatctatcatgccagatgtaggcaaaagttaaaggttctatacttctatcattgaaacagaaccaaagaaatatgacctatggctctgccctcacccctagcccatcccaacaatgaaataaaacctaagcaagccaagtatagtgccagtcagtatagggcagcaccgagaaagtagagaagttctccatattttatttagcctaagtttagtcttttgtatcatgacagatcctagaaagataaagctgaatgaggctgaattgaaatccccactccagaatcctcaccacaaactcctggcattattcacctagggcccttcacaagcataccactttgatcttcaaaagacacagggatataactttgaagtcttttgacatcctagtaatctacttcacacagatttatgagtgtgtacctctggttaccagcatcatctgtcgcattccctgttcttacatcttttctagctctgtacttgattcacttttcccttacttaaaagaaaaaaaaagcgattctcaaaggcactctcccttggtccttcgaagtcttcttacatgtgtgtatgtctatgtgtgtgtgcacgtgtgcacatgtgtacattcagtgttggtcagaagttaggtagaatgtgggtcatataacataattgatggaccgattcacttcattcattttcttgattgtaaactgtatccctaatctattttgttttcttataaatttatgggaaagaatggctgatttgatggaaatctattatcaccactggggaaagagctctaagagctatgtatggtgagccagcaacattatctaagcttatgaaagttagtgtattattattattattgcagatattattgcaaggactgaccacaaagccaggtcccaaaggctctttctccccttcactgcccacagctctgtgcctcttaggatctgctatcttctttggcatcatgcctcctttttaaaatcttaattatcttgccataatcattacttagtttacatgagaaagttaaccaatactttttaatgtcaagtaagcttctttcactatggtcaagcttcttcattagtcagagtaaagactaatgaaaaaattagtcacacttcttttacctccaattttagaaacatcatttaaaggtttcacaggtattttcatagttgcaacctctaaagtggtaagcactcacaaaaggaatcaccttgactattctatataacatctagccaggtcttatcactccaccaaatattaggaaattgcttacaattcatatagcatgttgaacacaatctaatgtgctagtttctggtttgctgcaataacaagtagttaattaatcatattgtattagatggccgggcaaggtggctcacgcctgtaatcccagcaatttgggaggctgaggtgagcagatcacctgaggtcaggagtttgagaccagcctggccaatgtggtgaaactccatctctactaaaaatacaaaagttggccaggcacagtggcgggtgcctgtaatcccagctactcaggaggctgaggcaggagaataacttgaacctaggaggcagaggttgtggtgagccgagatcgtgccattgcactccagccgggacaacaagggtgaaaatccatctcaaaaaaataaaaaatgatactgtattaggctctgtagttcctatagggagagtgcacccaccccagatacttcccaaatcctgatccctccaagaggagcagaaattgtgagttattttttgggttgacttgttggtcaggtgattgataggtttgggttttcaaccaaagaaatgctaattcactgtgcctttttcatttttaaaaaatatttttgcttacccaaagattctttacttaacaaccgtggcttttaatctgactcaaaaagttcaagctaaattttaaatagttgtgatttgatcatcaaaagtagctaaaaataaattttggatactgattgtagcctctccttttgaaaatcaaagttttcttcatagctaattttttctaagattaatgcccatccattttcagtcataaaatagataaatttgtaaatcaacatctggcaccaccctgaagatttctcattcttttcaaactttctgggcatgttgtatgaaattttatgaagttgaaataatcactctctgcagataattctttacttcatgtagtcccagagctctactaatatgttagatctttccaaactggaattacaccagtctacacatcaaccctaataattttctatactatgcatcattaaaaccacagtcacctctcttgttcagttcagtaacctttactctcctactagagttgctttggctgttgtctctgcatgccctataccaagcaaactttcctagaggctctcctgacaaaagtgcaattgctgtgacttgatgatacctgggtacaatgtagtaaattaaatatgacctaagaattcttattttttccatggtacctgtttgagatggttgaacttctatgccagcctgaattgatgacagctaattttcccactgagacactaacctattttttaatactggtctatgaattttcaggtaatacatattttatatttcagatgtaagctattgaaatctagaaaaaaagaaacaatgtttcaagacattacttcttgacaaaacagatttctggatttttttattatatttaagttagtgtgatggcctcattactagactataattctagtgagaaggaaaattttatacactatagatagttacttaaggaggcagccaactttataagtcattcttcacaaatccaaatgtcatacaagcttattaataatttaagaatcaatagaaatgaaaatatctgttcttaatttgctatatttcaaatattgtttttcttttaaccattgcgataattattctatattaatataatttgtttctataatatttgttctctgtgagactgcagccaggcctttaatatcatgttcaataaaagaaaaaataatctttgtcaagggctaatatagtaactcaacattagcagaagtggtttttaaaaatatatttcaggtatccaggaagcatctgtgtgtgattttgttacctttggacccaccccctaaatattttcactgaagtaaaattattggcatcagtcgtcacccttcaaagctaaggggataatttttttaataagtatgaaacattttgagattgttctacttttccagaacccattgtgtcactgtgtgtgtgtgtgtgtgtgtgtgtgtgtgtgagaaaaattttggaaggttatttatctctagatatgctgctttccaaaggtctaaaaaggaagtggtgagaagccagaggatttttgttagaaaaacaaagtctgaaggaatatttcctgccttttttctttcagcagatatatgaacttcaaaatttaccatgccatgccctcaaaggtatggctgttcccacaaccatcagtgataatatgtatgtgaaaggatgtgctcatacagtggcaagggattagtgaaaagaaaaagatggcgataagaaaaagagatttgtgtgcacatgattttagaaatgatagtcttgcttctctttgaaactcagattagaaaaggtgtatcccatggtcaagttgaatgccaaatagttctcagtttcggagcttaaaaggaagaatgcattctgatttgaagacaaggcatgtagaacagaagcagctttaatgaagctcagtctgggttgtatgaaagccattgtcacattctgacacaatgatatgctggaagcactctttccttagtcaggaagtaggttccattgtacctgatcccaaatcccacaaagaattagaaacttaatttctccatgcaaacttccaagctacaaaatcaaagtttagaatctaaattagtccataaaatattgtgataatatagcaccttgaagggatcataataagccacacatcattactgttttagtccctttatgttgctgtaaaggaatgccagaggctgggtaactgataaagaaaagaggttgaggctgggcacggtggctcacgcttgtaattccagcactttgggaggcgacggcaggtagatcgcctgaggtcaggagtttgagaccagcctggccaacatggtgaaaccctgtctctattaaaaatacaaaaaaaaaaaattagctgggtgtggtggtgggtgcctgtaatcccagctactcaggaggctgagacagaagaatcgcttgaacccaggaggcggaggttgcagtgagccaagatcgcaccattgcactccagcctgggcaacaagagtgaaactccgtctcaaaaaaaaaaaagaggtttatttggctcatggttctgcaggctgtacgtgaagcatggcatcagcatctgcttctggtgagacttcaggctgcttccacttatgacagaaggcaaagggaagctggtttgtgccaagatcacatgaggagagaggaagcaagccacagacaagaggtgccaggctacttttaacaaccagccctcaagggaactaatagagtgagacctcactcattgctgtgagaatggcaccaagccattcatgagggatctacccccataacccaaacacctcccattaggacctatttccaacattgaggatcaaatttcaacatgaagtttggaggggtcaaatattcaaaccatagcaatcactattttcacagcaactcaagagaaaaaatttcactttgctgcctctcttcaagcttggaagctggagaagaggttctggtggaaagtacttcaagtgaaaagactttaaagacacaagttttaagtgaaacctgtctcccagtcaactctcgaggttcttgattcatttcattttgaaagagtggctatttttgtcttgttttcatcatgcatttggcctcctctgtacatagtcatatttttggcttcctggaaacagatgatgagaagaagaatttgaggctagctctagaaattacagaaactatgtgaacagtgagtatcaaaaagttagaagtgcttctggcactagaaattaagagctatagcaaaacaaaatagtttatttccagaaactcatgtatgttcacggtgtaactcccatattttccaagaattattttttctaagaattcacatgggaaaggaacggaagataaaaggttttaaactatttctttaaaccaacactggcaagggccaacacaaagaaaatgacaacaaaagttaagagatgtatatatatagaatatgtctcattcctttgagggaagaagggacctggttagaagaaggaagaaaaggaagaggagaggagaggagagacaggcaagtggagtagaggaaggaggagaggagcccaaagatttgaagaaaaaaaaaaggagaaggccaccaaaggaaagtccggcctatcgcccccttctctcagccctacctgtacacagtactgaggctagggctcctccatgcttgggctttgtcagtgatgggtggtggagccacatttctgggccttcactgacacatcttcctcccatagaagttcaccagaataatttgtggcaaacacatctttgtggttgacgttcctgtgtttcttttctctactgattcttgcttgttatcttgcatgttcagcatgagaggttgtccctgtgcaattattcggctgtttgcttaagaaattattgccacaatttctgagattcaaagaacaaagaagcataagaaggcagggagatactttagtttggagggaagaatcatggatgtttcacacagtgttttgaatggttttgcaagcatctgaaataaattatgtaatagattcatctatctttagttacaaaaaagaattggggggatattgggcagcaggggtactgtaggtactgcataatgaatgtatggagatctgcttcagtagacaaagtctggaatgcagttttggtggggtaactgtacatcacagaaaacagaaacagttttggtggtataatggtacatcagaaaatgatggctgaaggtggttatttggccctgatgggcaggtttcacagttttaaaaggaaaacatcaatatgctggaaaaagaaagttattgaggtcatcaggaaagtaaattatcctaaaacacaatctaatttatttttaaagtcaattttgggccgagcacggtggctcacacctgtaattccagcactttgggaggccgaggggggcagatcacttgaggtcgggagttcgagaccagccaacatggtgaaaccccatctctactaaaaattcaaaaattagccaggtgtggtggcgcatgcctgtaatcccaactactcgggaggctgaggcaggagaatcacttgaaccttgaaggcagaggttgcagtgagccaagatctcaccactgcactccagcctgtgcaacagagcgagactctgtctcaaaaaaaaaaaaaaaaaaaaaggtcaattttgttgggtacagttgaactttttaagtacagcaatactttatataacagatgcctttctgaagagctgagtgaaaatgtcattcatctgacaaacatgcatgtctactctttgctagtcattttctttacaaatcaaatttaatattaaatttatcagatacctcactattcaaggaatcttttaatatacactattataaagcaagaattccaactataatgtgcatagttctaatgtgttatgtataaatttatattttttagtacttcatggcctgaaagaatggtgctttatagtagagccctaaaacttgtagtacaaagtttttaagattttaactaatttataaaccattatatatatatttagtagatttagagtttcttgaaaatttttggtggaacctcataatttagatcccaatagttaaatatttggtattcaaacaaagacagacaatttatttttctattttccatgaagaaggagagggacaattttagattcaccagtgtgcaggacaaattcttacttaacctatagaggagcaaactttcttcaaacacattaccaatacaattgtaatactaagaatcaataccatagttctcgatgtagcatgactacaaattgtcacagtagattttggatgactttaccatagccacacttaatgaattattatttatatttctatttgtactttaataaaactatattttaaactttaaaattgtcatttaaattactaaagaaaatgagtagttcccataatgaatccataatgttaagaatttgctttagcaatgagactatattcactagctttgtattaatataaacataagaaataacaatatatatgtataagactcaaaggtgtatttctctgttcctctgaaaattttctttgtagctccacagccaagatcatgtggcttttgcttggagtagtaaaacacttctaatatgaagcaatctctagctaggtaattttcaagtctttctatccagaacagaaagttggaggatgtagggaaggctaagttcttgagtgggatctaaaggctggcaggacttagtgaactattggactgtttacatgatatgccatgataaatgttgaatgaattttcattatgtctagacatactcaatataaatgcttgcttgttaagcaaatagcagaggtcaaatctgggatcatggtgattgcgattgtggttctcaggctgggtttctattcctacttgaagtctgtggaaatctgaaaacatcttgaacatttcaaaataataagagatctgtctaaatgaaacttggatctagacttgggagtgtctgttgccagtttctattcttgaatgcattgccgtgtttacgctcttcttggctttcccatcttattaactagctctcctcccaaggacagtgaagtagagcagaacaaactgctggctagggctgctccagcttttctgaagggcaaagggtaagttacagccagagtgtactggaaccctgcattaactaaactaaaaatggagatttcttttgtcaaaaatgctttgtgtgtgaaagactgtctttgattcagtaaaagcagctctgctttaacccagttaacagcactaagtagttatttccagtagacacatctgtgttgttattcactttcccgaatttgtgtccttttcttttttgaaatgactaagctgaagactcgattttctgaaggatatttaatctttgcttgcaaccaatttcaatgtatttactctacagatgaataccttggccttagtggttgaaaaatgtaaatctgttttctaaaactttatttaacctaaatggaagtctttatttttaaagttagtgaaatcgaattgtggatttcattgcctggatttcacttgtgtttttcatagcacatcacttactacccttcctttacctgcttggttttctaaatgccttttctaccaaaaactcactcctacctcctctacttatttctgtccacctctcttaacaacacgctttctttccccctgccctgtttcaggatacagtacagcctgaatgtggcagacaggctagctgatgaacatgttctcatcgggttgtatgtcaacatgctccggaacaacccctcatggttagtgcaggtttggctgcttgactgtccttagagagggatacagtctgagctggtgacaagcagtctcagcaaggagcaaggtcactggatgccagtggtgacactgaagcactgttaactggttcagttaagaagtctctcgtgatgttagtttggatacttcccatgaaggaaccataggattcatatccttgtttatatattagctaaaacgaaaacttgcataaagggatgccttgctaaatattagccttcaggtagattcaggactccgggtcccaccaatcagttctgtgctacgtgtcatgtcaaattaccacaggatggtgataaaagaatttgtcttattccaaggacatggatgtctctgctgatttggaaaacaatgcttcattttacttaagagtgaaaaagagaaaatgcgatgtgattgaatcacaaaatggaaatcatttctttaacaatgataacagtgggaacaatcgtctttcagcaattctattacacatttttctgatgaccatcctgctaaagcctgctttcacatcttggaatacacaaaacttagtttcagatatgttaaattcaggaattaagatagccctgtgtacttggataaagccattcaaaaggcttttctccattttcattgtgacataggagactccttccattggttaaagttacttgatattaataataaatgtggatttgcagcttgaattaaaggaaaaggacaaactatgtatcatatgtatttttcaatctagttcagactattgttttataaacatatttagcaaaccaattccttgaaaatatgtcaatttttctcaaccacttcaattttctctcaattaagggcccatggattttccatagttacaattattaagaaagccaatgggttcaatttccattaaaatgtttcaaacctttagcatggcaagtcctctttcctctactattagaggaaaagtaattggcaaaattaatggcaattacattaaaagtgatgacaaaaactgcaattacttttgcaccaacctagtatttcaccaaggcattcctcagatgctaggccattgctccatgctccttgccctcaccacttgatgttattagccgctttgtttctgaacctctttcctcctcacttgagtattttcaaaattttcttcctattactgcttcttagatctatttttgcaagattaatacatgagataatttttagttctcatgaactgatgaacatttatgtgctttagtacatacatgtatcttaatttgtatttttaaaaatgtataaccagtacactagtttaattttaccttagatcctactgtttaaggggataaaaatgcactctttggctgacgtaaatccatctctttcttcaaattttgtgagcttctagattaaatagtatccactttttcacaactcaggctctcaaaactacaaaattgctttattcccaaggagtttggtactccagtgttacatggtagctgaagcagtagaactaagcattgaatttttttttaattgtattggtcatctttgaagaagaatacagtcagtgtagattcaattgtaagactatgatgcgatctcacatcatgtcctcttcccataattctaagcacactccagttatttctactgctcttctttgaccttttcttaattaaggttgttaacaaagaaatctccaaagagaaaagctcagagtttgtcactaccagccattttccctactcaagtgattaatcatattgacttgatggttacttaagaccataaatctgtctcagcagagacaccttgcgtctgcctgatgaaagctaaatgtgatttgtattttgaaaacaaagcagaatttaaggccaaccaatcaatgaaggaggctttgttttaatagctgcaccctccatatttctcatagttttttctatccttaaaaaattccaacttctttttcaaatttctcattttttcttcccttttctttatgtttaattagatcccaacaattcctcatacctgtcatggttctataagtaatgtaatgacctcttacctcctttaacatcattgtagctacaatgctttaccatcattaagttacagtgagacatataataatagtaataataatagtaagtgtttttaaaacacttacctcatgccaagctctatgttcagagccttgtatacataatttctcctagtccttaaagtaagcccatggagtaaataagatcatcccccttttatagacaagtaaaggtatcattttagagagcttacctgactctcccttagtcccacagctataaaaagtggggcagagattttaaccattatccatccaagttcataaccactgtgtttcatcacctcttttaaaatctgcatcaacacacgcctttcaggatcttttgtggatgcctccttcacactgcatcctccacgtatttactgaaactgtatatcttattctagtgtttttatttgattttagcaaatattttgagcacatactagtaacaggaatggtgattcttaacaagttaccttttatgtatgtagttccttgagttgtgacttctcatgttaattgtaagcttcaaaaagggcaagagttttgtcttcagtctcttttatcttattacaacagctggagtaagaataataaattttgtatttatgaaatgctccaaaaattacaaagcctttttccacacattatttaatttacttctcatagtcctagaaggttggatatgattatttccatttcactgtttaaaaaatatgagctttgagacattaagtgacttatccaaagtcacatgctagtaagggcttgcaaacaggtcttatgacactggttcccatctattttccaccccattccttggcctctagctgttctccatcaaaagctttgtttttgccattattcagacctaatcctgattaactctgtgtgggggtcttctaccctatattaactacttaacacactgggaaactgacttatttgtaatagtttgctgctaaagaaacacttatgtcattgctggttctgtcagataagtcaaataaataaactgcagctcaagggagaatttctgcttccttcctaattcaatgaagttttaaaagccttaataatttgtatgcaccttcctcattgcaggagaaggagtctgaaatgtgatacagtgtgggcttttactaccctcccccaaagcttgtcaaattcctgggcttgctagtttataccaaggtctgtagtagaccaaccaaatgatttgaaaccagcccagaacttctacctctaacattgtcacttgattagactcctgatgtcatatgactaggttaaaattgttctgcttatatttttctcaagtacaagaaagtgtacatttgtgttgtcaatagatttcttgttaagtggattaataatccatctagtttaaaattgctccacaatattttatgctttgggaaaaaagacatctaagaatgcctatttcagaatttcatttatgaggtctaaatttttattagcttgcatgcttagaactctttaatagattcctattggacctagtttacaacccagacccctcaccatggtgtacaaacctgcatgtgacttagcccttgcctactcctttctcagcctcagatctcatggggttctcccattcaatcactacatttagtcatgtcaatttttgatcaattcctccaacgaaccaagctctttcctgcctcaagactccaatactagttctcccctctgtctagaacattctttcccatttcacccctactatatgcacatgaacttgcttgtctagcttccaatcttagattaaagacacctcccccagtaggtcctctatattagtctctattatagcatactatttttattttcttcttatcagctgcagtcattgtttggttggttagttggttagctgtttggctggttagctcattggttggttggttggctgactggttagttggttggttggtggctggttggttggcttactatttactgtatcttcagtggggcagggaccctctccaacttgttcaccaccttatctctgacatctagcacagtgccaggcacatagtaggtgctcaataaacatctgttgatattgtagaatatcagtagtgcagtagctaaaaaaattccatcttcccctaaacaaagttgttaggagtagtcagaaactttactagcaaaattagaatttttactatttaaaaaaatcactattatagagtagcacttaaattgaacatttagtataggagtataaaatagatgaaaaattaaagtattaagctttgtgtagtggtagacatgggcaaagataagcaccagcaattcactgatgtgaacagagcaactaatagggcattctaaaatttttttaaaaacttaaagtgataattgggcaagaatttttttttaattttaatgcccccctagattcttcatctttgtattagtttgctaagaatgccaaagcaaaatgccatagacttgatggcttgaacaacagaaatttattttctcactgttctggaggctggaagtccaagactaaggtgccagcagggttggtttctcctgtccttgacttgcagatggacaccttcctgctgtgtccgcaaataaccttttttctctaccctagtgtctcttcctttccttaaaagaacagcagtcctatgagattagggccccacactatgacctcatttaactgtaattaaaggccctatctccaaatatagtcacattctaaggtactgagggtattcatatgctttagcatatgaatactgggggagacacaattgaatccataacccacttccccactgaatccactgaattgtatgcctttaatatttttaatgtgtaggtcaagatttgactgactctttttagtacattttgttgattttgaaaaatgtgagtttattgcaatctgttgaaagaaaaaagaaattataatctgttgaaagaaaaaagaagagttacctacacttactgacagtgtctcttttatatgagttttcatttcctgttaacacgactccttttgtttagtaaaatttttaggaacttcaattatagaactggacttctgagaaagatatttccttagaatcctggaaatataaatctaaagactgtcacatcaggaacagttggagtagaaggaaatggaggagtctgagagtttttagaagatagaatgcatgacctcaactgtaacatagggggttgttgaagtcagggtctcaataaaggagtttaaaggtctcctttaaggaagccattattgtggtaaattcttattgttatccatgaagattgccatttcatgatttcctgtctttttttgttgttattccaaaccactcacaaagggccactacactaagctttgagagttagtttctttccccattcttcagtactgtaaaaccatttctcggtccccagtgtcactttgttcctttctaccctgactctcttgagctcactgacttctaaatgccaaaaaaaagtgctctattcccttagcattttgctctaaaccaactgccaaagatagagaataatctaataaagcaatcttccatttgagttaactaatcctcttaatagaagagtagtacatgaaactcgatggccttctaaattaatttctagtgataaaattcccatcactagccagagtagtagaaaaaatatgaaaagaaaatatagaagcatttatatatgcttttgcttttgcatttatatatgctatatgctttggatcacagtattttctggttgactaccctaacttagaaagcagaacaggcccagaaaaaaatcaaaagaatgtgaacaaaccgtgagttcccaaaaatctttgctaaatcacactttcataagccctagctcagctggggccacttgagtttcctggaatgccattttgaaatcactggcaacagacactggccatgcatttcgggtagaatgtggagggctttcaaaataatggattttcctgctctgaaatgccgtcaacactgcaatcacttgttaattcatcatagtcttgtagcaagattactgattataaagtcctgaaatgaatagctagggctggagaaagtgttggaattggtatttattttaatgatttagggattgttgatcattcattttcaactatttgtaattgaagtcttgaaatagaggaatttatcagaagaatgcctccttcacccttgtataatttgaacatactgaaatggcattatgtggacccataaattgttcatgtgcacaaaggggtaatattatcacacaggccctcattcactcagtgctgggggaggaaaggcatggacgtatgagttatcacttgctatacagaatcctatatcttcacgtcttacatttccaggaggctttttaaaaatataaccttcatattacttacactagctagtcattcattttaaaagatacttttatcagaagtttttatcaagatttttaaaattatttatttatttatcaaaatacaaatgtttctgacaaagtcactttcaaggtgtcaaagatatcatgttcctgggcctggagcaatggggttatccgcaaaacactgtgttgaattagatgtatagcccctaatacatgagccagaaatgataaacatgttaaaatcaaattcagttgtctctttgtggggtagtttgacgtcgaaagaaaagacagtgtaactttctctttttcattgaagctgtaataaagaatttagttattatttttaaccattgcagaatgcagacattattttataaagacagacatctgctttaaagcatcagttttccagagataattctgcctttgctattaaaattattttcttactccaaatctaaacttgtgtaatgaataaaatctcaatccactgggattgatactaaacattatgtaagccgtatatcctacaattttctgtcttaagggaatgtttataacatatcacacatgctgtatgggtatctgttaaatactcttgaacaactctctcttttatatcgtttatatttaggtttcatttcacgtatttgtgtcttccattttgttttcgagatcttctagatccttgatactcagtgttgaaccagtacactggaccaatattatcgacatttcttggaagcttgttagaaatgcatcttctcaggtcccaccctcccaacctcccctaccctaccaccacagaaccagaaactgcattttcacaagatccctaggtgatatgcttacactttaaaatttgaaaagcactgctctagataattgtcagatggtagatgatattttgaaggggatgaggattactaatggatatgaacatgttatttaaaaggcaaaataataataacattatattaactaatatttttgagcacctcatgtgttccaggcatcacactcttttgatgctttttgcatacattatctcatttgagcaaaaggaaagagaagcctctttttctgaggagggagaaatcagttgttagataaggaaattcaggaatgttctagttatttattatagctcagagaaaagggctaagtctagagtggaagtattcatattaaaacagctatagcttatatatgcaaggggtgtaggctagagcagagataatgtagacaggaatgtcttatgaatgaccagaaaaaaaaaacaaacctgttatatagtggattcagctaaccagacaagagctatttggaagtgacatagccaaaatgctggaagaacataattactttcactcatcttctcacttcagaacaaaggttaaaacactatgtttcatgtttactctatttgtaaatgtacatataatagtatgttactttatatggatccaagtgattgcaatgaataattcttacaaccttaatattggcataagagggtgtctttacaatatgtatttatgagttaatttctttaaggaagagccgtaagtataagaactgatgcagaagaatataagtatgtttatgaatgagaggaactagtttctgatcttgattctgaactgatacataccacaataaccaataagccaaactacaaccaactagtttgttaacaagattagtgctattggtatgtttcatagaattatttttaatggcacccaaaacttagtcttgaatggagcacttcacagaatgaagttttctgaaatatggaagaattagtaacgcttctatttgcattagtttttagggactcagatcatccttattctagtatgaacagtttctgtaaatttataggaggcactaaaaaattccattaaggtcattgggagtcactactaaaattctgtttctctgaaagtaaatataaaaggcaggttataaataagtagtaatattatagatgagacttgtattagttaccttatgctgcataacaaattatcccaaaagttagtagcttaaaataacaaacatttatcatctcagaatttctgtaggttgagaatccaggtttggcttagctaagtccctctggttcaaggcttctgtgaggttgcaatcaagatgtcacttaaggctgtgatctcatctgaaggctctaccagtggggatccattcacatggtaattggcttgcttgggtttctcatcacctaggtctttccataaaggctgctttatgacctgacagctattttcccaccaaacagaccaagagagctaaagagaaaacaagcaagtccaagatggaagccatggtctttttataatctcatcttggaagtgacattccattccttctgccatatgctattcattagaagcagattagtaagtctagcccatcctaaaggggaggaaattacatgagaatgtaataccagcaggtagggatcactggacattgaccacaatgatgtttttctttcttcttgctttcctattttctaacatgtcaattttggacatgtgttacttgtgtaaaaaggaaagaaaaaatgttaaaggcaataaaagtaagagaaattcttctgatcagatgtattgatcagaatagtcacctctctgtgaggctttcttagtaagacaattgaattgactgaagacaggatttattaatgaccttcccgactatatattagatcatgttacaaattcaagtctgagattgttattctaacagggttttgtgtagtttgcaaatcttttgcaccaaaacattgaaatagtaaaaactccttgtggtaaaatgactgcagcaatctttctcagttgcctaacggtctccttcttgctttgttcttaatagcatgcttgagagttcaaaccggcttgatgaagaacacaggctaattgccaggtatgcggcaaggctggcagcagagtcctcttcgtctgtaagtagttggagtaaaaggattcgtctgttggcatctgggatccttgaattttatatgtcatgtttattgttattatagctggtgctgattaccaggacaatttgtgctaatttattgtgcatgtgtttgttgctaagtttgtggtgtcttggtggtgaatttacagtttaaaaatggaagacttgaggaacaaaaccatccacagtagtgtgaccctggagtcaagctggaatcctcgcatcccccttcattcagtgtcaaccccatatgaagtcccaaggaagggggcaaggactggttgtgattcctttatttaaagcaggtgtggttagtgaaggcactaagtttaaggcagagtagttgcaagtgacacttaaaatataccagtagaaataatagagctatagctttctccatttgtgtcagtctctaagacaaaagcaactgtcagctcaacacattgattcagaattcatctgtgctgactaagggtgagttgctattagtgcgtcacaaaggacaaagagtggcaggggagcaagtgaggaagctgttgcctgcacctctcacatcagatgttgcagttatcagagcccttcatgctgagcatttaacctaatgatcccagatgggagctgcataatgaccgactgcattagccctggcagttgctctctgtgacatccgtgactgtaacactgttagaaactaccatgagcaagatggaggggatccaggacaggctaaaagtgtactgtgtgcccccaaaatcagacatgataaaacagagacgtaattggagtatatgaaattttaagggccataagtaaggagcaaacatgttaaagaaaattaaaatatagaatcagctgagaatacaggagaattagattttaggacaagcaaccactccaggagtcacttgaaagtaaaggcaaaacaaggtttttggaaaaacctcttttccaagttttcttgcctttatccatgcatatacttctataaacagaggctatggtataccaagatatgggattagcaatgtgtgtcccagctctccatgacctcatgcaaagcagtgcttctttgagttcagtctcctcatctgtacacaggtgtaaatatgcttattatatatgtcagtgctgcctgttattagcatccactgagatagtaaaatgtgtgaaagtactgcataaaccagcaattacaaaatggcagcctgcagaccaaatttgtcccccagaaatgttttgttgagccccacagtgttttcaattctttattagatgtcaggacttacaaatcagatggttttccttgaaagtctggattttcatcttatcttaaaagactgaccagatcagatgcatgttccttctgacagcaggcagctggagtggaggcattactctgctgcttcggacagggcaagtgtgtggcactttgccacaacccctaccctggcccacctccgtcacttgagttacttccctgcccctttcagcatttgcattagtgatccctggcagactgctaaatctccatgcacatgttattatttatatgtgtactaaattctccagtcttgttccatttctttctggagaacattagtaacttgtgttccttgcctacttacactatatataatctttgtggatccatcataggaaagataccgtccacacattaattctagttcctttgtaaatctcttcataaccacatattaagaatagtatgattagctgagtaaatcatgattagtaagatgacacttggttagaaaggagatagaacggtcatttagtaaatgggtcaatgtttttctttataattcctgatcaattaatatacatagcaaagcaatgactgaaattcacaactggctcagataagtttctaccatttatcaatacataaagtatatgccagaaaaggaaacttatgtaatgaaatcagaagaaaatcttgaatcacaagtcaaagttgccatatgccagaattagctaccgaaagtcatttagaatctaaaatgtaggacctcaaaatttcttgttagctatataagtcattctttgctgaaaagaggtgtaaattaaaatgcatagacagctttataaaagcaaaacctttacaaaacttaatctttcctacagttaggtttatggacattaaaaagcaggacaagattctctgcatctggcttaggcaacagttgccatttttaaaagctttccattcttcggtagaaagatgagttgtgatttttaaaaatttgtttttaaaacaataaaaattggtgtggaggaatttctaaaatgtactgtaaggcaaagaaagcaagacatacataagtgtacataatatgaccccatttttgtaaaacaacaccaaataaatccttgactaaatatacataaacatacacaaacagatatatatatatggcatatgattaatgatatctatgtttatatgagaatggagaaagctgtgactgcatgtataccagtcgttaaagctgattgcatttctgaaaatgaggagctggagtggtgagaaagtagaaggaaatcaaagaatatacatgaatatgtgaattcatcaatctaaaattacatgtgtgaataaagaaagacataaaagtttgttgattagaagaatcagaaaagtaagtcttaccaactatgactttaaaactatatttttatttatttatttatttttgtgagatggaatctcgctctgtcacccaggctggaatgcagtggcatgacctcagctcactgcaacctccacctcgggctcaagcaattctcctgcctcagcccccctagtagctggtattacaggtgtgtgccaccaggcccaactaatttttgaatttttagtagagatgggatttccccatgttggccagactggtctcaaactcctgaccacaagtgatccgcccgcctcagcctcccaaagtgctgggattacaggcgtgagccaccatgcctggcctaaaactatatttttaattgtacattacagtaattgaacggtaactctagagaaagcaccctctcaacagtgcaacatcttttaaagccacctataatgaaagaataggtacaatggggacagtgtggcaaaaataaaatcacttcccaaagattttcagtcagaaagctgaaaaatcatttttcctaccttttgtgtatttgcctgccagagaattctgttctgccttccacctcacagatgtgctccagatccacagaaaagttggtccataggagaaaaatggcaattgaattttatgtatttgctttctttgttttgatagaaataattccctcctccttgtctgcatatctcatgactcctgccttcccaaatacataggttcacattctcaatatgaaatcttataaactacatattttacagcagccacctcagcagagaagtgctcctgacatctctttcaccatcgatgcgaataagcagcaaaggcagctgattgctgagctagaaaacaagaacaggtgagactttgtagacgtgctggcttgtttgatcaatgtgcgcattccttaataaactatggtcgtgctttaaagtttcagggctttacaccctgtatggctactcaagggaagacatctacactcagtgatgctcacttccaaaaagctggtctttagatctttagaacttcagaagctccatgagaaaacggcgtgtgcatgtatgtgtatagttctgagatatcaatgcaattaatgttgcccctctagacggtctcacttccctttttctgagatacttaattttgttcaagagcttctagtacaggaggaccctcctgggtactaggtagaaggtgtctctaccacccagaaacaggtaggaggctcaccagagaggccccctggaaggaccctgagctaaagaggcatctggagagacaccaccatcacccagttactctccaaacatccaaagatctccacctgcagcccatcagcaggttcttcctctattcaacacagattgactcacagtctacctccacagcatacaccccaaaaattgtccagctcatctccaccaccacccagttcagcctgtccttttcaaaaacatcaatcttatgttattccaggtttaaaccctctaatgtgttcccatcacacttcagttaaatcctactcctcttaccatcacctgcaaggtcttacctgacctgattccctcctgccattccagcctcagctcaccttgctcagcacactcccacctcccatgtgttcctcctgtctacagcctttgaattagtcattccctcagcctagaaagctcttcctccaggtctctgtgtggatggctccttctcatcactggggtctcagctcaaatatcatctcctaaaagaccacctgtctgatcctacctaattgcccctagcccagaaactagtctcaattacatacccctgtgtgtgtgttgggggcaggaggttgtcacttatcactatctgaaataatcatgtgtgtttgtttcttcgtttattgtctgtcttcctggactgaaacggaagttctttgagaacagaggccatggctaaatggtccctggagcccagaaccaggcctggcaattgtagaagctcagtagatatacattgagtgagaaaacgatgaatagctgagttaaatctcaaacttggttctgaggaaacccaacatggaacaacttgtactaggtcggtgcaaatgtaattgtggtttttgccattatttttaattacttttaatggcaaaaaaacgcaattacgtttgcaccaacctaacacattctagtaatatatttcttgaaacagcaccaaaacatttccatgcttaaccccattcttaaacactgatgtgacatttgaggtcaaactggaggagtaaaggaggaggttgtgataattatttcatgcctgtaaaatttgacctgagaatttggggataaatgatcaaagtattctttaaagttctcaagaaagaataaaaaggagggtgcaaactctggttggcactttttcatatttttttctagtaaggaaagcttttggcttagttgtcttgagacctggctgccatcattaggaaaccacaaattaggatagaaatagcttcataaatgtgacaccatgactccatcgcctttgaaactactgctctactctgacccccagggagatgtgctcacatcagagctggaataaaaaaatttaaaaataaaattaaaaaaaagtttgtcacatgtgatccctgtcaatgtagcaaataataggaggaaagaattaagaagggaaagagcagatgcatagtgacgaattataaaaaaaaatagccatacaaattggaatttgttcaggatactcacaagtctgtaaaattacctattctattttatgtatcatttattatatctactacgtgcaagtaattgtgccaagtcagaaaaaagcattgagagtgggagccaagtcttcaaatgagcaaaggcactttaaaaaggtaggagaaacaacccaaaaaaaggaaaagggtagttgggggatgcaagtaaaagtggggacaggcaggcattggagaaagtgtatgagctgagctagcaggcagagggctcgaagcaaacaatgtaaaagaaccattggactttgtggttcgtggaatgcttgtgtgagtattgatgacactgatgacaatggggagtaggagaatggaggggccgtcctcaaatgtactgatactttacatcaattcaggcactggaaagatcatggcaagaaaaagaagcaaaataagccagttttaaattattgacaattagacttaatccaaagtttcagcttttttggaacaaaatattacggttgataacctcagcaaatgtcagaattggaatgtaaagcagttttgttttattttgggttttatttttttcagtccacaaagtcaaccaataatatatggtggaaaggtttatttaaaatgactcagaattaacagatgtcagtaagtcagtgagtgtcccataataaaggcaacagaaagagctaaagaagaaaggaggaaaggagtgataaaaacaatcattttatctgctgttggaaggctgtgccagcttgaggccttaatgaactatgccagagttgaggccattttctgaagaaggacctaactttctatgtagtccgttcattcggactttctaccagacatcattccataatcccttctccatcccttagtcccttttctctaagacatattatgattgctaacaagcatggagccatccattggggaagggaccacagctgggattaataacatatgctcacaggttccaggtggcagcagtaagaaacctgggtttttgttttgaggggttgaagtgagaataaggacaactttaaaatacatttaaagtacatgtgtacaaatatagtttcatttcatcctcagaacaactatttaaggtaggcagggtgactattatcatccccattctacagatgaaaatttaaatgtgaggtgttatttctactctttttccccaacatgacccacttcaccatcattgtggtctaggttgtgtagggcaaacttcatggggaaggtgagtttttaggacatttcaggacagtgaaattttgcagtgaaagttgggagatagaattaaaggtaaaaatacacatagactttgagaaaagcaacaagacacttgccaggctagcactgaggaatcaaagaataaaatgaaaacatcagtatatgaggcttgtataccagaccaaagaattttaattctatcctgttatgatggacagcagtggtcaggcaagtgacagaatgtccgcatgtttatggcaaaataatcagctcactaaatatgcaggttgcatttacaagggattgactagaagctggtgggaagtgatgaggaactatgttagatagatggttccagaaataaaaataaaggaacccaaaaaggagatgattagacaaaaggcaaaatagtgctgaaatgttaatttacaagattctattactcatttctgaactttccattagggattccagattttccaacaacaaccttcacacaactcagattttactagcaatcctcttttctttcactctcttgttctttccttcctcctatccatctgtcccgatataaagagaagggataaaacatcaaggtcaaagggggctttgtggaatatcaaaaggaggtcaaccctgaccagagtttccacaagctgcagcatcacgcctccatcccttcttagaaagaaaagactaacagaaattcacaagcccacgaatattttatcttggttgcactgttaattaacctactcttccacttcttcagagcactttgttttcccttccaatactctgcttccactcgggcatgggggtaacacatttgaggggaaagcaggacttcttttgaggaaataccccagagatatctgcctccatgtggttctgtctatttctgattccagaatcagcatgaagcaccatgaaggccccaacaaccctggccatgccttaatatcactcttgctgcttgtttcctggatgtttttggatcgcactctctaaatgcatgtctttaaggactagagaggaaaaaagaaataggagtgagaagagatggcggaaagagagattcattctgtccctgagttcttttgtgggttctagagctccccaacccatctctgatgagcagcaagtacatcctaagctcatctctctgagccagcagcctggttctctagacatcccagggccaaaagctcctttaggtaatactactgcaccatggaaacccacccagggaactcatgtctctaagatgacaactcaataatcagatctgtgagtttaaggggaagatagagttcctcatttcatttaatgactctgtctaccccaggtaacacacagacatttcagcaatgatctttagaaggtaatggttccttatagcacctttggtggagccagtcagggttagtattaggagtaccaggaatcttcaaattatattgtatgggtcacagcctgtcttggctagacctagcaaagcaagtaccagaagactgaggcaggctgatatatgtggggtttggggctagccagcctggattcacatcacgtctaccacctacttgttatcgaacttggggaaatctttcaactggtctgtgcctggattctctcatttaataaacagagataataatggtacctatatataatagaactgttatagaatgaaataaaataacattaaagaagtcagcagagttcccaggtacagactgactactcgatgcacgttacatatctcttctttattttttcttaccagagctgttgctctcttttccttccttggaccaaatggctctgttgtgtttctgtctttagaatgaacaaagagaatagcaggagtcatagaatatcagggtgttagccctggaggaaatcttggaaatcccactgcactgattttcaggctgagctttatggcatcctgagggctctgcaggggcacctgggagggcacagcagggcccagcaacacagggacttgtcctcatttctttaaccccagcagcacccgaccccttaaactatctgacatgttgggtatccatggcatatttcttttaaagaaaggattccccgatggaatcacaaagaggagaaaacaaaaaaaagactgaaaaccactgaattacagttccatcttctcaccacacccacgaaatgtataatggcttactaatcattagcctcctgattctgggggctttgcgaagcaggcagttttaaatcagccctccaaaatggaaagctacttccttgtacaccaagttcaccttccattcgcagtgctttgctccgtcttactggcttctatgcattttgttgagtaggaaactgacacccccagctcccaagaatacatgacttataaccctgcttaatggcttctgactcacttagggataatttgccttgccaggtcacatatcctttatggctagcctaatgctcaccaaatgcagggaagcccaggctctgacatcaatagttgactgacacatctcacccccgacagaggtcacaccaatagcactgtatgtcacagactcaattactgtgaatctttttaaaagcactttccttctaaggtggacttccctgagatccattgttaaggctgagagatttaagaaaaaaaaaagagaaagaattttgtctaactggggttttctcagataaattcaatgagaagtcccttcttggtgagagaatgaggttacttagttttgtgaaatgagccccatttatccttattttcccttcaggctcctcttacttggtagctgcaggtactttacggtgtcagagtgtgatcgtaaataacaggaagatgcatttttgtctcttaagcagcatgctcttcaaagttggacacattaccttacttgctagtagtaatgcattacattacttgctagagagatgactggaccctggtgatttaactcaacgacatgctgcagaagcttctaggtttggatgtactggaaatgaagtcaatcttcccgtcacccacagcacccatctagctatagtcaaagcctcttaaatacactggaatctgttggttagggaaggtcggttctgctcctaaacataggatgatcccttctctctttgttctggtggccttgatctgctccgatgttagtttcctgaaagctaactaaccttggtttctcaccttcctcctctctcccaagagaaatcttacaggagatccagagacttcggctagagcatgaacaagcttctcagcccacgccagagaaggcacagcaaaaccccaccctgctggcagaactccggctcctcaggtaggagagagcacccatgtcatctcagggaatatatatgtgtcagatctttgagaaagtctagcagtgtctagccagaaaacagtcctcagctaccttagctgctgacatttgtttttttcatagcacacacgtaattgctgatatttgggggatttagagagaagctgtttatattttgttctttcatttggtacagggaaaagcagtgtgtttctgtttttgtttttgagacagagtttcactcttgttgcccaggctggagtgcaatggcacgatctcggttcactgcaacctctgccttccaggtacaagcaattctcctgtctcagcctcccaagagctaagattacaggcatgcgccaccacacctggctaatttttttgtatttagtagagacagggtttcaccatattagtcagactggtcgcaaactcctgacctcaggtgatccacccgccttggcctcccaaagtgctgagattacaggcgtgcgccaccacacccggccagcagtgttctttacatcaaaaacaacatatctcactaggaacaatttaaacatagctctttttagaaataatcagttaaataaacatcacaggtttttaaatttaaaaatttacccctaactcataaaaggagtctgattttctctaagtcttggtctctaatatctttctttatattcagatctttaaaaataggcatcacaccttcctgtactataaaggaacataaaagcctagtcttctttagtctgtcatcataaaatacttgagttagaagggactatagaagtcatcttgttaccagtgaagggtcttgaccacgaagttgtccagggtcttggcattttgaataaagaattggacaaaacgcacaaacaaagcaacaaaagaatgaagcaacgaaagcagatttattgaaacgaaagtacactctacagagtaggagccagctcccgtaagcggttcaagagccctagttacagagttttctggggtttaaataccctatggaggtttcccattagttatttgggtacaccctgtgtaaatgaggacttggcccaggaccactctgattgcttgcaggaggcgaccaatcagaggctgaagtgaagttacaaagtgacatcctatgcaaacatttgattggttgcaggaggggaccaatcagaagtactttccattattcatctgcctcaccatacaaagggagtagcctcggatccttttgttacttgggtgtggaaaggcgaggttttcctttccattcagttctaggaagtcagtacaaatcgtccttagtttcgctgcctccagtccctattctcctgactcaatcagattctgccgctgcatttcagtgcacttctcagagtcagaagctagggagtagcaggccttggaaaagaaatgtggtttctcctactactcccacgctgcaaaatgagtcttgctgtgggctccatttcagactagcttcttaccatgccttgaataaggctggtattccagtgtatttatgtggcaaacaacacaaaaataaattcaaagacattccctcgtataaatatcatactgttctttcacaaggcacctgtagttgggaagtattacattcttttctttttgtttttgtttgtttgtttgtttgtttgagatggagtctcactctgtcacccaggctggagtgcagtggcacgatctcggctcactgcaacctctgcccctccaggttaaagcaattctctgcctcagcctccggagtagctgggattacaggcgcgtgccaccacgcccggctaattttttgtttttttttttttttttttttttttttttggagagacggggtttcaccatcttggccaggctagtcttgaactcctgacctcgtgatccacctgcctcggcctcccaaagtgctggaattacaggcgtgagccaccgcgcccagcccattcttttcatctttcagtttgggtgccaactatgttccaggtatatctataactctgagtcatactttttatagtaagtacagatgcctctttgcagaaacccttgtcagaattagtcctgttttcttcttccatacaaaaagacgaaatgaagcaagttctttatgactatgtttggattttaccaagttcctgttgattgcatggatgtttccggaggctctatctttgctctgctcttcagacactttaacacctgagcacggcagagctttgtttttcgttaatgcatactttcatttttgtcttaaaaccacaatgaactttctcaacgatcatgtttccctttcccttttcactttcgccacaagaaaactgaaagctgagtcacagccagaagtgacaatgaatatgaatgataggcatttctatgtgctaatctgacgctttgctgcatactaactctacatacactgtcccgtaaaattactgtaacaaacctaggagataggcagtattattctactcgtttaatggataaggaaactgagattcacagaagtcacacagaagttgcagatatcatacctttcacttagtgtatatatttatgtacttatatatgatttataaggagaaattttttcttagaaaaaaatttgtataattgtgtgtaatttatgtatatatttcctaagaaaaaaattatcttgtataaccatgataccatcttcaattcgggaaagttaatgttgatatatggtatttaatataaacccatattaaaattttgacaattgttctaacactgttctaaaagaaagtagcttttaacggccgggcgcggtggctcacacctgtcatctcagcactttaggagtgcgaggcgggcggatcacgaggtcaggagatcgagaccatcctggctaacacagtgaaaccccgtctctactaaaaatacaaaaatattagccgagcgtggtggcaggcacctgtactcccagctgctgcagaggctgagacaggagaatggcgtgaacccgggaggcggagcttgcagtgagccgagatcacgccactgcactccagcctgggcgactgagcgagactccgtctcaaaaaaaaaaaaaaaaaaaaaaaaaaaaagaaagtaggttttaacacacatatacattagaaataatctgacagactatcagaataaaggcacttctttagagatgaatacatgtagtgctaggaaaggaaaatcactatttagtcttgttttctcattctccttggaaggtggaggttacaccacagatttgttattatacctacatttggaaaacgctggtggaaacttagagaagattgaatgaagacactcttaaattaatttttaattgaattcgatgtcatatttttaagagattactactgtaagataaatgtacaattagatttttttagtgttgactaattctaaattaatttgccattactcttaatggcaaaaaccgcagttacttttgcaccaacctaataataccagttaacgttctctgatagtttttaaatgcttctcttagtgtttctcacctacagttttagaaggttgctttaaccctcttcccaaagtgtttctgtggccaaagggccaaaattacagaacagtatcaagaagagaactggaaagaaatcagaaacattatctattcttgtaccaaagactactgtggatgtacctggaacaccatacacagacaaggtcaaaaaaaaaaaaaaaaaaagagaaagagaaagaacacctcctgaatttgtcactgaggaatattcttgaatggggcaaggcttttgaaattagaatgcttcaacccaggaagacaaagactaaaataagataccattaaagcatataaaattatgatgtttctcatcctctggattcagaaaagaagcaattttaaaggaaattgaaagaaagattgcttcaagagtaagcagtccttactcttgtaaggattgcttgtaagtggcaataatagttaaaaatataaatttaaaaatttatattttatagttaaaaagttaaaaatataaatttattcaaaaagaattgtgaaatatttataaattttaaattcataattcattatagaagaagcctataagaaagtgaattagaaatgtcctccactgctttaggaggctgaggcaggaggagctcttgtagccaggagttcaagacaagcctgggcaacatagtgagaaaccatctcttaaaaaagaaaaaaagattagtcaggcatggtggcacatgcctgtagtatcagctactcatgaggctgatggcggaggactgcttgaacccaggagactgaggttacaatcagctatgattatgccactgcactccagcgtaggcaacagagtgagaccttgtctctaaaaaaaaatagaaaaaaatagaaatgtatcatttatatcactaacctgtcctcccacaaaatatctttcaattgagtgagtcattgacctagctcactgtgacatttttatatcatcagtttttcgttgcagagttcttgtcatagtttcatttaatatgctatcattgagactagccatatccatttatacattaatacatacatgtttaaagtttccatgcagttttagtatgtaagtatgaatatttcaaactcaaacagaaatctttggggcaatgggaaaattatatgtattacttattcagtaataatcattcagtaatggatttggaatttatttggaaagtatacatatacttcagaattgtgaaccattaacattcctcatcatactgtttcatttctttccccctttaaagatctttttggtacctcttagtgtcaacataaatgatcgagtatagattgtccttagttgttttcattcttgctgacagtttaataaaaggtctgtaaaacaaaacaaaattaagcatgaaccttatatatcatcttcacttgttgaacaagtatgtagaaatgcctttattttgacttcactttatgaaaccaaactcaaacccaaaaatttaaatggattgtatctacgtgctgttaatatctcacctctgagagacacctcaatgggtgctgaagatttcaaatgtacttttctaaatatatttccaaatactaaggtaatcaatattttctgtgaatttgcaaaagggttcttagatttggagaatctggaagatttgcctttttcagtgacaatttggtttttgtttgtttcaagggaccccatagcacatcacagggcccactacatagtaagcattcagaaaatatttcattcaatggttgattaattcagggtagaaaggtctgaaggaaacaaaagatctaaaaggactttaattctgatgtagtatgactgctaacaaaagaaacacttccagctgtaattgttcattcatttgacaacagttccctgcctggtaaccttgtcagagacccagagatgccctttttctgacagtccacaagtccctcaagaatggaaatgtgattagctcagagagttgcatgccgcttctgatgtcagctgcttctttcttagacagcgcaaagatgagctggaacagagaatgtctgctctccaggagagccggagagagctaatggtccagttggagggtctcatgaagctactaaaggtaagacctgccagataaattttcctgagcttattttccatgtcatctgtgaaaatttttgcacataatgtgcaatggtttttccaattgctgtatgtgatttccctcaacatgttgtttcaagctcagatgtaaaacaatttgttagaccagtgtagcagtagctgtcagtaatagaacacattcttttttttttttttttttttgagacggagtcttgctctgtcgcccaggctggagtgcagtggcgcagtctcggctcactgcaagctccgcctcccgggttcacgccattctcctgcctcagccccccgccgagtagctgggactacaggcccccgccaccgcgcccggctaatgttttgtatttttagtagagacgggctttcaccgtgttagccaggatggtctcgatctcctgacctcgtgatccgcccgcctcggcctcccaaagtgctgggattacaggcgtgagccaccgcgcccggcctagaacacattcttatccattcctgaaaccagactgctgagggccttcatggggcaacttcttcttggcttatttccagtttctttatgtctgcaagtaataaaactggatttatttagaaatattttatatttagtagctttcagcaattctgattaaattaagaggagtgactgttaatatcagtaaaatattttattccattagtatgctttatcagtaggtcacatgatttctagtgaactcagacacaaactctaagagagaatatctcattactcttctgtaagtaaaatgtttaataagatgatttatagaagtcttctgtagagtgctgtaatctatttttctcattgggaagtggcattcttcttttagtaaagccttattcccttctttagtatacattaaattgcatttaaagtcaaaagcaggcaaattatggccacatgtctacagtcagcccatgtgatcagtgccacatgatcatcctgcctgatataaacaagcaagaagcagtatggattggaactgtgacatgtcaaaggcaggaagtgaaacttctgataggagaatggtaaagggaagaccctggggcagctcatttgcgagagagggtctcccaactttcagtccgtggatgtcccacggccccaacacaccaacatttgttgtttttattttgtctgtcctttctttctctcttttttttgtctgtcctttctttctcttttttttgtctacctttctcttttcttcttccctttttcttcattttttttgtttctttcttgattgccccctctttccttctttgttttattttttgaaagctactttgtcccagccactgttcttgtaaactttcttttgttttccttactctattttattccttttccctccatcagtgtcctctttaacaattggtattgggaatactttatctttactcaacaaaattgacttttcagtaattagatatgtacagtgtagaattcaattcttgttgatctatcttgggtaagacaagactagatagttcataacctgctgctgtttctggcctgttaatctcatttgataaccaaaaataaactctttctgcttccctttccaaatataccaaatgaaaaggactgaacctatctttcccctcagtgaatgacaggaagctttgaaaactgccccctatgtttctattgcttctgtcaccattagctatgactctttccctatgggatagaagtctattcaccaccagccatgttggtatcaacctagcctaacagagtactgccttttattgagatgtacacataccaggacagagaggtggattgtgttgaaaaatggttgtacatgcagagaaaagagatgggcctgtagtctcaaataaccaagtagacttggagtgatagtcactgaggtggcagaggcctggacctgccgtcaaaggtgtgttgatgtttccccatcttgcgttccttcacactgtgtacatgctcttattggaaccctgggtaatctaactgttattgattcaatctttctgtaggaagaagaactgaagcagggagtaagttatgtcccctactgcaggtcttaactaacagtggaggggcctgccgacctgcggttttctcattgcttttgctctaatgtatgttcatgcttcagtttggaaagagaaaaaagtcatactaatttgcttctttttcaatgtagtgcttgaattgagatatataaatttagcattttttataactatcactactatccacatcaaaagaagaactatgacatcttttagaaaagggaacgaattgtcatttattggaaacattttagatccccagaggtataagtttcaaaccagtcttagcttttcaagttgttgatcagacccttctcttaacagagagataccacagtcactagagataccctgaggttcatgtcatcccaaaacccacagcactcagaagctaacctctacacccactcacactgtgagtattcagttcggtttcattttactgaaaacctgtgaaacctctttttataaaaatcaggcaattaaatcccttttcatcacacaattattgagccttgttccccatggctcaccaaaatgtgctcaattttgtgagagaaagactgtactccataactgactattcacgtcccatctttttggctcttccccaaagcagaatccttactgttggttgacagtaatctctttttaaaaagtaactctcagctttttccttagcaccagagcctttcggctccgggagacgagagggtcattacatacttttttttttttctggaaataggggcattgtgactttatagcctaaactggagctgtctgaacctgtggtcaggctcaagagccagcagggggagcagcaaactcaaaaaaaaaaacaaattaaattaaattaaattaaattaaatagaagcaaaataaaagcagctttaatttcaagtgcatgtaccacgctatgtatgacaatatatcccactcactagcattatttaaaagtttcacattatttccatggatcaattagaaccacaacctgtccaatttcaacgtatctttcatttcttctgtatgctcttttctattattcattatgtgtgtttgtgtgtaacaaagaatgtttggaaaatgctggacacatttttacccttcattcccatggtctgtaaaaaaggaaagtgtaaaatcaatctgtaatgtcagacaataaagataatgtattacattattttgtattttgtgaaaaaaattactttactaaattaaagtcaaattttaacagaagacagtccccctgggtgaaggacacataacacatacagcctgtataattgcccatgaatgcatacatggggtattgctattgtatttccaatacacttagatcatggtaaagaaaaatgccttcttcatgatacttctctgcaaatggcttctttcctctcctgtctcttatttagcatgtgcatagaaaaaggaaataaggttcaattataacctccctcctcctagcagagagagagggcaatcatcctgtcgtcatcagccttgctttagccatttcccttggggatactttccaggccatttcccaggcagcaggatcttgaaaggctcctatggaccaggaagttcgtaaacagatggatgcacagagccaaactgtggcagtgcccccaaggtggcgccactgccccctcaccttccagctcctctccaccaagcccctcagcagcttctgcatctcagggggccaacagcgggtactgcggtgtcggtacccaaggaccagggcccacgtcacccagatgtcagcaatacatcgtctgggtagtggcagagtttgcctatttcacttatttatcttttttgcttttatacacaagcctcttttcaaaaaggacctgaggcagcttacaacaaaagatataaacagtgacttcataaaattgaaatagaaaaatcaaaaactaaagaaaataaaatgtgaatatgctaatcttaagggacaaggatgttactctgcatgttctggcaatgaagcaaaaaaaaaaaaaaaaggaaaattatcggtggttttatcagtacagaaataccacttctcaggggaacaaaatttctgttggcataaaatatgaaagaaagtcttcactgggagctttataggagtactggacgatagaaaaggaaaaaaagcagtcatagatttcatgtggctgtttcttatactgacctcagtcaaaattaaaagcagaaccttatcaatcccagccctatagaggcggttctgcaaggaaataaacaaatgctgtccaaatatagacttctcatggtaaaacatgatctaaggagagaatttagaggttttagactggcatctgcttctaaattctgtttttatttatgagtgtttctcccctttggggacattgtctttgtaaaaccaaacttagaacacccccacacaacaaattgtgctggatttaataacctctacttgctttatcataagtctgtgtggttcaatgtagtgttttattatactggcatatataatttctacttacattgtttcttgttagaggtaatgcatgaatttatccctctcgaggagagaacatgaattaaaaaaaatagtgcctgtaatataatgtgatgattatgatatcacaagcaataaatttttttttacaaaacttgaattgaagttatcctaccctctttcttctttgtgtatctttaagatttattgaaggaaccataaaaagaacactcataaaacgtttaataatgaaggcagctggggtataattgcagtaccaatatgttccagagtttctggtacacttccagttccaaatattatgtaccagtctaaaactgagtagactgactttgactccagaaagtaaggtctcaatattagttttcttagcaaagttactggaattagacctgaattacagtggtaccagatctttgctcacggctgtaagcttaactttcatgttcattaatttcaaactattgataatccatggctaataggattattgtatagattttgatagatactggatgtgaaagcactttgtaaaatcttatacgtcagctataagtatgaatgtatgtatataggtatacatacacacaggtatatataaacttttcaaatttggtccatattttacacacactcacatacacacacacacacacattcacttctcttccttacagttcattaacagtgtctccatcagggaaagaaatttgaaaaggacttttaatttgttcagatctcttgtaattgcttttaacagtagaaaaaaagagtcatttttatgttagagaaagtgacagacaagtccagtaagtttatattttcctatttctggtaacattagatatgatcctagatatactaatatctacagagtgtggctttcgccataatttgagtaggtatattaaacagctaatacagtgaagggctgccagtaacagatgttctatatgagtgcaatgaaacatctgatattttttcttaagttttatctataataaacatttttgtgtgagagaggtgattagtacagggtgcatattttagtcaaggataaaactaaggccgtgcacggtggctcacgcctgtaatcccagcactttgggaggccgaggcaggcagatcacaaggtcaggagatcgagaccatcccggctaacacggtgaaaccctgtctctactaaaaatacaaaaaattagccgggcgtggtggcaggcgcctgtagtcccagctactcgggaggctgaggcaggagaatggcatgaacccgggaggcggagcttgcagtgagctgagatcgtgccactgcactccagcctgggcaacacgacacagcgagactccgtctcaaaaaaaagggggtaaaattaagcttatgctaatttgcaggactttttttcagacttacaataaggatccatttttttaaactacattttaaactttgggattgaattgtttcttatttgggaagataatgtctatacattggtattatgttaagtaatacaattgttctaacttggtggggaaaaaaagtcaagcatcattccaaattccatctcctacccttattctcttctctgtttataactggatggtccaattaagtcaggaaattgtagtcatcaggtttctacttcttccaaacacttcatggaatactagcaggccagcaataacctgcttgggcctcaccttcctggcttttcctagctcatcctctctggtgggtattctatgcaggcatgaaccagtcaaaagcgagggagagggataattcacctcagaaatgatcaactgcaatataaagatgatcgtctagtgttcaaaaacataccctcccagactctctctttttaaaattaagtattgattattataattaattctaagtaagtaaatattatttctctgcttaaaaacctaggaagatgactctctggttcacaataaagtctaccctggaggtcccgagacctgcccatctccctcttctagcctcatttctctctacacccagcagccagcctgacaccagagccacaatggccttcccaccctctccacaatacgtgtcacatttcccatgccttgctcctgctgttcccaggttgctctgctcttctcttctccccacactttctcatttctgcctgcaaatcttcactgttaaaacccaagtcaaatgatgcctcctgcctgaacagtcggaattaatcacctctcatgtacccccacaacactctatacacaatgagcactttaaaaggcctgattataaaaattatcatcagtgtgatgatagccagtgaatttatattggaagaaaggataaaaacagggctgaatgctgctaagcactgctttgctgcaccttcccaagctgctaggtgcggccaggcatgaccagactgcattctcagccaaactgagaggcagactcttcaggtctagcggggagggggatatataattctctgctgtttcaccagggtgtcctgattcaacaattagacatttgctcctttccttgaagcatccctcatttctggtggtgaatagaaatcaaaacacttcctggaaaatatcagaaaatgtatgaatcttgtcagactttttaaaaaaatggatacaacagcaagttgagtagacttggaggatggtgcatagagattaatttttcatttattctccaggaagtgagctattttaaatttgccaagtgtgatatatgttttccttcttccataaatcaactctctccttgggaattttagatctatatattgatctgcatggaccattgtcccttaagtctttgctccattaatcattgagtaatttccaggaaaggatattcacagagattattcactctaactcttctacagttgttagcagacaaccatgcctcatgaccaggctggaggccaccatcccaccgaggccacttcctgtgaaaatgaaactcagtgacatcatcactgatctgccccaatgccaagaggccactgccttttcctagtgttcctacaagaacagaacagaaaggaaggccagagatggcattcctcacagtgggtaggcactaggaagatgctctgcatcaaactggacagtgtcctgacatggagaggtggggccgtgatcacccagggtgtcagtgtcctacccccaaaagtctgggtaaaggctggatgtgacatgggagttgccagttgtgggaaagatgcaactgattattctcttcagcacaggatcttccacctaaattcttcacataatcaaactgcatgaaattgcaccaattagagattcctttgggaaatggtggctattcatcattcacacattggtgtaatttagattcagtcaactgtttttcccttaacacacaacgagagtcaatgattttcttcttattgcagaaccactaatgggagttttgaaaaagaatgcccacagaaaggagtagcaaaagttgcctttgagaccaggaactgagcagggagaggttgggtgaggcatgcctcagacccacaggaattagcagaacagcccagtgcactaggagatggggagaggcttacagaaaaggaggtggaagggccagacatatgagtcttcttacaaatgctgcctagagggaggagcccccagcaccctggagaacctggtataagaggtataagcaaggctggtgtgcactacagccccagaacagacattaaagtagtgaaatatggtccatagccccatatctcaaatcactagatccagatatgttccagaatttggcatttatctgattttgaaaagcaatatgatgcagatatcgtatcagttacctcacatccattaagaccaaattcattatggaatgaccagtgtttgtcagagcttttttggctttcagaattgcaaataagagattgtaggcctgtacttctgtaccaattgataaacagtccaaggccctcccatcaccctgagcacccatacatcttttccatgatccagcaactaaaaggtattgcctggcccagtagcaggaagccctaggacgctgctccagcaccacaaggtggtcctactgggtctgtgccctgtgtcttttccctcttcaggctgctgaacctttctatagtagtgaagcatagatggaagcgtatgatggctggtcacagtgcccacagtccttagactcagcatggcaaaccctgagcttggagtctaaagactggggatcaattttatctctgccattctcttgctcagaaaccttgggtaatccagttatctcctcttagcctcagtttgctaatatataaaatgggaataataatacttcatatggttattaagaggattacatgaagtattaggggttaaagtgctttatggactgcaaattgctattcaaatataagatattaccacttgtaccactgtactaggaaaatgaaacaaaacagtgtatgtaaaagtgctttgtacattgaattacttacaaaagtggagttatattattattgtgaacttctcaccatggaagacaatctgagttcccagggatgagacggtaacccacactgatagccaagagaatcctacttcttaataaccactctgtccaacttcccttctctagtccccactcccggctgtgtttggtcccttgataaagaggacagagacaagaggctcaggagccttgctaaggcctctgccttaaaaagggtgtacaagaggaattgccaaagtaggaagagctcagggcatctgaccagcgtctgtctccattgagggactttttgccagccatggccagcaaggctcccgcagcccagggcactcagagcccctgggctcagccccagccctgcccctctgactccgtctccagataaagcaattattttcacctctctgagtactgggctccacaacttcacatttagagtaagaatgcatacttcccagggtcatggagagaaatcagtgagagtgtatgtgaaaaccctttgaacatcataaggcacaacgcaaatgtgaaattatttattattggcatgggaaggtcaaggatgcagtggtagctcagaagcagaaggtttcaaggtaatggggctgagctgccagagtttgctggggaaaactagacccctccttgagcaggccgagggaagcaggctgcaaaaacatcacaaccgggcaaagttctcttccttgggcctggacagaccattacaaggtactgttgagagtgaaagaatgggaccctcagcccattgggcaccccatgggttattttctgtgctctgttctgttttgcttcatttttaattctgggtttttctcagtttatggctttaacaattatgcgtgatgctgagcctggagagctaacagcatggcatttttcaggattgatgtggtgtgttttaaccacaagccactgagcccaaagcaaatatctaaatggaatattccagagcattgctctggtggtatacatctaggagtttgaatgggttaatgatgactctctgggccttgctggagaagaattctcactctagcaaccacagcaaacagactgggatggaattgatgtgaacacctaatctgttgtgtatgcactcaagggtctccttgcattttcttacgcatgtggctgacttcttttgtcaactaattattaaaacagggagaatatttccaaggcacctcatttagagacaaatccttaagattcaaagtgtgacagtctcagaatagtttcatgccaaaaactgtagtgcaaagataagttccttcagttgttttctacttttttctttacttgtctttaaatcctactattcttattgtcctgctagaatactgctttttcataggagaagagaaggacatttcctgcaggaaataataccaaaaaattagaaaacaaggtttcttcttcttcttcttccccattggaatccctgagttactaatttgacaaaatcagcttttactataaaatagggataaaacaatttacacttcatttgattcttaatttgagacttaatatgcacaatattgtatgacatgatttaaactcttatcctctaaagataatgctagtacagtcaggttgaaaattcagaaagcatccattgcaaatagtcttctagtttgtattttaaactttctccttaatgtcttcttagtcctcggagaccttccttcaaggagaaagtatccacaccttgtaattatctgcatttaacagtaccttcattttatgggcacatgtcccatatactgtagagcaatgctgtactaatagttttagctttcaatatttaacccaaacttcagattacatacaataaggtcctaaattatctgcacctgcaaattagctttaggattaccaacacaattacctaggatttcctcctgctttgaaatttcattgtcactgttttcaacaatcaactgaggcattggggatgacatatgacattttcttgggaaagcaaattaatgacctgcattgtctctccagactcagggggcaggctctccccgctcctcccccagccacaccatcagcaggccaattcccatgcccatccggtcagcgtcagcctgctccaccccgacgcacacgccgcaggactccctcacaggagtagggggagatgtacaagaggcatttgcacaaagtaagtggctttattttttgttgtggtctgcttttatgtggcaaataggtcaccaaggtctattgagtggtcaagagttgtcagaaccacatgtgactattgtagggtctttcatggctggtgtcagagcctggcctgccagccattttgggaactccctacaccaatttgttctcacttcacgattttaccttcctttggcttttgttgccctgccttattttttagtaagtctttgttcatcaaaagacaggaaatcttttcaccaatacccccagaaaacttcataaatgtaatctattttttttaattcttagagattttcttatctcatattgtcttttctttatattaaagtcaagactgagataagtaatcacagctctttagcaatgaggtaaccaagaaggacatttagtcatttgacagattccctgttctgatgccccgaagagttgaatcattgcctctgtaaggcagggctacagggttaagcctctgcagttagaggagtacaaagagggatggggatgccagccagcactttcccatgacagggagagtaactttattaatttagaaatatttttaacactttttaaaacctcttcttactatcactttttaaatttatagagaataataataaaaaaatcattctgtagaccttcaccggcagctttcattcccagaagtaaccactattaacagtttgatccttcccaaagttttgcttttgtgtaaatagatatgtttaaggatgtgattatagacacatactctttttttcacacaaataggatcatgcattgcattttggggtctgcaatttgcattttctttaaattagcaatatatcattaacattcttcgaagtcttcacatagagatctaaggaaaagagagacatgtttgaatatgggttttaaggcaaaagagatcataaacaaagttaaaagacagaaaacagtcttgaggaaaccatttccagtatatgtgtcaatcaagtttcataatttcagttatacaaaaatcatgtagagatcagaaagaatagacaccaccaaaacaaaaacaggtgaaatatacgaatagacagaagaacaaagagaaattgccaataaatatatgaaaagatgttcaacctctaattacagaaatataaattttaataagtatcactttttgcctagaagattaaaaaaatgttttgaaacatcataatatccagggatagcaaaagtgcgaggaaaaaggtactctcgtccatgtagaggggtgataaaatcttaacacacttcaatgagagagaatgatgaactctctactctgagggaaaaggaaggatctatattagaactttttcttctaggcactgaatataactcaagagtttttaaaaatgtaattcacaaaataacttttaatttttagaaagaaaatatcccttctcttaatcatattttaaagaaatgtactatattttaaatcaatttgtgatttccattataattaatgtttttacttaactactctgatttttttaatttaaacatttattattttatttagttagtattactttctgaaaaatgacggaatgaaattccattaacccttagtgtgcctgaaacaaaataataatctttctctgccataaagaaacatagtctaagttccaatttatagtaccagacatgcatctgcccatgtcttggcagaagaaacaagaatcctcacccctttctcacgctctgggggcattcagtgcatgtgggtttcccattcccaagtggtacttacactggcaggaagagctccaagagccctgataggagacagcgcatgtcctagtagagaccagaatctaaagggctcagccaccaggtaagggcaagaaaaataatagcagctaggaaggcgcagctctcctggaaaacctgatttttcatctgtgtggattattcttaagaagggtgaccacacgcactggtttacctggaaccatcccagttttgccaggtcagccagccttattcatactgctctctttcaccttcaaaattgtccccatatggacaaataatatatgaaactccatcattagccatgtcttcttactgcaggacccactgccctaagcagtgttttgttgttgttgttgttcttgtttcaggaaatgaactaaagcacttctgaaaaggagaagtcttagaagttttcttgctttaggttattaatgggaaggataaataaacaacataaaaatttaggatagaaggaagctttggttttttaaattatttcttcttccctgaaggttcaagaagaaacttaaggaatgacttgctagtggctgcagattccatcactaacactatgtcctctcttgtgaaagagctgaattctggtgagttcctgattccctctcatttgtctgctcatcatggagggatccataagtgctaggggtctctcttagagatctgcttattgtctaatatcaaaagattctttaaagctctatgtgatattttgttggtctattcagatttgaggggttttttttttgtttgtttgtttttggttttttgagacagggtgtctctgtgttgcccggctgaagtacagtggcaccatcatagctcactggtatgtcaaacacttgggctcaagtgatccccctacctcagcctccctagtagctgagactacaggcacatgccagcacgcctggctaattttttgttgttgttttcatagagacagagtctttgctatgttgcctaggctggtctcaaactcctggcctcaagtgatcctcctgcctcggcctcccaaagtgtgtgagccactatgcctggcctattcagattttttaagtaatgtttatattttgcttattaaaagactattaacacatactcaatgtagaaagtttgaaaaaggcagagaagaacaacgaaaaatattcaaactgacctataattctggaatccaaagacagccactgttaacatctatggtgacctaaaacaacatgatgctaaggttattttatagggtcaagtgtattatttatctttttttgagatggggtcttgccttttttccccaggctggtcttgaactcctgggctcaaacagtcctcctgcttcagcctcccgaagtgctgggattcccagcccttatctatttaggtttcattaatttggaatgcctgatcatttaaatttgaatttcaaactgaaatttacctttgcaatgtctctgaagatagatctgcccagaaataaatagcataaaatttaaggagactttttatccttttaatactacaaagagtgttcaaaactttagcagtatgaatatgcaaataaatatcttaccagtcactaatacatctccatctattccttaaggccgacctaccaagagatttgtctggcaagactatggtcttacagctgagattgcaactataagaaataaaacttcagttttaaaaaaatcctggacttcgctttcttaaagcctctcaattgaaaattgttgctgctaatttagattaagattaccaaacggaataaaaagatagtagttaatacatcatgattaatggcaggtaaccactgccctagcaaatgatgagtacaaagttattcttggtgtagaagtcttaagtactgttagtttatactcataattctttaaagtattaagtgatagggttcacttaatattttaagttcatattttaagcattttaggtgaatattttatggttaggattaggttttaactcatagttcttaaattagtgtaatattaagcaaaagtaacaattttagttaagtctcttacagaaaggaaaaagtagaagtcttaaagagttaagtcagttactaagatggcaaaaattcctcataacatttctgagattttaaaaatgctgtataccaaatgattttatagtaattcatgtcaatatcaattcttattttgaaacaataaaaatgtatttgattaaaatatgataactggttaacattttacacagcacaggttgatttgtgaagcctactcctttatttgcaggtcataaaaaaatctaacgagtcattctttatttcttcaattgtatctgctagaggttgggagtgaaacagagagtaatgtggattctgaatttgcacggactcagtttgaggatcttgttccctcaccaacctctgaaaaggcttttctagcgcaaatccatgcccgaaaacctgggtacattcacagtggagctaccacaagtaccatgcgtggcgacatgtgagtatcttccgcttggaagcattttctcagtaacaaaacaatctgtaggagacaataagaaagtaaaagcataattgtttagggtttttttaaccttcagaaggggtgacatagttttctgttctgccagagatatagaagggtgctacatttaaattcggcattgtaatatttcccctcttacaatttccagagagttatcaataacctaaaccaaccagtgcctatcaagagcctgccttgcccaaggcacattgctagtgctatacaaaatagtattaaaaaactgctgccacccttttaggactcacagactagttcaggagataaatcatcctatcttctgaacttattgtatttgcacttagaggataccatgacattggagaggtctctgtccagaattggtgtaaacaacatcacataagtatttggaattgaaataagtacatgtataaaatctcattataaagaaatccagtttggttgacttgttgaatttgtatgaatctgaccctccaaagacttatttgcaaaagttttcacccagttctggagcttgtcagaaaccagcagcatcagtaacgtccccactagactttctgtgaccctggatcagctcaaattagtcaacagagaaaaccaaagctgagaaacaaaggcaaagctgggacagagctgcagagcccaacttgggagaaaaaggagaaaaacaaaagaaatgaagaaagtggcccattaaatgaccatggttcatggagttatgggaaatgtgggcaaaggctgacccaaaagctgggggagggagtttctgaatgctaaaaatacttcagaagggtgatgttgcttaatatgaaaagtacttcagactagtctataaaaataaactggccattttaaagactcagagaagaaactaaacagaggcctttctggtgtttggctctccatccaagcagtgaataaacaatcagtaatcatggagaattatcaagaggtgtggtctgagagtcagctatgaagcagcagagagtaggatcaaaacaaaaccattatcatgggacttaacatggcagtacgctgctgcttaatatagtttgctttcttgtcctttcttctgtattctagaattgttggatttgttattcaaaatggtgaattagttgtcatctgttttgtctggtaaattcatatctatttgactttttattattaagcatttatatggcagttagctagaatttccttgtcctaattctaaaatccaagactattgaggccaccctaatctgctagccctggtatgctgagtagcagtaccagctaccaacatgtgactcaggagttagggaaggaaagttaacagagtcctgggcagacccatttagcctggccccaaacctccaaaaataaccagaacatgttgtacagctataaataaacgcaaacaacgacatttaagttccaacctagaaacttcttcttgaccacttatttcattttagggaataatttaatatttctattgtctaaacatgtacttgtgttttaccctgagactcttttagtcctatgatttaggtagtgagtttatgtccagccccatgaaaagctttgcatagtctaggatgaatagatggagacagagtcccacattagggaatgaggtcatttttatctatttatttgatagtggaattggataattaaaatgctttttttttttttttttttttttttcagatttagagctaaggtcaagagttatgggttagtagccctcctggcattgactagctgatattctaagacttaattctataaaaataaggcatgaatgtggtatgcatgcatatgtgtatgtgcatgtatgtgcgtatgtgtaacacaaaagaggttaaattataaccaaatgtccttaagcattatttcactagagggctcactctccacacagaaagtgatcttgggttctattttaaacaagaataaaaagagccctcagattgggaaaactttgtatcccctcaaaagatgtttgccattttttaaattatagaacatttaaagggccaacccattccagtaaaccctaggaaaagataaatgaccaatgatcgcaactgccataaaaaaattgtgtatgaaaataccttgatcatatatcgcttcaaacctccaaaatgtttccaagttttttttaggtattactaaagaagacatgaaagtgacttggagaactaaggggaaataaaggtgccaacgaaactacagctcacacatgaatcccgcttgtaattctcttttaagatttgctctaacatgtcatctgtggtttattttcagggttacggaggatgcagatccctatgtgcagcctgaagatgaaaactatgaaaatgactctgtccggcagctggagaatgagctccagatggaggaatacctgaaacagaagctgcaagatgaagcttatcaggtacagggatccaggcccaccccaccccacctcttctgcctcaaccccttggtagctgggtctttgacatgacttgcagaatcagagccttcttccttccaccctcccttttcaaaatacactgatttcactccttaatccgtgtcttttagacagtaaacattttaaatacttcttttttttttaagacagaatttcactctgttgcctaggctggagtgcagtggtgtgatcttggctcactgcaacctccgtctccctgatttaagtgattctcctgcctcagcctcccgagtagctgggactacgggcatgcaccaccacgcccagttaatttttgtattttttagtagagaaggggcttcaccatattggccaggccagtcttgaactcctgacctcgcgatccacccacctcagcctcccaaagtgctaggattacaggcgtgagccactgcacccactcttatagctgtcactcaccatgtattcttttaaattctgccctagaaagtgataaacagccttcttatattggaaaaaaacaaggtaactaacagtccagactctttcaggcccattaagaaagatgctttttctcataattatttttaaatggatacaaagaacagggcacgaggaaattgaataagcataaacccaccacttcccttgaattatttgccctcagtcttcctcattgcccacctcatgccaagtgtaagtaggagaatggcaaaattcctggagaaatgttgggggaactgcaggcctgtgttcatcaaggtatggacggacagattttcagatgtactggagtatgttagccacctgaaaattcactgaacatgacatatacaattggcaataaatgtaaccagcgactcatcctaaaggccatgcatttccccatggaggtcgttctactaccttgtttgtcttcctggtatgttccttttccctttaattcacaggcgtttacttggggttctggtatttcagggatgtttgcctggttgaacctgggcctcaatggttattttatcctgtcagactttctgtccagtggccagacaagttttctgcacattcttttgtttttcttttttcctttttttttttctttttgagacagggtctcattctgttgcccaggctggagtgcagttgcccaatcatagctcactgcagcctctaactcctgggcacaagctatcctcccacctcagcctcctgtagctgggactacaggtgcacaccaccatgcctggctaatgtttttattttttgtggagtcagggtctcaccatgttgtccaagctggtattgaactcctggtctcaagtgatcctcccaccccggcctcccaaagtgttgggattataggcataagccaccatacccaggctttctgcatattattagggcagcagtgccctgtcttactttgttattgaaaaaaaagggaagcagagagaagaaattatctcctatttctcatatgtctatagataaagccttgaaatatttttccaagaagattgtagcaggagggaaacggaagcccaccaattccatcccagcaatataaaaacaaagttttgcctctttggaatgttccatttgccttttcagtttaacgaccacatttcagaagcaactaaaatgttggtctagccataccaaagaaagagggtaaaagaaaaacataagtgactctatatgtagagccgtgctcccatgcttcagaaacaaattcgcctgattgcaaacccatggagagtgcagttttccttgcgccttctatggctcctccacagaaggaaatcagcctggaatgaaactgccagggtgtctctgggaatcctcagggatggcattcctacacatatctccttaggctctgctgtgtagaaggaaagaaaaatgtgactaaataaccaatgttctggttcatgctattagaagcgtctattaggcctccctctttgagctcgtgtcaccttctgtatttcagtggcagcagtaactgaaattctaggggttcttttttttctttaagggaggcaggcttacaccattccatataaaatattagatttttattcattttaatgaattaaaaatgtaaccttctatgagtaaaatgaagggaatttctactaatgacttaagattcaactggagtttttaccatcgctggtaaatcttaagctccctctccctctcctttcttttccgtgcctcatgacttccaagaaaaggacagggaagaagctgggagactataacaggcctgtgtatctccactcaaaacatactccctggaggagatgtcaaagtggttttccttgaatgctctgtgagcatacggttgttggatggattggaacgctactctcactcaatagactctctctctctctgtgtctttgtgcatggcttcccgccaaataattcaccagcttgactgcatcacagacttgacgtgtcacctttctcgtttgtgtcctttgtcacccacaggtcagcttgcaaggttgaatgcaatatccttttatcacactcctctcaagtaagtaccatcttatttaggaggaatcatggccactgtacactgaattctgataacctgtaatgcgaattcacaatcacttctcttagtcatttctttctatgtgataaaataccctccttaactgctgatatcgaagagtcgtctcagtctgtggagggtttcattataaaccagtggagatttgccagacatccttgggaggtgacttcttactctattagctaggaaaattggcacaaagcttctaaacctagagacgttccagtaatcctctgtggctatgaaacttaccaataagtttgtcacatcaccaatccatgacaatatcggagtttgtagccgctctagcacttgaaaaggaaaagtcagtacctctagagatgggccagcttgttagtcatactatacctcgggctcaagagatcaaatgtgtgtgccttaacgagtgaaagcaaaatcatgcattaataaagagaacaaaagagcccaaacagaggaaaaattctgcagccttatgtttttggaatacctgattcaaatccattgtggaattcagcagtatataaattaatttaaaatattattttcatggcatgtgaaaccactccaaagccctacctaaatatgtggaaaattctcagtaattttttaatgcagagagattagcactggactggcagcatcacttgactgtagtggtctgaagcttaggcgccagactctaatagacccatttcaaatacgggtttcaccaaatcctaacagcagaactttgggcaaattattaaacccgtattacctcagtttcctctatacaacatattgcataatagcctcatagaagaggctggtattatgtatcaccacagaagaggccggtattaaaaaccatatcctactcactgggatgtagtttttaaagagcttggcatagtggaaggcacattatcatttattatgaacattcacatatatgcctgcccctatgttcagtgctttatagcacttcaacacctggcagctgccatattgcttacctaagtgtacgggaaacactgggacccagaactagcttgctttctcttctacttttataaacaaggctaggatgcagctacatgtgatgacttggcacactgtgggccacactgttccgtaagtctagattttttctctggctccagctaatagccatttagatgcctccatggtagttcaaagctaatatacctctcaaaggattctggctgcactggcccaaacatttgagctttcccaatcatggaatcccataagtctgtactgcagtggacagtaaatgctatcaatgttggttgctattaataatttgaaaaaggaataaatatctgttaagtgacatactaattagtaaagaatacatgctagtgcaaatgctactgacatcctgtctcagtcctcaggttaaaattaagcaagtgaaaatcatggagtaattgctatgatcatatatattttatgagcgaagaggaaggagctcattgaccactctctattctgcctctcctggatttgagagtgccaccacacatgctctcctgactcattacaagtagagtgaaaaaattcccaggagctgtttctgaaaatattcactccagttataacaaatttagtcccaaggggcaggccttttcctttaatagcactttctttctcttagcttcagcaatttgatcattgttgttctgcacattatttaaacatcagtagctagttcttagaaaaatatttttgaaagtctaataaaatgtgcttgcgttaaacccagataaaaagtggaatttggtacctaaaagccaaaaatttcagtactctagaagttcctaggccattttttaaatctttggttgcaaatttggcagtgaaaaattagactgttgtagtctttgccatttactgcatcctgtagcctacctagctggaattccacagaactctgaacaagaaccagcctgtcattcaatcagccacataggcaaattcatttaaaacctgatagaatgttgtaaaaactagtggcttttcatttttgcagctggttctatcctattgtactttttcttaatgtaaccaagaaatgcaggtgcattttaggccagtttatttcattaaaatatttttgtttagactttctggctgtactgcaagaccagaaattatcccaaagtatatgtgtctcttatccaagggttctgaagccagattcatcagcttgacattagttagccatccgccaaggcagagagccttgcattgggaagaggcagaaggtggacgccagagacatagaagatgcaacctctgctcaaaaagagctttaggcttatttgaaaataagtacacactttcaacatacaatattaaaaaaagtgaatagtttaaaacctggtttattggttttcaactagccacttttgaagaaacggtatacataatggcactcagcttagggtcctccaagactcaattttagcccatttaggtattcaatttgtccctgttacatcctgtggccacatggtacaccactgtccttggccactcacatccaagtggaaattagaggattggaccatccaaagtagattttttaaaaaccaacgtggcagcctaatcatgggtcactggttttatctctttgtccaaaagacagcacaaatatttctgtttgtgttgcttttcccctccagatgcctctggtacccactaagaaagagatccacatggaggacttcctgtcctctcttccagaaggtgcaatagcacagtgtcctaggactttcattcctgattgtcgtaggaaaggagtgtgtgtgtgcatgtgtgtgtgtgtgtgcgcgcgcactttcttctatattggggaaaggggggatcctaagtttcataaccctaatttagaaacaatttgcatctttaaaaaaaattacacattccttattcccaggcaagctatagtcagacagatgatgaaagtaacatgaaaactggtgatgatggagagccctgtggccacacagaggaggaagacagcagcctggcagcagcctcaccgaagagaggaaccaccacacccagcagctcctgacagacccccacccctaaagatgtgtcctgatgactatagtgcagctaactttttgttctcagatttgtagtgcataggtgtgtgtttcaagaaggaaaaaaaaagacttctgttcaaagttaacttatcagctacatcctctgtaacgtggttcatccctggttaaaaagcaaacaaacacaggctgaaaacccatgctgctgttatacacaatggcagtattaacaagcattttaaacctttgcacatgatattgaacctgttcagtttacaatgacaatattaatactgtttatagctagaagtttgatttctgaattctttgagattttagcaaaacagtttattatacactgtacatttttttcacagcaattggaaaaaaacaaccacttgcaatcattcaataaccctgaagaatttggttcctgagtgtacaaactcagagcccggaagccaagaagggtccttggcctgcacggtctgtagttgactccaagtctctgtgagcagtgacttgaaccaaacacaccaggaataatccattctttggggcctctttccaactcgaggttgttttctttcaagatactctaatcagccatagaatttagtgtaaatatttttttttccaaatagatatcatattcaaaaaaggcagcattcaaattatatagaatctagtttttaaaatcagcacagatcttcttaaaaactgtgaactatgttttgaaatactcgttactaaagctgtttataaaccacaggtgccataagatccccaaacggactaaagttatctctgctcttccatggtcttgttcctctcgttttggctttaggaagcatgtctttaacagcaccgctcgttcacaagttcccccatcaagttgtttggaggccttcagctttaaatgtacaggcttaaagtgcgcttgcaaacgtttgctctcctttttttctgaatgttgattgccttagctggccacctggtgttctgcatgtagccttctgtggtcatgtgaaaggagacaggctcttctaagttgagttgggatttttgcactcagtgaaaagctgaagtgcaaaagagctatcaaagacaagaggataaaagactgggatagtcttttccaaggaccctctttagagggccctaaagacctcctttgggaattctggggaaaaagaaaaagtaatcttctacttgcttcaagatttgatttttttaaaaaagcctgcgacctattcaatacattatgcttaaattagcagtttctctggaattcctgtctctcctttaaaagaaaggagagaacattttagaacaatagttctcaaagtgtgttccccggacaagcagcatctgcaacacttaggaaggtcttcgaaatactaatttgtaagccccacctcaggcctactgaatcagaagctctgggggttgggtccagaagtctgttttagtcaaccctctaggtgattctgatgctcgctaaaggttgagaactactgctttagaatgaagtcgtataataaagtctctgaaaaggccttattcagaataagcaagaaaggttctgtgattcacttttgcttctggggctggcaaaaaccttctctgaacccacacaccaagttcgtagttggtaggtgcccagccaagtcctgacatcttcatgccccctctgcagagggcggctgtacgatgttcacatgtctgcgtttggtcagacatcatctccttggctgccctttgaaaccaaatcacttgccttggggataaagtgctcaattggcattagtgagaagcccatcctatcccttgacatacttaatcatatatctctccagagaactcacctgacaaatgtctctgagcacaggctgacaccaaagtggcacaactgcacagttctcagatttctttgcacagattgatttttattgcgggttttgttggggtgtcttaatgttcatctcttttccactgcccatcctctgtgaacccatacctctctagatggagcaggtggccactggtgcctcatactcagtattgaaaaccactacatcccagctacctataatgctgtcagctcaaaatcatagccaggtagttcttgaactcagaacttaaatcctgcacgtggcactccaccactgactggaccgagctggcatatgttgtttctttgtgtttctacatcaaaatgttcgtctaagatttgaactgttctgctgataaccttccccgttgtcatagctatttcattgccaaccaactccatcacatggttgttgatatcgtcatataaagccattgcaaggactctggaaactgccgccaatgaccaatttctgactaaccagccaccttttctctctcttagctccacgtcagcactgagaccagactcgagcacccctgtcctgtaagcgagacaaaatggcgtgtgttattttggggttttgtgttttttggtgggtttctttccttggctctccagatttacttttggggcctgttctaagtgcaaacccagcaagtttcacttgtcctgtccattagatacaactacatcttgcgggggttgtttctttcttgttccacaatgaattgcacatccatctccatcagagctgatagcctgttaataagcactggtctaacacagccaaccctcctccacagcgccatattaatggaggaggggaggaaggtgaaatctactgcatgggattcaggaaacagttgtggttggtcaggacggaagttggggtaagtttggttggtcagagggagttgtgctggagattgtgaaaaatgggttcttgaatgatctactataaggcagggaaggttcatttgtaagtagtaatgtgaactgaattgcattaagagtgtgtggcctttgttgtgatatactatgtattttcttatatgcatgagccaaactgttgcatcataatttagcactgatgtctgcttttattttgatcatctttgtccacccttattagttcttggctgttaaccgtagatagatcttgtaaatccagcaacctttggttgctgcattccccttggttcgattccacgcaaggagccacaagtgagaactccactgtccttagaagaaagggcatttttacttttgaaccaaaaagagaaaaaaaaatcagaagtgttgcatcttgaggcgaattaactgtaagacatttttaattatgactactgcaatttgacaccatttgaaataatcaattcagagacactaaagatttcacaatattcattggtattgtaaaaaaaaaatactattgtatggatttttgtattgctgttaagtattgttttgtgtgtgtgtgtgtgtgtgtgtgttggaacctcctggggacatgttatattttgaagtgattaaactatttaattgtgtgtctatattttggagtggaataatttcttcattaaaaaatgtttttaaaaacactatatcttgggtggtttattcctttgtttcagtgaatctttcctaaagcaacgtggagtcagtctgttgaaagaaggaaggcaggtacttgcagtttaaagcaggacccattgatggaatattgagccaccgaggcaaaatagctcaccttctcttgccttgggggatgcatggtttttaccattctactgttttattagcatctgtgagcatctaatagaaatactattctgctatttatggaaatccttattataattgatatggaagtgagtttgaaattctaacagctaacatatttcatgtttgtatcacacactgttcttaacactttatgtgacttcactcaattctttgaatcctctgcatctagccatgtattctgcaaatattaagtgctcaatggtttttttgttgaattactgaataaatgaattagtggtgtttggtttgtttttttttctagagctagtgataaaggaggatcagcagggctaggaagtcaatgtggtgacagcaacagcaatcaaattaagagatccaaggagagtgtcaagagtccacatgttaagtgttcttatctcagaaacaaaccacaaagggacacaaagaaacttttggaggtgatggctatgtctattaccttgattgtggtgatggtttcacaggtatttaagtatgtccaaactcatcaaattgtatacattaaataggtacagattattgtgtatcaattatacctcaataaaactttaaaacaaacacatacagatataaatcttgcacgcacagatggaagaaatagagtccacagtgatgatcactccttctattcacatctctccctcagaacctctgtgagtcccatgcaatggaagattgggtgtttcacttgctgaaagatctgttttctttacaggatctgtgagtctggctctacgcttcaagaatagcatttttgggaaatctgactctggtgctgaaagtctgtgctcacagggttgggttgatttgaagtccatggaaacaactgtcaacactctagacgcactagagagagaaattaagaagttctccatcaattacaaaggcaaatactgacctgagataatcgtgagagggaactcacacagtccacttccctttgaaggtgagagccaagggcatgtccagcagctcctgtccacatccctttgggcgctatcccagtgactcaccacttcatctcttaggggccacatttagctctgccctacctcagcatttcccaaatttattgaattacaaaagcctcctgagaagttgattaattctgatttggcagatgtagagtagggtcaggtaatctggatggtatttttaataagcacttcaggtgatgcttacagtctgaccagttttaacaaatgctattatgctatttctttgctgctcaaaatatggtccagtgaccaacagaattagcatcacctggactttgaggattcccgtatataggacataaagatacccttcccagaagttgccatcatctaatcatgtgattgatctttctggtgatcagccccattctgaagctatctaggaacctacaaagagtcacctcattagcataaaaaatatactcttgtcactcaggaaattccaagggcttttgaagctctgtgccaggagccaggtacaaagaccagagagaccacatatattctccattatgctacacaataatacttgcttttatatttgcccatgtagttacctttactgtagacctttatttcttcatacagcttcaagttaccatttagtgtcctttcatttcaacttgaggacatcttgtagcatttcttgcagggcaggtctacttgtagtgaacccctcagcttttgtttattgggaatatctcaatttcttcctcacttttgaagggcaattttgccagat

SEQ ID NO: 172 - DNA, 16677 bp, Homo sapiens
  source 1..16677: mol_type = genomic DNA
tgagtataagtcttactcacgttggtgccgccagccccaaaacaaagcctggcccacgtgggtgctccgcgtatgtgtgtggctctaggcggagatgccgggggtggaaagagccggtaacagaaacagaacgtgctagaggaagagcagcctgcagggaaggctggcacagataaccacaaaaagaaagaaggcccccgcatcacgtcttcaccaagaccccactggcaaggcgaggacagcgcctttgggtggatgcatctgtgacccagaggcaatgctggctgtcctggtgtctgatttgattgcatctgatttcaaaatttgatctctgcttccttctgaaaacctcattcccttatgtcagttgtcaacaagcccttgtctagtgcgggcagactgttttccatcaagcagtcccagccaggctaacaataaaatggttggcagtgagcttgggggcagaaacctgtttccatccatgtgtccccgcagctagcaaagccctggcacacggctgaccctcaataaatgcttgctgaatgggtgaattgtgtctgcttccccaggaataggggtgggaggcctgaagcccctggggaccggtgggggcagacagcctgagattaaacttgatccatagataatcccccaaatccagaagccacctggacaacagttggctgaactgagctccatcgtgggatacatgctgatggtactgctgagttcaccaagggtctccccgggaccagaaaacagctcctcaaaatacaacttattattctaatcattattggagagtgacagagaaaagagcgtcaatcctttgagggcagaatccatttaggaagattaaatggctattctcaccgccgacccccaacccccgtttttacttttacaaactttattatgaaaaatatcaaacatacagaaaagtggagaaaacagtataacgaatccggccacccatcacccagcctcagcgatgaccaacccgcgcctgacctctccagtcatctataccccacccctcgaggcaaatctccgacgtcctctccttacacgcgcagacctcggtagcgacgggaatccgttccggactcctctggggccctggccggctccctcggccctgctcagcgcggcgcgggcgggttctcagcccacgtccgtgaagctgaaggccggatcgtgcggcgccgccccgccccccacggcgcttcctcctcggtccgcaccgcgagggtcaccgcggccccggagcgcctgggacactcgaccggcagccgcgggtgatgcgcgagtgagtccctcagcgaagcgcggaagagagaacgaagaggcgccttccacttcctctcgctctaacgccggcacccgccccgcgcgtccctcgcccccgctgccccgccccctgcagggcgtggccacggcccgaggggcggggaaacacccatatttggccttatatgggcagccgcgtcacggacggcactcattcacataaaacgctgcgcggccggcggaatccccggcttctagggcggcgagcggccgggctggctatcgagcgagcggggcgggaacgcggagttgcgccgccgctcgggcgccgggctccgtcgcggccgcagccccgcgggtcgccctcccgtgcctcgcccgcggacaccctggccgtggacaccctggccgtgggcacccgcggggcgcgcggcgcggggccgctggccggcggcggcggcggcatgaaggtcacgtcgctcgacgggcgccagctgcgcaagatgctccgcaaggaggcggcggcgcgctgcgtggtgctcgactgccggccctatctggccttcgctgcctcgaacgtgcgcggctcgctcaacgtcaacctcaactcggtggtgctgcggcgggcccggggcggcgcggtgtcggcgcgctacgtgctgcccgacgaggcggcgcgcgcgcggctcctgcaggagggcggcggcggcgtcgcggccgtggtggtgctggaccagggcagccgccactggcagaagctgcgagaggagagcgccgcgcgtgtcgtcctcacctcgctactcgcttgcctacccgccggcccgcgggtctacttcctcaaaggtgagcgctcggggtccctgccacgctcgcccctccggcgcccccgggtcccctccctgcgccggggcgccctcctacaccctgggaccgggagagtcaccacctgcaggagtctgcaccctgtggcttgttgtgcgcttgggagggcactgcaaatgtcagcactcagagctccccctcttccccacccgcgttcctcgaaagcgcccggcagcgggtctgcccggtggtctgggtggagttggttatgctgcgggggctgctgctgtttagcagtttgggggccgtcggctcgtgccgggcacgagccccctttccagacgcgagcttcgccgctgtcgctggggtcagggctcggggccttcctgatagactgatctggcgggatcagcaggtcgcgatccactctcccttggtgtggcgccgtggtgccccccttcctcccgcctagccagctgtggtcttcaccgacccccttgcctttttgacctggcgagtcccttccctttccatttcattttattgctttttattgtttccctccggcctcttctcccctcctaggtcttttctctagctcagtttggagctcacatcctttccacccttttcacctcctccttcctccgccccaggattatccctgggacccatcctgagctgagcctacagccagccagccacgaaatagaggtgcgcgggggcagggtggtatggagattctgcggcctttgatttgacacctcccggagctaccgccacaggcctgcccatttcacctgccgggaagataactttggcttctggtggtgggtgggtgattgactctcaaaatccaaagcattggttttttctgggttacttcctatgactgctcctgctttgtgtttgagtcctttgtaacctcaaatgacacccggggagacctgacccacatgtagagatgagggtttagccccagcagggccccaaggccgtgccagccctggcgcggacaccttgggatgtaacagtgttggggatcagagctcggtgcagagagccggcgccgagttaggagcctgttttaaagccatgcaacttgagtttcacacagtccgggccaggaagattctggagacagttcccctctctgctagcacctcctgctgactggtcccctgttgatttcctgttggagagttaacagaggtagatggtaatcgtccttcttctaacagcctatcccccaggggatagagggttggccctctggctctgcagaggtttcagcgtgcctcctgatttctttctcttcctaatatggtttttatctcctgtggtttggagaagtttctgcctcagtagtatgaaagaggttccaggagaccctccctggtcccacctctcctccccatgcttctctaagctggccctgctgacagtttagaagttgtcgccacaaagtaggcagctctatagactcacatctcaggaaaactgggttaaaatgttttttaaaagaaggtaacatatacacaggtaaaaatttgaacagcatgaaggccctgtgatgagaagcgggtcttctgcatatcttagaacccagttccactccccagagacagtcgtcaactattttttgtttacctttagatagtttttcataagtatcttagaaatagattgattttgtatagtccctgtcctgcctcttgtatctatctagatcttggagacttgtccatatctgatcatacatgtctgtttcacattgaaccggtctcctgtaatgaccattaggttgcgtcccgcctcactgctccaagcaatgcggtagatgtccttctccatgtgctcttgcgtgtgcagtgcctttcagtaaatcatgagaattgccaggtcaagaattacatgcattttaagtttcagtagaaattgcttcatgcctacccttataacactactaaactttaaattgttgccagagaaaatttttatttctttacgtaattcatgtgcagataggagttcaggttttaatctggtggcatctcagatcttggtgggggcaatgccttttgacactttccataatcccctgtctcccaaacaaccactaaaatgaaatggtgatgactgaattgcgtggtcagtgcttatttatatatagtatctgtgctctctctgttccctggtgatgtggtggtgattgaaagcagactcactccaaaagaagtagctctaagaattgccatggcttttgccactcgagtgaggcaccagcgaggaatgttctgtctctccacacctctgatgggagtgggtgaaagactgagaccatttaatctggaggattcctctgaatcccagcttgaagaggcaggaccctgtttatctgtccctcaactaaattttgtcaacagcatgcaggatccagcccacacccgaacctcttatctgtcctcctgatagccaactctgaagtaatatatttaaagccaaaagatggggtagcctgaagattcctatttccccaaccttcgtcctgaagtttgggagggcccaggtcattctgaactccaaattcccatccaaatccttgtttgtctcctggaacccataatgtcgaggtccaggcacgggaagtgatcaggtggtttactgactagggatgcctcttccaaggaagctgtgggtcattgtgagcctgcctcattctctcttgactgctggaagggaaggggcccaggggctatggcagagcatgggaagctaagctgcctatagcaccatcttgcacctctgccgtggcctcccgttgtcgtggggagcatggtcattgaggaggaccaggagctcatgggcaggcgcaatgggctgcttgtgaggtgaccacaggggagatctgggtgtactaagtgggggcggggcagttccagtgagctgagaggaagcggtaatggcaagatgactcattctaggaattggctgcagcttctgggagggagttggagactgccttgtaatccattaaccatttgtctactgcagggctttaaaaaagccagcatcacaacacccaaagtcagaaaagaaaaagggggttctttggaaaattcatggtctcagaatgcatgtttaatggatttgactccaagtgaattctctgggccagaaaaagacaagtgggctttctggaggccctaggaaatgtctcaggttgctctctgggttaccagcaaaggagtttcccaagcaaggctggcctgttgcacctggcagcccttggcattctgagggttccaaggccaccttttcattcggttcttccccactgaaatgggcccaagaaggcttacttatatttgcaagtttccgtgacttgctcagagggtcgtttttaccttatatccatttggagaggtgtaaatgtaatattaaggattctgagagtcacacatgccgtaagttgacttattgattggggggggggtgcaggaggagtaggagagaagtaagaaaagtggggataagaagatagggtggtcatgaaggggacagagacagtttttgctcatgagggctgagaattaaattcagaagtctttattctttcagttgatttagaaggtaattaactggattgatgactccaaattggacctagaaaggattgtcagcagtgttcttcttagcaccttgggagtgagaagcagtgaggctgttttactgccctgagtcgaaatgaaacctcgtatcagcccccatttccttataaatggaggaggttccagctagaatcctgcttagagcagatgggctggggaagaagccacttcaggagcctgtcttctcgccaattaatgaaattttgggtaatcacaccttccttttagataaacaagagagaaaatagcctttgttttctggagggatttggttagtatttgccagatgctagacactttctttcacagtttaatctgcttctgatagacacaaaaagttaatcattgcctctgaaagagttctttttagaggtttgtatgtgtgtacagcccctttctattctaaatctgtttgctggttttgctcaatttttaatgaccagaatctgtactggcttattttttttcttaactgtgtaacactcagagtattgattaactatgggtatttttgacagcgtgagaaattgatgcttaccatctgtctcacctttttgtttgtttttgtagggggatatgagactttctactcggaatatcctgagtgttgcgtggatgtaaaacccatttcacaagagaagattgagagtgagagagccctcatcagccagtgtggaaaaccagtggtaaatgtcagctacaggccagcttatgaccaggtacgtgatgtgatggggaagaggtatcctgagtggtattctgggctcctgtctcccttccttcctcagcacctgactgttctctccccactcagcaatgatggttagttcttttgtggatcagggtgttggcaaaatcccctggctttagggagcttctgttgcttgccagcttgagcttccatccaagagtaaatgggcttccttccagcaaacgagctgacaagagcaaaccagccacaggatgcttggcagcttctggggaaaaggggaagtgaaagatacattattgtcatctggcttcggaggttcagagaagctttgaaatactggtctaggtttccctgaagacatttcagagttgactttcaggcttcctgtgttgcttttctttgtaattgtccatgctctgcagtttctgcaaaccatcccggtacctgtcaaggtgtgtcttattggtatgtttaactgaaactggtgttggtgggggtgctacagagaaagtcctgtttgggtggctaagtaggctcctctaaggggttcttatgcttacaattccacagataactgaaaccagaggaaatcaaaagatactagagggcttcatgtttctgtaaactagtgagtttttgtttttcttctaaaaatgagtgctttgtgataactcattaaagggaaaaataaagtggaagggggttacgtagcaccatccaggaagatgaaaaagcaggtgagaatccaaatctggcagaagccagagatcaaaacctaaccattttacggaagggaaaagaagtgttctgtgacaagtgagatgattgattttgcagagtcctacagctggttcaaggcagcatcaggctcagaacccctttctctcagctctctgttgtgattatttcaggaccttgttctgttttccacatggcctctaatctagacacctgacctggtgggagtaacctttcaaacttttcacataaaccaagaacatacccaaatcataagaagaaagattgctagatgctaaaatgccagctccctgccatgaacaaaaccctgtccctggggataaacttcaaagtaaagccagatgaccttttcttgaacgggctccttggtcaggaatcctattagcttgtccagatgccagggttaggattttgtttgttttcctttaataaacatccttacagtatatgacgagcctgtggctttcaagctgtggacatctggcctagctagatttctacttttgtttgtttgtttgggttgtgttttccccccatttctcagaaagtgaaagagaaataagaattggcagaatgttgcgaaagcacggcacatctttggccaagtgaggggtgagaaagccctgatgtgtcttcaagattcatctggggaaccccctaatgctacttcttagaaatgcttctgcatttagagcagccagatgaggttgtgttaacttttggggtttctgaaggcctttggcttcttcctcttggtctaaacagaagttcaaaaagggaaagaaatgtagtttcaggggtgtgttgggctgagctccaaaagaaactggataggatcccaggtctggtgtatcagcaatttccaggcactcaggagaggaagagatcttgagtcaaccatccagcctgctccttaaagggcgagcctgttagtgtccattggtggggacccataagtcatcagtggccacgtgaatctggacttggaactctgactcctttccaaagaactttgtaccacctctgctgttttcctggtttctagctggtggggatgctgtgcccagggagtgggtccaactcaggtcaggactagacctgcttggattgcctaaaaacctgtgtcttccccatggagagaagccatgttctgttcattcttcaatctctatgacagtggcagctatgtgacgtgccaggttttaatgcattcattatcccatttacaccttaccaattatccagagaggataggtattatccccagtttagagacaaagggtcatagattaaagaagctatccaagatcacatcaggtagtaagcatggagctctggaacttaaccaagagctccgctgtctgacgcccaagcccaggttgttaaccactgcaccactttgccaccaggaaggctgctctgtacgcatggaagtttgggaggtttcgaggaggtgatgcagatggacattttatctctagaggaagagaggaaagagggaattttttccttcctgtctttacctgaaatacttactttctcatattgatcactattgaaatggagtcagacaaggccttgcatctcatgctacgcaatcagttttgggtttcagcccagctctaccactgactagctctgacttggacaagttattaaatgcatctgagcctcaagttgcccatccgtaaaatgggaataatgttacctacctcacagattttgtgaaattggtatgatgtaggcacatctaaagggttaagcccccagaggccagccatagtagatgctgataaaaataccagttgttattaccgtatgtaaaatcttgtgtaattttctttcaagtgactgaactggcctttgcttaaacacttgacttctcaggaaacaaaaagctaactccgggtgtggggtaaattgagaattgcctgtggctggcccctgtcccacgcacccttccctgttagggatctggctgagagtttccattccgttcttattccagggcaggaaatggaaacacaggaagcagatggttggcatgggaaaggctcccaaagacacagccactgtcacccagccccttgtttccctctcagtctctaagggctcccatttttccaaccatcactagcttttctgccaccttcagagccctgtaaatgctgtgactgccagagtctaaccagcggttcattttagttttgcctcaaggtggatggtctctggttcccccttgactagaaatctggggtgtgggtagcctcccaaaaggatggctctgtaagcgggtctcaccagcaccttcaacaaacccccgtgtgaagaaggtcagaggcggggaagcccctctgcttgtggcctgacaacattttttatctaaagattctgagtaggtagtggttattttcatttctaaaaagcatacttttttgtggaggtggaggtgcattttaacatctctaaaacctgggtgcatcttaggatcaacagtgtcttaggtttgatgaaatacaccatataggctaggcttggtagctcatgcctataatcccagcacttcaggaggctgaggtaggaagatcgcttgaggccaggagttgaagaccattctgggcaacatagcaagaactcatctctaccaaaaaaattataaaattagccaggcatggtggtacatgcctgtaggcccagctactcgggagactgagacggtaggatctcttcagcgtaggaattcaagattacagtgagctatgattgtgccgctgcactgcagcctgggtgacggagcaagactctgtctttccaaaaaggaaaaaaaaaatacactatgtaaaatgtcaaggctgtaaaggaggacacacaccatgttgagtcctggtccattttatctgtaaagaaagcaagactgtcccaaggcataggagattgccctggtactctcagggcagctgtaacttcaacacaggcctgtcaatttttcccatattaccacatggcttctcatccttgtcagcgcaggaaggctgtcggcatatcctgcctcctggatatgtgcaaaaaagtgaactctttgctgtgtggattttgctgtcattgagtcacaaggcagtcacataaggtagagagttggccaggatggagatacaaccacacttggttgaactgccctggctctgaactccacttggaaaccagaaagggaaccacccatcttaagaaacaaataggtcggagttgttttttcctctctcaaatgaacaagctaatccaatatttcctgattgtcctttgtccctgcatccagggtggcccagttgaaatccttcccttcctctaccttggaagtgcctaccatgcatccaagtgcgagttcctcgccaacctgcacatcacagccctgctgaatgtctcccgacggacctccgaggcctgcgcgacccacctacactacaaatggatccctgtggaagacagccacacggctgacattagctcccactttcaagaagcaatagacttcattggtaggtttagccattccccttcagttattttgggagcccctttggggcatgtgttcttgacttttgatgccctgatggaagctaccttcactgaaagaaaagtgtcttgtatatgccgctgctgagagttggagccaacatgggatgcagctaccaaaaaggtggaagggaggatttaagttgctatgaataggagctttaatttgcaagataaatgaattaatataattttatggcagtactcactgtcgatcttgttattgtttctagctgggcaggagctgagtgtatccctgcgtaatgctccacacaaggaaagcagggggaagaacctccctaactgtgcttctacgtaggttgggtttatttttaaaagcaaacagaaggattcagagagcactacttacgcactgagccccaagggcccccagcagctttccatactcttggtgaacggcttggggcaatttgttttgcattttcagctaattttggattaaagatagcacttgactcaagctccatgctgtatgcacagaaaagttggcatcttttgcctgctttctgcattcttgttacgcagttatttattccattgcatagacctgaaaaccgaggccttggcctctggtccctctgccaggaaagggctgtggccttagggtttccaggtcctctgtgttgcctggattgttctcccatttggcatcttctcctcccccatccatcttcctaggaggctggcctgacttttttctgtttcagatttgcaagtaccagtctctaaccttgtgatcatgccccgttttccagctcccatcttcctctttaacatacgtagttgttgaaactgacgcgtgattttcctgtctcttgttccaagggatgttggaggaggaaaggcaggtgttagcacagcaataattacttagtgcagatagcaattaaaggtcccccttgagccacatagtggccctctgttcaccacacaatttctgctccccaggaaaccctgacgagaaactcatcagaggcaaaaggccgagcctgtcctgcttgtcccctgagcctctgggctgaaatgattcctttggagcttgaaaggcagccaaatgatgggttcagggtgggaaacccttgacttgttctccctgtccctgggaatgccttgcccttctcagcctgttatttaattacctgggtagctacttcatgaggtcatgaaacacgcccccatccagttctcagaaccctccctccccatcctgtgtgtgtattgtgtctgtgtacgcacaatccacaaacccacagcagtttgaaagcacaggatgctttttctccgattgcttgccctgctaatggaaggagagactgggtctccccagtgagccatgtgctgaatatatgctgaccccttccaagggaagagggccatgtggaaggcaggctccgaggtgtcgagtgggctccagaggcaatacactctggaccctttgcattcttggatgtggcactaggccagttaaaagctaaactttgaaggaggccaacagaggagcgaagggagataggagcccgactctgtaattctagggacttgggggtctcccctttgaactaatttaaagagactgttttgttgtttcttttgagtcagactgaattggaggacacccctattgaactgctttggggtatgctgtggggtttttgttcagatggggaaactctaggattcctccctgatgcctcagaaattttatcttttagatcttgcagattgatttgcatactttgaccttggggcagggaagtggagggtggtaaggggaatgactttttcttttggcccttcaaaatcgtaaatgtttttgcgtattgtagcctgcgtagtgccagctacatctaacttcctgtgatgtaattgtttcctcactagcaagagagggaattggaaagactgtattttttgtggatttgatgtgtacgtatctttaacctttcaccccttcccatttttaatagttgtagctggttttctgggggcagggggctgggaggtagaacaggaagggaggcatcctcccctttttgtcatattgagctaaagaatgctaactgatggtggtagctttatagcagcgactcccattgttgagcaagatggaatttgtgaaagccatttatatcctccgtctagtaggcgtcacttagccagggctataattagtggccatgcgctatttattgtgtgtttggtggtgagaaccctgggagctgagccaagcatcctgccctggcacagccagacagggtgcccggagagaccggaaggcctctaccaggatcggggttaggttgttacccttagaatcagacctggagagacaagagttgcttctccaagtcagtctttgagcctgggatgctctccttagaaaaatgtatgtgcccaataaaaatgtgcacaatttcaaggattttccaatgccctcttggaaccatcagtggaacctaggttaagatggcatccccaggaagggactgctccaggtccatcgcctccagaggcagaatctgcaagtatcttgggaactgtaaagcttctgtgtgcttatgtctcttgtgacaatagctgctgtaaactgtaaaggtcctacttggggatagtctttgctgggaccccaaaagctctatcctcaccagtggggattaaagactggcagaagtgtagtgtagggccgtggctcttaggcaggcacaacagtttcatatctaggttactccagtgtttgattcttgtgttttgccattgcccttagattctaatcccaactcactcccaccatcttttcttccttccagactgtgtcagggaaaagggaggcaaggtcctggtccactgtgaggctgggatctcccgttcacccaccatctgcatggcttaccttatgaagaccaagcagttccgcctgaaggaggccttcgattacatcaagcagaggaggagcatggtctcgcccaactttggcttcatgggccagctcctgcagtacgaatctgagatcctgccctccacgcccaacccccagcctccctcctgccaaggggaggcagcaggctcttcactgataggccatttgcagacactgagccctgacatgcagggtgcctactgcacattccctgcctcggtgctggcaccggtgcctacccactcaacagtctcagagctcagcagaagccctgtggcaacggccacatcctgctaaaactgggatggaggaatcggcccagccccaagagcaactgtgatttttgtttttaagactcatggacatttcatacctgtgcaatactgaagacctcattctgtcatgctgccccagtgagatagtgagtggtcaccaggcttgcaaatgaacttcagacggacctcagggtaggttctcgggactgaaggaaggccaagccattacgggagcacagcatgtgctgactactgtacttccagacccctgccctcttgggactgcccagtccttgcacctcagagttcgccttttcatttcaagcataaggcaataaatacctgcagcaacgtgggagaaagaagttgctggaccaggagaaaaggcagttatgaagccaattcattttgaaggaagcacaatttccaccttattttttgaactttggcagtttcaatgtctgtctctgttgcttcggggcataagctgatcaccgtctagttgggaaagtaaccctacagggtttgtagggacatgatcagcatcctgatttgaaccctgaaatgttgtgtagacaccctcttgggtccaatgaggtagttggttgaagtagcaagatgttggcttttctggattttttttgccatgggttcttcactgaccttggactttggcatgattcttagtcatacttgaacttgtctcattccacctcttctcagagcaactcttcctttgggaaaagagttcttcagatcatagaccaaaaaagtcataccttcgaggtggtagcagtagattccaggaggagaagggtacttgctaggtatcctgggtcagtggcggtgcaaactggtttcctcagctgcctgtccttctgtgtgcttatgtctcttgtgacaattgttttcctccctgcccctggaggttgtcttcaagctgtggacttctgggatttgcagattttgcaacgtggtactactttttttttctttttgtctgttagttatttctccaggggaaaaggcaataattttctaagacccgtgtgaatgtgaagaaaagcagtatgttactggttgttgttgttgttcttgttttttatagtgtaaaataaaaatagtaaaaggagaaaagcacttcttcatgttgttggtgaattgggataaggtaggaatacccttgggtggggacccagcctgcttcattgggatttatttgtaaatgaacaacagggtgatggtggtggaggtgcagctataggcatgacgatacagaatgttgctttccaactgaggggtttccctaagctaaccggcaagagaattccttagtgcaggcctcatagggaggtggtgagagtatctgcccactcagggcccttcactgccatcgcactaggcaaagagctctacttgaacctcagattcctcacctgtgaagagtgagctgagttagatgatcccaagagtcccttaaagcataaggcccttggttccagtaagcctgagtgccaagcttgtggccagctacctccctccagtgcctggcatatggcagactcagaaaaggctgggtaagtggccaagggatggagaagtgaatgaggtgaaagtttgccctgccagcctgcctgacgccctctttccactcttgcaactaattctagataattccccaggagttccaacgtaaatccctcaatgagtaggtttaaatccaaggctgaatcgacttgctttgtgagtaacttcctctgcgtaggtggaggaaggaaggggcagttgtcagcttctccccatgattggctctgcctgggctccagcctaactcctgggtcctgttcctaatctgagggaacagggagctggttggggtttatgccatcccagtcagctgataaataacagggattccagccatacttctcaatgctggagggtccaaagggtgtccagttctcccgacatgcattgtgtcaacaaatagcaagatggtggcagagcacaggcagcccagctctctaaattcctcacctcaaaggctttgcgtgaggtctttctctccacctgtctttcctttccccaactgtgttcagaggttccttggaaagtccacagatgagaaggtcacccagggttaggatgctgaatttctttcagcccactcccctcatctgtgtaaccaaacagcttccacagtgaagagcactagaccagatggtgagaagttgtgggttctagcccttgcccttcccccagctctccagtggtttggagctaatctccaacctctgtggactagatttctccagggctcttatctagctggtgcctaatccctcgtggtgtcccatctctgagcctctgaccagccttggagtgtgtccctgaagcctgcccattgtgtgggcctatgcaggtgctgagtggctaaaggaaccttgggtagggagagccggggagtaggaagctggatgcaggctggggtgatgtgctaagctcagcccacttgctgacatttgctttattgcattaaagtctttctctgaagggtgagtaagtcctctaaatcaggcatatgaggattgctcatcggcgggtgagtcactggagggtaagccaagtgaagccccacag

SEQ ID NO: 173 - DNA, 7459 bp, Homo sapiens
  source 1..7459: mol_type = genomic DNA
agaagtggactgacaaacaacaaacccacagtaaaacgagaggaagtgctggggaggccagctgtcggcttgagccaagcagtaggaactcaatgtatgcaggttctaggaggaaagagataataatccacaaagaggaaatgcactaaaattatccacagcccatatttttttaaaaaacgaaagaaagaaaaagaaagagaaaagaaatcagagaaaagaaaggggggaaaagcacccagctacttgagctgcagctggacaggaaattgctaacgctgcttgcaaatccttactttgaacaggcagtttagggaatgccaggagcggaaaccgttcagaactggattaacacgagccaagttgaactgcaatccacttctcctttctgtgctcttgctgacttgggacacccaaataggacagactgacttggtatatatatatatttgcactatttctgtttgctttttatacttagttgcttaaaaatcaccatggacagttttatatgattgccatcgaatgaaggccacttgcctcctaagttagtgtagacgaccaagcagtcaactcatgtgccatgtaggtgaaaagctcattcttctccccacttcacatgaagggactgagctcatgcaaaaagagccccaaatataagtacgttctagttcttttgattccatacacctgccttttattttggtttgtgtatttttacatttgaggtaaggagagggtaggtcccaagaaaaatggcaagatataaagtctttagcttgaaaagaaactaaaataatccccacaagtttcaataagggtttctgacccacatcccaagccagttaaacaaaaaagcacattacaacagggatgacaaagttgcctcctaagtgccaatgtaaaattctaaagccatatcctgacacggtgaggaagcttagatatgccttgccatgcgcatgctaggggaaaaagtggagacatcattctggattcagcattctcacactaggatatctgcaggtagaattgcccatgacaacagactggaaaaagaattatccctacttcctctttggcattatctcagcattataaagcagaagatcctgacagtgaaggatagggaggaggttaacatgtggctgtcatcttggtattctgctacacctctctgtggttaatatccaaattgtattcctcagcaagctatgctctataggttcatttttcttcaggggctttaaaatcttaagccggaactatactcataagaggtattgttcatatacacggtacagtcggtccattctaggatgtcatctttattcgtggcaaacgatgaatttcataaactgctgctgaaaaacgttctaggaaaagcttaaaagaaccttgccctactatgcctacaagtcaaaatcaatccctgaatgaaaaagttctaaaatgtgtcacttcacacataggtataactgagtttttaaaaacacacattcaatagccaaaatagttatttattaataatttaaggttttacattcttataataaattccagctctaaactttacaccacgaacataatggagaatttaactctcccttcttcacaatcaaatgcatttctcttatcaaatgggtacccatgctcacacacacacacttccagttttatacaaatttttttaaaggaaagaaaccaacccaaagtattgcatttgaggtgacactccctgaagaattttatacagaggtaatatactgtttagcacagctgaaggtttttttattctttctttttttaaagtgagcccatgatttggtgtctttcccagattatcccctttgcgacaacacaagcaaaaatatttacaaaggtaaggcatagtcaaactacataaagagaaaaaatcatgaggaaaatacatgaaaaagactaaagacttcgccataacaaggtcttagtgataatagtgtccgtaaagatgtcatcagaattggtaaagtcaagcatgctgcaaatataccctttggattagaaaagagcacaattttctttttttgttttgttctgttttaagaagtggcatactgctctttctccctttggataatttcttttaagcccatcaaaggaaaaaacaaacacaattcaaacaaacactgtcaagtgattcaagatcaaatatttacaataatcaaatggagtatcagatttttttttccaaactgataccacaaatacagagctgaaatctctctttggctcctctatatgcaaaattgaattagtcttcattgaagacaattatatagtcagttccagatgcaaaaggaaacagccttacaaggccctaaagaacacatgctcctaccctatcatttggttctaccctatgcgcctggaagtcctcgaatcccagtccctgcatgggtaggctgtacacatgggtacagagcaaacctactgcctgtatctatacagcatgtcctgttattccaaagagaatggagcaaatctctctgttagtattaaccaattccgcacttggtaaccttgtctagtacagacagctggtgtcattttgacacctggggccacacacaaagaaagcagcccagctgatgctgccaagagaaactgctgaagggccagacacattccagcaaggaggggtgtggggtctttcacgtagattgcagagagtccacctggtatacattctggttggaaggggtggtaaaatacagctgctgtgctggaaccctgttgtcacatgggctgctgagtcccagcgtcctctcgaagtccagcagctgacccatgaagttgaagttaggggatatgttggattttttcattttgacaatgtcataggcgtcgttcatcgacagattgagcttctgcataaggtaagccacagtcacagtgactgagcggctaatgccagccaagcaatgtaccaagacaccacagttcttgccccgggcttcatctgtgaacacaaaaagaaaagcaagatctcagcagactgaaaaccaccctttgtgaatgatcagtctaaaaactgaacttgaaaacataataataataatagttgtgtgtggcagttgagccctacaagcagcagaaaatgtatcactgaaatgaaacatgtacactggacacaattacatatttcagatattttctgaaaagagagcttttgtattaagtttctgccaacaaaaaactccttaatgggtgcattctttgcctcggcatgtgaataccagaaaccctgcaatatgttcgtgaatgccttttacacagacaaccagactgcaagggtctattaaattatgctccaaatgttgtgcagctaacaatggaggtattcaggcattttaaaagagagagggaagtcacaggggacggcccattaggaggaacaggatgtcgacacggcctgaaaatgagttcctttgtaataggaaatgcattacaatgcctggagattcacttctcccaggcttccagcccacagttcttcctgctgggctcaggttacccactgtctcactgttaccagtatcaccgcatcattcaactggataacattcagcattcatactgctttccaacaactaacttgatgtcctaaaataactcctagatgtttttaaattataaagcaatgctggaattcctgtctatagtgagtacttctatctgacccttcccctgagtccaaagactggggggaaaaatctgttgtccgattatgaacgactgtcaatgactgaattcaaagattcaagaaacagcgtttcaaatacacctgtgatctgcagccatgtcaaaaggcaggttttcttcctttagcaagaagataaaccagaattaaggacgctctaggaacattagagacctgcagtcagacaaattagcaagcagcaagaacgattaacagcttaaactctatgaatggctaggaattttgcatttaaatgtcagagcgacgactattaattagtctcacctatgaaagaaatggcctcagggaaaaactgggacaggttttggctccagtgatccgagatggggatttgcttgtatttaaactctcctgcgttctcaaagagattcggcaaattgggggtgacgttcaagatgtacttgatgccgaattcctccaacacgtccaagttggtggagtctttggcacagcccaagtagaggaagggcaagatctccactgggaaggaaggctggctgttggacagcggactaccatccgagtctgttgcactattggggtctcggtcaaggtcagactcgatgtccgaggaagagtcagagctgatccgcaggcccccgagccccagcactggcaacggcggcgagctgctgctacacgagccgtctagattggtctcgcaatgcagggagaactcggcttggaacttactgaagccacctgccagaacgagaaaagcaatcatctaacctgagaagccgtagtagttttcacagcttgtaagaaccgcagcccggcgcaagaaacaccacaagcatcctacgaaccccctacatacagaaccatctataagagaaacacactttaaatgtgcaccatcgggaatggaacgaacgggcccgcctcgccagggaacccttattcgcttgaatccggaaatagacaaaatggcaactttttggaatattttgagagctaagatgtgccaatttgcatccccaacaatctctcccgtcctgcaaatcttaattcaaaatcgaacgatagaaaacagggtgatggtggaggatgttctggctaagaaggcgcagaacccgttagaaagaaaccgccggtacccgcagccggaagcgagtggattctgagccggcccggttctctggtgcggaacgcgcggttcgcggcccctacctcgccggctgccggtccctaggcgggcagcgcggctccgaagctccagctgagcggagcagaggtattttcaatccacgcgccccgcccgcagccctgcgcccctagccctgccccgcgcgcggagttccctgggcgcgtaccttccaggtagaacgcccggcagccctcgtccttgagcttcttgagcagcagcccgagcaccgactcgccgcccgtattctcgttccagtcgctgctgctctcgtcgtagagcaccactgtgtcggtgccacagcgccgggtgaagcggtcccggtcctcgccgcgcgtgaagagcgcgcgcaccggcaggttacccttctgcaggcgccgcagcatgatgcccgggatggccacgttgatggccgactcgatgtgcgacgactcgtatagctcctgcggccggcagtccatcagcagcagccgctcgttgcccagctccagctgctcgttgagccacgccaccgtcttgctgatcgccatttccgacgcgaagggcacgggtctgagcgtatctatcatgggggtcgagctgcgggagagggcggggtgcctaccagacgcccctcggggcaggcataggccgagcgcaccgcgcgcgaagctgccgctctcggagcggggtttaattccgcctcgccttacccaagccgaggctagcggttggggcagacgagacagaagtaaagccggaggttctctctgcacccagctgcagccgctggctcttagtgtcaatgaatctctctcaatgaagctgcccagatagtttttgttcctccccagtgaatgaaatccaattaattcggactccgtgctactgagaggggaggaaaaaaagtctagcggcttctaatccctccctccaaggctgcacctcaaatctacccgggcgtctttctccccggattatttaagactcgatttgctatctcttggactcagcctcgcacaccccctgcgcgaggcagctcctcaatggatacaaacagcgagcgtctcaatggatacattctccgggccagccaatgagcgtgctgcggaaggggctgttgccgtggggacgggccggctggaacaggttgtgttgatgaattgttaatgagtttgtcattcacaaaaacggaaaggaatttccgctccggataagccccagtgcaaacaagctgcaacagcgggctcggcgggaggaaggagaaagaaggggaggcggcagcggaggaggagcagggcacataaaccagggcacttcagttgtctcatgtttccttctgttgagagttcacacttcgcgtcggaacttttgcgcaccaatggcgcaattagcatgcacaaaagcccttgttcgcgacgcttgcgttcgcgagctagctttaggaaaacttgtgctgacttttcgttctttgtattcccttcaaactcatttggacccaagttcgccttaaccctcccctcccccaaccccccttctttaggcggtgtgtggcatttgtttgccacttttaaaggcccagctctgtttgctctgatgttcttttagccgaggctgtgttggggctggtgaactgactgggctttagtgaccgatgaggtgttaaatgctaatccaacatatttcgaaacaaaccaggattttgttgaaacattttaaagcaaacaaacaaacgtctggttgtgcagaaaatcagaagaaaaccttttttcttaaaataacattttattttcattaaaacaatgtagagtgcagaaacaaactcttaggtcagtccagtgcttttactgtattccgctccggcggcgtggggagttacaagccattgttcgggggaatctatatctctccccccgccccaccaccaccatcgcctgctgggaggtcgcgctggttaatgatttctgggcaaggagctcggcttctgacgggggagccggtctggcggggctgcctgagcgaggtgtgctgggacgcgccgggccgggccagcagtccccgccatgggcgaggcgtgaggaagtcctcccgcaagacctgcaggctgcgggggctcggcaggggggctcgacgattggttacagttggcagggaggcatgtcagagggggcctccccagccctctcctgccgccgcctcctccctttgtccagcgccgggcactccggggagcaccagccgcgcctgcgcgctgcgctccctgccaccgccccgccgtccccgtctccccgcttgggcacggggctgtgcgcgacgcagtggacgggtgcggggctcagcgagggactcccgggtccatagagatctggggagggtggggggagcaaggacgagtgcctgccgggacccccctggctcctcgctcccaaggagtcgaggggaacgtctctaccgcgctgcaaagccagcaggtaactttggggaggtgcgggccaggccagcgagcagcactcggcccaggcgccgcggggcggacggattggaagccggatggaggcgtggccgggtgg

SEQ ID NO: 174 - DNA, 10524 bp, Homo sapiens
  source 1..10524: mol_type = genomic DNA
cttgggcacgctggcactgccaggcacttactcggtttgtcgagggcccagcccccagcccagcacccgcgggcttccccaggcctgggcgagggcagcaggagggaacaaaggcccagtctctgcctgctcaggcccccaccccctttgcctgcccctggcacagaaggaacagggccctgagggagcccaggagcaacagcagcaccgcccccttgtcgaggatgcagcaagaagccccctcctacccacagaggcctgccggctgagcggcaggattcttccacgctccacatgggagtgttagggggtagaactgagggactgcagtcacacagctgagatttgcacccaggccccacagtgggcagaacctgccctctacccctctccacaggctgcgcatgatggttgtgactgcgttctggtgcagactaactgaagagcagagatgagggagagaagagaaggagagccttgggcaccccaacagagcaagtcccaggctgagccgccctcaccctctcggccctacctacctaccttccacctggatccagctcagtgctgatcacacagtttgctgaagggatagagctggggaatgtcagaaatggggaaactgagtcagcttccaggcctcttaagtccttgactggggctcacctgatccagccagaggcaagggagacctaagccactctggagcctccatttcctgatctgtaactcggggcttgttgtccactggggcctcacttccccagactgtggcccccatccttctccagacctcctccctgctctagcccagggcctcgcttagacccccacccccaggggagccttgacagaggcccatgcccacccttccttgtacacgcctgagcacggctgattcctccctgtgagcccaggccaataatgtgctcttcatgccacaaagctgaaaagcactcaggaaccaggtgcaatcggcctaagggacctgtccaaggccacccagcccttaagaagcaaagaagggctgacctgtcactacccactgatatctcaggacctgcaggggcagggttaaatgcacattcccctctcacccacacggcagcaagagaaagagttagggtcctgggggctgcaatctgggcaatgcctaagcagacagcctcagacaatgaagggcgagtcaggactcagttgtgtcaacttggtatatacaacctctccaagccttgatttcagcagaagcccacagagaaagccctgatgcctctgcctgccagtgcctaagggctggggaaatgccacctgccccagcttcatccagaaactgtggctgctccctcccatctgcggggcaccttgattagtctaagtggccagcagaccccaagcagaaccaggccagtgcctcacacagagcaggcactaggatgcctgtcgacagcactccttcccctccttcccaggccccaagcccttatcggacacgactcattttaaagaaaaaataatatttatttgcaatataaacaaagtcccgttgttggttcgggatatatatatatatgtatgtgtgtgtatatatatacgtagggtcacaaatcttccttcataagatcataaagcaaaactggccaccttctggcataccctcatttacacaaatctggtacatctttctgggttttctttttaaaaataaaagagagaaaaagagaaccatgtacagcatggaagcttgttgtcaatttctcgactgtggcaagattttaatctgctgcgctaaagaatccctgaaagccacccccgtgaggtaagaagcagtggggcagagtttttctgtggcctcactcacatgctgagtgctgctccgtcagggaccctggcctgactcctctgcctgccccaggcccccatgcagtcctgacacctggtggaactgaggctggagaaggaacaaaactggaggaagataacggaatccgtggcttcgttctgtggaggcagggggaagtgaacagagccttaccccccttctgctggtccatccttgccccacttgcccccgccctagggttgaaatgggtgcaagtctcctggcagtagaaggcatgggcaagatgagggcagggcaagcttccaaggggacaagggggctgggagtggccagaccaaagcaacagctagggagaaggaagaacctggaggtcgggctgggccccaccacctaatgtctccccagccactgggcctccactcccagttacaacaagagagaggaaaggaagagagagggagggggggagagagaaagaaagagagagagagggagagagagaaagagagagagggagaggaagagagagagacagacagacagacagaagtagtggctaagtatataaaagggctcagagcccaggccttcttaggggctgaccccagagggctaatgctactgcctggcagccccctgcggcccacctcctgggggacagcggcagggccccagggtccccaccttctgcctcagggaggtctgcagggaccaccagagggatggatgagacggcagaaaatgcaaagaccaccatccagcccaccaatcacaacttgcagcagtcatcacaggcgaatgcagagctaagtcagactgggccaagggtgggaggcggcacgactgggggtcccaatacctgaagagcagtaagccaccccttcaagaagggcccgctgaggaaacagaggcttcacacatgtgcaaaacgcatttggtcaaggtcaacatggcgtctgtcttttccattaaaaaacaaaaacaaaaacaaacacgatacttgctttttgaaattgaacgaaaaacaaaactgaacatttctctctcttgcaggatcaggaaagggatgaaatactgggttatacaatccactgttgcatgtagcctgaaaataacactttttgttaaaaaaaaaaaaaaaaaagaaaaatcaagaagagctcaaacactctttgtgctccagggagcttggatttacctgccaaaagtaaaaagtaaactcaggtccgtggatgtgtctttaaaaaacagccaaactggctgggctgtcagcagaaaggagcgtcctggacaggatgaggccctggtggacgcccaaagccacgtgtccaagagccgaggcctctccagcaagccctgcagtgggagaccttgcctgcgggccctgcccccaaggatggtgaggggcgctccgacaccgatcagcctgggcctctgggcacaggtgacatctgggggttcctcaggccagaggtggcgggcttgggctctcccacctagccctgtggagagccgagcaggggcctggtgccatgccccccgtgcaccaggcctcacgtggactccagcgtattgagtgggaacaggttgtggttggtgggcgtggaaaagtagagctgctcactcgacgcgtggttgtcgcacgggctgcttagccccagcgtccgctcaaagtccagcagctgccccatgaagttgaagttgggcgagatgttggactttttcctcttgacaaagtcgtaggcgtcgttgagtgacaggttcatcttctgcatcagataggccacagtgaccgtcactgagcggctgatgcctgccaggcagtgcaccaggacaccacacttcttggagcgggcttcgtctgaaacacattggcatgggtcagggaggtgcctccttcaaggagccttcccacatgggtgggcaggtggggctggggcacagagggcagcatggtggctggctggtcttgcccgacccctgagggacctggccaagcccagtgtgggtagggcagcaacttggaatagaggtcaacagcactgctgtggagagggctctgcacactttagccccaaggcactggacacccgtgtctgtttcctcatctataaaatgggcctatttatgcacagtggtctcataaggacctgagccaagtgaggggtcaacaaacatgaactactgtaatgcctgtgatcatggctagtcctaccactgccatgtgcgttaacgactgctgtcacgggtgtcacctgcatcctcttgggtcatctgcaccatggccagtaagcccattttatcaacgaggaaacagacacagagacaaagtggcaagcccaaggccacacagaagctcctcctagctcagcgcccgctgctgccaggccatgacctgggactgggggctgggctggttctcttggagccgctcccatgggttgtccctgagagtcttctaggaaagtggcctgagggaggctcctctggaaggaagtaggtggcctggccctgcatttcgctctgccatctgcccagctagtccccaaggccttaactccagctcctaagacacatggactgggatgatggccacactatcacttgtgatggggcttcataagtgaggtgtgcttaaatgggccccacccctgccacttgctagaccttcctcaggaggcccatgtgtcagtgatatctcctaccacagctgactggatggggccaaccttcctgtcccctttcccctccaaccctcccagcttcccccagtgccaccctcagactcctctgtctgacacatagaagctcaataaatactggccgagctactgaacaactcagtcctgtaatctctcctggaccccggggcagctgcctctctgtgtgccacagctgtgccagggacatagattcacaagaggcagccatggggtccttgatgtccccaccaccctgactctgaaccctccaggagccaggcacacagctagcacgcaatcaatgccttcctacaagatgacatacgggttcacccactgttcttcgttgcctttgtcctgacagagcttcctctcccatcccctcccaaccaaggagtaaagcatacagtaggtgcttcctccagactcagggactgacagggggccccatggctaaggcactggggcaggatcatctggcaaggagacagacattgcagcttcatgaggagctgtgtggtcagacctcgagattgggggtgggaaaagggggtgctgggaccagcctccagtggtgacaccaggatgtgaggaacgcctggcctccaaacccacctccaggtgatccaaagacagtctgtttctgctggctttatttttggccttttcagggtgtagctggtgactgatcctgtcccactgactcctaagggatgcctgggcctcaattccttcacttgtcaaatgaggaaaaaggtccccctacccagacggggaggagctttcaggaaggataaaggtacccactagccaggcccagcctggcgaagcctgcttccctctctctattcccctccctcgttgggggagttcaaatgctgaggcagcacccctagccctcttgacccagggggtggtgggcagggctgagaagctccaggcagccccagttgcagcccctcccccaggcctcagcttccttccttcctcccagccaggcacctacttttggttcccagtaagcggatgaggcggggaagcctcccacttcctgttgttaaagctagcccagcccagccgacaccaaaacgccctccactggacacagccaccatcgggaaaagacagcccgggccacccccacaccttgccactggaggctgggcagaaacattgggtcaccaggctcagagatagagcgtttacattcatcctgagccctcgtgccccttccttgcaccctgggccaggggagatgacctgtggtctcagcctccagctggccaaggagaaagcagtggggacccgagtctgctgaggctggggatacagggactcgaagggcactaagccagacagcaggacacactgctctggggaaggcctttctccactcccccaccttctcttgcactcctccctacactccaagcaagccctacaggctgcagagagcatctggaggctgactgagctagcagtcaccacatttcaatagctgcctgtttggggtgtgcctctggctccagggctacctttcagccctcttaggtccacattaaagcccaaagaggcactatgacaaccccatcctggagagacacgtgtgctgaggcgtgatgcggagcaagtgagacccgtgggaggtctgtgcgctgtgatgtttcagcttgctaagcccgaaacaacatctaagccaggaaaacacaagctggacagcagagagcccatgacgtgctgtcagctagggggagctcaggactcaggagactgctcaggccccaacaggtagaggggcccaagggactcggtgactcacagtaggcctgggtacacccacgggcacacgctggcacacgtagggcacacacaggtctcaacaggcccagaggtacccagtcaggcgggggcgccacccagagtcctgcatacaccttgatgcacccacacccccctgcccagcacacagcacctaccaatgaagctgatggcctcagggaagaactgggagaggttctggctccagtggtcagagatggggatctgcttgtaggtgaactcgccgccgtgctcgaaggcgttgggtaggttgggtgtgacattgaggatatacttgatgccatacttgccgagcacgtccaggttggtggagtccttggcgcagccgaggtagaggtagggcaggatctggacagggaaggctggttggctggatggcacagggctgccgtctgactcggtggcactgctgggcagctctcggtccgactcgccgtcggagcagtcagagctgatgcgcaggccccccaggcccagcactgaggtgggtggcgagctgctcggcgaggaagagctgtccacgttggtctcgcagtgctcagagtactctgtttgaaacttgttgaaaccacctgtgtccagggtgagacagggcctgggtgagaggctggtgagagcccagatgggctgcacaagaccagagatggccaggactctgcacgccaaacaccacagcacccacggtcagcatgggccatgccaagcatgttacacgtgtgccctctctcgtgttctctccatctaaaccatgaccacttcacagataaggaaactgaggccccagaaggtgaagtgacgtgcctggactccaaactggtacccataacacttcggggcccccagccatggcaccagctttagggcacttgaggacaggccccagctaattcctcttctgcagctcccacgcacacctagcacccatgggtgttcagtaacagctaagtggtaaagaaaagcagacaaccccatcttagccagcacctctgggttggcaaactcctcttatagatgagaccacaggtgccagagccacatctggctcagttagaggcagagaggtcctgggcttcctgaacgggagtctagtggttgcccagccccgaaactacagctggggagggtagtgggaaggtactggctggccccttcccccagcaggggcaggtttttgaagggggtcctggctccacttctctagaaccctcccttagaacacaagccccacccccagccttggacctgcagcgggggagggccactggggcgatacagggacaggagaaatggggagccccttgcagcgaggcatgggccctgcgcccgagggtgccgcaggcctcccctcccctcccgcccgccccgctgccagcaagaggccattttggaatgttaattggaaacaccggcctcagccactcgccccccggtgctacctctcccttctgcaagctccggggcagcaggctagggacctgggggtcccgagagacccgggccagggcaatggagcctgcccataccctgccccaagcgcctcctagaggcggcaattctccggtggaagaagcaattcccggatccaggagaccccaacccaaatggtctccatgcgctggaggtgaggatggtgctatgaaaggtgcccttcctgatcctggccttccagaaacacgaattctaggctggacttgggcgccctgccgcttttagggttctgggaggcggcgccttccacctctgaggggctccactggagcccaggcactactgtcgccccatcaacaggaaaaaaaaggaaaccccaggcaggggaaagtttgttccacccactcgaatcgtgccgagaaagggggcgcagagggagccccgcgcctgccaaaccacacagtggggacccggctccaggagggcggatgcgggccggggacgacgtggcgcccagaggggcaggccgagcgcgtggagaggaaagcgcctccaaggggggcgtcagggagtcgcgggggggccccgatcccgtaaggcgtctcggtgccgccctcaccttggaggtagtaggcctggcagccgtcgtcgcgcagcttctgtaggagcaggccgagcacggaggcgggagcgccgggctcgggctgccactcggccgtggcctcgtcgtagagcagcacggtggccgccttgcagcgcgtggcgaagcgctccttgtcggcgtggttggggatgatggagcggatgggcaggttgcccttgcgcaggcggcgcaacatgaggcccgggatggccaggttgatggccgtctcgatgtgcgacgactcgaagagctcgtgcggccggcagtcgagcagcagcaaggacgcgccgccgcgcgcctccagctcctcctgcagccactcggcgctcttgcagggcatggcccctgcccccgtcgccgcgcccgccccggtgcctgcgccggaccccgaccccgcaccgggctcggaccccgcccgggtgcccccagccgccgccgcccccgaagtcgacatgtgcgcccgcgctggggggccgcggagctggtttttcatggggagcgcgggcggcccggggccggggccgggcagccctgccctgggacggcgccccggccgcgcgggccccagccgcgtctccgggcgcccgcctcccgccgagctgcgcgcccgccgccccggcctcccggcctcccggcctccgtcccgcccgcccgcccggccctccgcgcgcaccgcggcctgacagccccaattaaacggcggctccggcggccgcgcgccgaggcgttctccggggggcggggccgcgggggccggcgcccgggcttaaaggcgcagcgcctccaccgcccctccccacggggtatgcgggcgcgctcgcgacccgagcccgggagaccagcggcggggccctcccccaccgcctccgcaccgttgccccctggactagctcggagctgactacgatccgcctagggaccccggcctagacgccctcatgggttcactctgcgcgtgctcccaagctcttctggacactgcgggaagagaggccctgggggcgtcctatgcctggcacccccaccccacattcacaacagcatagttttcctgggacggggcgtggtgggggggatggtcaagctgagcaacctctcctcctcccgcctgtcatcccattcattttttctgtcatcgagttcattcaacaaatgagaactgaacgcctactacgtgccaggcactgtgctaggcggtcaccgtttcagaggacctcatcgttcccctgacggtcacaggctccagacctgagggagagcgtctcacgccagcaggcctgatgggaaatcaggacctgggcaactggcggggtaggaagactcagggccgtgccaccttccgtgggcaggtgtggagaaatcctagaaaggaccagctttgggaagggatcgcgagccctttaagaaagctttacaagcggggtggtgacaggcgcccagtgaagcgccacgtgactttttccacggggccggtgggaggggaatgctcctttataatcagctttccttcccctgcctccctctcaacggaccaatcaacttccgcggtaggcgggcgcctgccatgcagatggccaatcctggccgaaagaggcggtggcggagggaggcggggcccgccgcggtttccacccagggcggggaagtgggcggggcctccgcccgccctgtgtgtcgatttgcaggcaggcggggcagcggaggtgaatggacccgcaggtagcgctagaacaaagcggctagacgcaggcggcgcgcttgcgtaggacctgcagtgctttccctacggagccagggtggcagcttgaggctggaccctgccgtctatctggtccattcttttgcctggcggggtgcccctccttggggcttaaccccccgactccgcccgaggctggtcggctctgagacaccttgcccccatccctgactgggggagcggtggtgcttgagggacggcctctggaaccccgaggatttgagctttccgctaacctctgaccagaaggcacgaaaaggggtgactcaggagcagtccccgcctgtctttcaagcgagggatagtctttcgg

SEQ ID NO: 175 - DNA, 406865 bp, Homo sapiens
  source 1..406865: mol_type = genomic DNA
tcatttcctctgcctaaggggccaggcccacctggttagctcctgctgagcttttatacctcagctcaaatgttactttctctggagcctttcccagcacttcaggttaaatcagatcctgctgcaatgtactttcagagcattgtagacattttcttcattaccatgattcgtttgttacaggcacttgagtggctgcttaacgttcatttgccccactcaagtatgagctccaagtgggtataatgtcaccatggcccaccgatgtatcaccatgtcttgcctagcaccagaggcataggaaacgcgcaaagtttacaagcatgaatgaataaatgaacgatcgagtgaatgagcactttcaagaggtagcccttaaagactgtaggggccagcgtgtcagaggtgtggacgtcagctgtgctctgtggagcattgtggcacacctgtctcagcctggccgaccattctagcataatttgaatataagtgtgtcttttctgagatggtgtgcatcctgagaaaaggggcctcttgttcaatctttatcttctgcatctaatacaggaaactatatcaaacacagaattcaaaagaaacatatattgaatggccacacttttcagcaagtttctttaaaaggatggcagcttctctaacttatatatcactctctttcattactcaaatcgggctatattccaaagccgaaacagtgcccaccacatgtgactgtgttgcagccatcctatcacctctggccatcaagtttccgttggcctacagcctatctgctgagtttttgaggcattttacaagtatcattaacctcatcatgttcaataactgtaaaagtaggaaaatcattgagtgtgcatttagaaagactcatgatcatgatggaatttaaagtgaaacaattttacatgagtaggtacctatctagtatttgtggaatgtttcactcctgtccaacaggaaaagtatcttattcatgtggggttaaaaaatattgataacagaaggctcagttcacacatgcctcctcatcaatgagccagggcacataattagttgaccagaaggctcgctgggattaattagcagctgtgtgtgaaaagcttggttcagatttgtagcacgaaggataggggttctagaatggccacttcctggattcacagttcaatcacgcaggaggatctcagggcttggctgttgaagttgctgggggctcttggctcctatatggaccggtgtgggcatgtgcacatccagctaccgccggcagagggcagcagtacgctgcgcgtgttcaatttgcatcccagattagcaaatccccaaggacctacataagaaagagggtgtcccagcactaccctaattccttttcactgggtatcaagactgatctgagtcattgcaaacacagaccttttacattatgttggactttggctcatctgaaatagagaaatgaatacacaactaggagctgccatcacagacaggaagtaactttaattaaatattgtgaaagttgaaaagtttttacagcttgaatttttgcaaaaaaaaaaaaaaaatttaacaatctctacagtagttaggttctctaacaattgaactgtacagtgtgtgtctattcaaaaagttttgataagaaggtgaaaggttagtagatttagagatgacttcatttaagctgcatcctagtacaatgtgaggccagggcaatgttatgcaatccagtcatccagaagctgtattttttcccccaacactgaaatcttaatttaattcttcatttcattttcttcttaaagccatattctgtatttaggggaacatcttttatttgtaaaacttttgtggagaagaaagaggatcagagggccagaatgtcttttcatctaatcaatagaaatagaagcaacaaaacacaaattatacacattttaaaggctctttggactttcaagaagagttctaaccactgcacatggctgacagatgggtagtgtctgttgtcaaggtctaagccggacaccttcccggctgaccgttcattccttcagaaacagttaaggggctcaccagataaaatatggctttaacttgtgtacatcttcaggccagcgcttaccacgcaaattcagataacctttctgagtaccgagaagcaatgcgtccaccttgcttacattttccagttttttttattattattagtcatcattattatttctcaccatgaaaaacagctttcctccctcccctaccctcccacaactcccctcccccacccaccccaacccataaaaatcgcactcttgacagcctagtgaaaaccattgcaaaatccatatgggggcatgcacagttgcagcattgttgtaaatgatttcttgctctactagaaaaagttacattgtcttaaggtaacaaaacagttcttttgtgcttttcgatttctttgtttttttttttttctttttttctttttcttttttcttagaatgttagtgatgactgacagttctggtgcacagttacaatgtacaagtgaaatgaatatgatttgcattgttaaggcatccaatctgctggtttatatttatgtgaaagacagaggaaatatacaagcagacttaagaaagaaagtatgttcattgatttctatgaagtttctccctagaatttaatgcacaaaatgcgtcactccaaagggagagattccatgcatattaatagagtaaaacagcattagggttgttttgtaagcttccaaagcaaaggatacatttttttttaaatctactgaactaaatactacaagaataatatgctactatttttttttttttgccatatattggaaaaaacttcttaacttacaaataatacaaaaatagacaatgacttttgggtggaaattaaaaaaactgaagcatggtttataacaatactaaaaataactataaatgaaatgtttaaaaatcacattgaaacagctaatacaagtgtaggtgaccaaacaaatacgcacttttcacgtagcaaacatacacaataaaataaattgggggtggaaggaagaggaagaagggaaaagcaatgtacaaattcgaaagataaatacattatttatatggatattttacaaaatcccctttaaaacaaaaagccttttaattaactttgcaagtatgtgcaagctaaaggtagtgagctttttttctttgcaaaatacgcagtaaaatctttttgtgatattgaaaaaatgtcttaagacattaaaatgtataaatagaacaacaactttggcaaaaaatcacaaaaaaaaaatctacagtatttataactacatacaaaaacacaagagcaaagaaaaaaatatcaggcaaatgcatcctcagagctttgctgcatctttgctattaattcttatttttaagaacacttcccagataatgagagcaaaaattcccatagaacagaaaactatgttttggaggtctcaaccttcttttcctttctccacccccggttccctttaactcttaattccaaagcacttaacctgttgtttcaatctattatgttacaaatggtaagggtcgactgatagaggcagtatctggaatgggaaaatcgaaaatacctgccacgttgcttttatcaacttttggaagataggtatgaagtctgcatttaggacgagtaaactttaaacttgcaaatgggggagcgtacgtgaggttttggcttgttaactggagggcagagtgtggaattctgtgcctggaccctgttccatgaagtctcaaaggagattctcacacagtatgtgtgccaccaagctctcgagaggccatcggcttcagaagaaactgacttaagtaaaaggagagaatgagatcagatttaaatatgcagttttaacaatctgtctagaggcactggattttcgagtagagggaaaaatgtgatcacttacatcgcgttttaactttccaggctgcatttatttacacagttgcttaagacaacaatacaaaagagataaataagcttgcactgctaaggggtggcatgttaagttagatattgaaaatgcactgtctgagctaactaccatttgatatgctttaaggcgcaaaagccgacccttagtttttctaaaaaatctaactggcattcctattctgtcccatacaagcttttttttttttcctttttttctttttttttttttttacttttttgtaaatatcaccacttcattcttcctttacacagctttaaaaacatcataaattaaaacatggagtcttatttatagtgtcccttgtatagagctttacggtttataaaagacaaatgattgcagaattaagcttaaaaaaaaaaaagaaaaagaaaaagtggatttgcttttgtcaatacagaataaatatatcccccaaatacttgggaggtacaactttaaccaacaccctgcacttgcagatccctcttccaatttcagtatttgcaaggtcggtgattttgtttgtttaaaaatctgcagttattgtgattcctcttaaaaaggcctgagttaaaagttccactctgggacttgtatcagattactctctgtagcagaatccaacctcttcattaatacaattcttcaaggcaattctttcacataggaggaacaatcatgccagatatcgctatgaaagaaaagacagaagtcaatggtttctttgcgttcaaacttctcactgagaaaaataatgaagactaaaaaaaaaaaaacacccacacacaactatgttgttcgactattagccacaaatttgctctcatcttctctggaatgaattttcgttataaaatatacatgtgctttattaaaaattataataaatcagcatgggtatgtgtctttaacagaacaaaatatcctaaacatctctccaaatctgatttcaattttaaggcataactggaaagttgcatagtttgaataccactgggaaagttgcagcttcgaaccttgcaaaatagtgagaattttcactttgtcactcttttttccctccccttcacacccaaaatataaagaagtggtccatccaaactgcaagcagtttctacaaaaaacttggcattccctatcctctgtattagcacaaaaactaagccacagagcagaaatcttgagtgcctttgcttaggtccttaagctgggagaaggaaatgccagctacagcaggccttgttcactgggaacataaagttgggagaaagcatagctgggaggagaagacaggtttgcatgaaactgcagaatgtcttccatatcacggcttcactcaacgtttcgggaatgatctgaccatatttcctagaaaactgtagcctggggaagctggagtgagatcctgggaaaaaagaagcctgtttgaggtaaccaaaaattgttgaaagcattcaaagctaggaggtcgcagatagtggtatttagagaacacagaatcagataggcctgagtcccacctctggcttttctgctgtgaagctcagcttctgtagctagaatcacagcaacacttagggttattggagaggtgaataaaatgacacatgcaaagtgcttagcctgggttcagctcctagtgaggacctgatagacgttagctgctgggatttttaacccatcacttctgctactaaactagctgtgtgaccttgtgttaattgcttaacttttctgaggtgtatttgctcttatgtcaaataggcaccatcccatgtggcacactttgtgtgattgctgggaagaataaaaggataactaagaaaattaaaacagggtggcacctttgaaacatgtcaaagtgagagagatgctgacattacaagcaaggggcagccgtctttggctcccaatcacggttaagtgtcttgtcaggcagagagagtcattgctttctttttatggcaaatctaaacgtaaattaattagtgttcttgtcagtgatgactgtgtctaggaagtggccctcttagtttactattctggaagaatgtgcctttaaaaaaaaaaaaaaaagcgaaccccagtaccacaaatcctgcaagtggacacagggaggccaccctgggctcttagccccaagacccccacgttcctccggcttccccacccccacccctggtattttagattcaattaaaatgaaacccaaaaagtattttgccaaacactttttccgttaatttttaaacccatctgtattcacaaggaaattcaatccacatgtttctgattcatttacacgtaaatcatccaaatgttgttttgcaagagcctttttgcagcccaaaagctcctggagtcctttctgtaagccctcataagcctttttttcttagaaacaggaagttgtcttttgccaaacgcagaccaacttaaacccccaaagacttgagatcagttggaaatgcagtccccctaagattcaagtgagccctaggtttgactgaaaccaggagctcagtatttcaatccaagccttaactggagaattcgagatgctatcactccaaaggcaaggaggcgcaggggagtctttgctgtgtgacagcccagcatggctctgcctccccaaggatcttttcatctgggctggaggtgggtccaggcacctttattaaagacagcgggagttttaagcctgtggcaaaaggtgcaagtctactttcgctttccaccaaaatctattctgcgtgcctggcattaaagagcagttccctatagtatagtcacacaactcaggcagtatcaatatgattcaaagcaaaggaaaaagctaatttggttggtgggtccagccaacatttattagctggtctgtgaaaacatcccatttgaatggccagaattaaaaaaaaaaaaaaaatctaagcaggcttttggtacccaaatagtgtgttagatcaactagattaagcctccacttagggccacattaaaagttctaaagcaaagctaactgatgtaccagttcatagttaacagcgctttttattttggaccattggggctgcaaactccagcatcccaagagcccaggctgcgaacagcagtgagtgaatcccctgggtgcgtaagtgaggatggaggtgatgatgccaagggcatgcctgggcagtgactcagctcccaccaaatgccactgggcaggaatgcctgctcacagccactgatcttctcaaatgtttcaagagaagctagagatttagactttgtttttttaaaaaaagaaatagccaagtttatacatgatagcacaaaattgaaattaaaaacaaatatatgggtctagggggtgggtttggcccactcctactttcctacctcgccttcatcagccgacagacttctctgagagtctaatgggagctatggaacctctcttcaaaagaggttgtgatgtcttggcacacagtgctgagtatcctcatggggaatcttcatgtaccctacttgggcaagacagcatgccacagcatttctggaacattctaaggcccatgttgcctacacccagaattttgcatgtaatatcaaagcattactgttctctaaatcccaatcatgacttcctaaactccaagggcagaacccttgcggttgagtaaattatgggaaaagatccctgcctgtggcctctgagcctagatacctccaaagaggcccttttaatagagaaactccactgcaaaactgcctgaagatcttgagttttaggagttgtttttcttatatctgtgctgcaatctgaagattatgtgggtgagagggatgggtgtctggagcttggaatgttccagcaatgccattggcatgctaacttgcccaagtggagtgcataaagattcccatgaggacaccaccctctcagcaccatgtgccaagacatcacaagaccatggtggctctgccattttccccagcagctggatgatcatgttctctgacagaagctcagaaaactattgctttgagaggcaatgcatttttcattaccgtttccatatttttgataaaaacaaagacaaaacaaagttctgcagagctgggagggtttggagtgagagggtggaatgtggtcgtacccaaaccaccacatgtgtaagaattatgagctaatcactcaggaggctgaggcaggagaatggcatgaacctgggaggcagagcttgcagtgagccgagatcgcgccactgcactccagcctgggctacagagggagactccttctcaaaaaaaaaaaaaaaaaaaaaaaaaaaaaaaagaattatgagctaatcaggaacaggggggtaagtgagtgggtaaatcttgcaccgactgaatatgtgcatggaaaaaatgacgattccataggatttggtcctgggctgcatgatatctagggttgagaagagccagcctgagcttcagcaaggtggaaaagaaaaaacatcagtatatggatactacttttgtgaaattactctggcctttttgtttttaatttttcatgcgtagactgtccaggacatggctaaggtttagaatcactacatcagcgggggttccaatggcatgtaacagccttcttggggatgcctctgtcttgaataaatgaagtcctctgaggcctaaattgcctgaaacccaagctctaagcagcataagcttcaggagaaaggagaggacatctccatggacaaagactgagcatagttggtgactcaagtctttggctctggaaaacagacacagttaggtagtctgggaccaggatttatcaattacttcacctgcataagaatagaaagaggtatctctgcatttttctctttaaatccaaaatatagttgcattttccaaagtttttcatatgacattaagtgttcttaacatgcagaaaaggactctgtaggcaaacaagtttgccaaactaaatgaaatagtcatttttatttaactgcaggatgccccagagactttaattgtggatctccaagatagtgatccagggagcaccacattctaaatgtttttgactaccatatttttattttttaacaggacattttgtgaggctccagaagttgagactagagttgctttttcaaaaaaaaaaaaaaaaaaccctcagatatatggtaacttttcaaacgttttatctacctgggagacaaagccagctggaatcatgatagaatctgtgaatcctactggtcaccgcatgttatccaggacatgtctgtctctgcttcttggctaaggttgtcctcagtctttctgctgaaagtgccccttgcccccatctccctggccctgaatcccacttgttcctccttgagcctgttctgaattctccttcatctttccttcctctgtacttccacagctgggtgcccagcctttcccagacagatcttccttatttactttggtgtcatgtctcccctaatacagggaaagattttgagggcaggattttgtagccctcttgtgcctaacctagtgacttgaatatagaaatgtaatatagcataggggcttaacatagtccagtcaatctgtctgggcttaaagcccaggcttccttgtttgctagttgtgtaaatggggacaagccaccttagcttcagtctcagtttctgcatctgtataacagggacaacagacaagctaccttaagggtggttgggagccaggctgggaataagccctcctagtcagtggctgtgttcaccattatcaccaccatgtgacatggccgtgcttagttcttggggaataaatatgcgtgtagtaaccggaggagactaagggagtgctgctggggaagaggtcttttaggagtcggctttaaaaaacagaaccatgcacagttaacagagtggtagttggaggtaaataggccttgaaaacacttaaatggcctaaatgtggcacctctaatcttgttgacatgggcaatttgcttaaccaagtcttcctagtcacttaacctgtcttaatgatcacaattctgaactaggtgggtcccaatgaagtaggtgctactgtaacattgaaaaggaaaaacgtggaatagaacacttcagggatccttacaccaattccataacctgccttcatcctttttttcttttttttttttatggtagaaatagtttggaaagttaaagatgaagtaattctctgaatgtcacctttctcagggaaaacttttgtggctcaagcaagagtgccctgaaaaactggtgcccacctaaggctgggtcctctttgccctgctggagattgtgtgcagaggctaaagaggcaagtcccagagtgtgggccccacctgccagcacagcacctgggggtgcagtgggcagaaagaagagcttaaagtgagatgtttacattaatttgactttaatttctccatccgtatgtccatcactgacatctcaaaagtagggatatttggtatatgacagtacgagcaaaccaaaaaccattttctttctttctgtctttctttttgaaatagtcttgctctggagtgcagtggcacgatctcagctcactgcaacctgtctcccaggttcaagtgattctcctccctcagtcatcctagtagctagaactacaggctgcaccaccaggcccggctaatttttgtatttttagtagagacgaggtttcaccatgttggccaggctggtctcaaagacctgacctcaggtgatccacctgcctcagcctcccaaagtgctgagactacaggtgtgaaccaccacgcccagtccattctttttatagttgttttatcatgctcaatagtcagggcatgggataggggaaaatccaaaaaagtctccttgacatttgttcaatcagaaggaaagggcagtgtcatccacaacagtgaatccagcacaaggtgtgtccctgaatcagacctcaaacctcccacactgtggccctgtgttaggaaaggtgacagagaggcacagactcagcagttattcagagaaatggggacagtctctgtacttttgggatctgtaattgggtaagaattgagttggaaaatccctgggaggacaaatgcacaaactttgtatatatccctgtcctgaagccatttcatcatgacttaaacaggcacataccctcatccagatcctggctttcagttgataaccagatctcctgaaacccaggaagtcataagatctgagcccagcccctgtttccaaccacttcctgctccttcctaggaccacagggcatgagaagacatcgggcctcctgggagctgcccacttctgtcactgttggcctatgatagagccactgaccttccaatagtgggggccttttcttctccagtgcttcccgtcaactgctgattataaaccccatcatatcttgtttctgatgtcaaatctatgtttagcaagggctgagattggcagctcaagaatggtaaatttctgctttccatatgtatgatcattatttaaacctattataagttatattcgctcaagcattatatccctagtttgccagctggaggtgtactgagggtgacaaagcattatttttagctgaaagagaatgagatttgcaggaatgggtggctctactttgtggaggtgggcattttctatcatgagtaatattgcctgaaatgcagttgcacaggcacgctttttttttttttttcctctttcctctaagaagatggatttgccactgtatgttagagtggggaagagcggcgtgctctgtggggcgctgagtctgggctgtgctgggcagatttgcaagcaaggttctgaggagtattttgaagagtcctcctggaggcagaaagacaacgtgatcgggtgctcaggctctggggtcacatggcttgtgttccagtttagctgtactatttattagccatgtgacctggatcaaattaagcctcaagtttcccatctgtataatgggactagtgctgacatcatacggtcttcaggagaatcactatatgctcatcacagtgtaaagcatccagcacacagtatgtgtagacaagtagaaatatgcatgtacttgtacataagaaacagggctgagatatcccagacatgtgcactgccttcctcacccctccctgacttccaggctgacctccatcagtgagatgccagccaccaagggaagacactgtgggaaactttgtatggctgggcttaagggcacagactctgatggggcttacattcatctccaccgtttaaccgactatgtctgtggtcaggtatttaccctctttaagcttccattttatcatttgcacaatgaagaccataatggccctcatactttaggaagatgtgaggattaaatggtataaaatctgctccatgcataggacagccccaggtacactgttcagtgctcaataaatggtggttgactagtttactaatcttatctccctaccagctgccttaggaaccctggctatgtctcttttagcacctctgaataataaagtatttaggagatgaatgtttcagtctgaatttgaagccagcttctgccatgtatcagctgttaaaagtcaggcaatttcataacctctctaacctttagttttctcatctgtcaaatagcagatatgagtacctaccacacaatcctgctgggggcaatgaatgaggttgtgcaggtctcaacatatgacacacaacagagtgctaagctcataagaaaaatgtaagaaatggtgtgctcagttttaaaaggtgggtaaccttttattcttaatgaaaaggtcatctcaactcttagcaactattttattttccaaatgcaatggtgggaaagcgattgaacaattttaatatgaatcagaatactctagtggtgttctggggtttcttaatcccagtaggaagtctttggcctttggtctatgatgatctaacttcagggctctgatcaagttatggctcaccccctccctgttatcagccccacacacgttcactctgacacaggcaacaggaagggaaggttgagtgacctacttcaggagaaggccagtcccgggagagaccctgcactggagaacttgctagagtccacaaaagactgatctgataatggcgaccacaaggagtgaaagaggagaaaagagaaatgatgctgttagtcagtagaaacagtattcccaagcaaatcccgggcctgagcagaattgctgaagttggaaagaggacttcttgagcacctccagcagaggagagatgagtatggccaagggccaagggccagggttgaggagagcaaatacaaaggaacagaagagatgagggcagagagaatcaggcagggcccaaggctgataccctcagcaatggtgatgcatctgcttcaggccctgggagggtgaagtcagggcattgaatctggattggcaggtggggcctggggcttaccttgcaggctgttcccgttggtgctggtgcaggtgggaggtggggaggtctggggtctgacgactggtgcgaaagcactcttctgtttcacggctgagaccatgttggctggtgagaaggagaagatgcccgaggagctgctgcagttggaggggaggcttgtggaggaggccatggtggggctggatggcactactgagaggggcaatgagaaaggagaaatcagtgcctttcatggcatcctgaagcaaagaagctcagatccatccctcacccagccaccttgctctgccctgctcagacgatgcttccagcacaaaccttccctgaattcgcaggctctcatccactttcactatacagaacttagcacgtgctacctttcattactggagatcttttatgtgtttattgtggggccactgtgtgccaggcagtgtgctaggcactagggtcatcagcagcaattgtcattaagggaaaatgacccctggtcatcagcccaaggcactaaccaatccaaatgcaccgagtgcctttatggggcagaacacagagccaccatcctcagagtattccaggccaggaaacaaaagtgcaacaccctcttatgagggatagagtagcacaaaacagtgagaaaggtgaacatagccatctcagtggaggcagggaagggaaatcagagaagacttcatagaagaggtatcaggggatgcatcccaggtagagcctaaactaaagttctaggaaagaggctggggtagggggaacaggaagaagccagcttgagaggatggccaccagactgccacatgcagcatttgtgaaaaatgcagaactctacaagttccaaattctttataaccgccatgggatatacatgaatgtttgggaattaataagcagtaggatcagagccttacataaatactcacagtttggtagtagtagggatgcagataaccaatgatgggaaaactctggcaactcagagaaaacctagcagcttggggatatgaaagagctcggtagacgtacattctctaccgaccatgatcctcttggcctggcctctcatcttttgttccaggttaataatctctcggttactttaggagacagagatttcacatacgctaagtcaagactaatattttcatacactcgctttctatttcctccatttcctgcaggaaagtatgtatcctagatatttcttctatgttattattttttcacacaacttaataaaacatcagatattgttttatcattcacaagaatcttcacgtctttttcatcttgtcatgggcaatgcaaccttaagtcggggcctatcacatatatttttttttttttacaaccgaggaagtgaagcaagctgggactcagaaagtagtgtagcagctagcccaagggccatagctagaatgcgctgaagcaaggaatcacgcccaaatttggagctctttctgctaagctaccctgcaaaggaaacagatctccagggggaaaagcctcgttcccatgagcccaccagagtcaaaggagctgtttgggtggccttatcctttgcaaagtgggaatccaattggtcataggcaacaattgccatcaggggaaaatgaccccttctaatcagtccaaggcactacccaatccacacgcactgagtgctttatggggcagaatgcagagccaccatcctcagagttttcacaaacattttctaaactgtactttttcttttaatgaggccagcatttttatacatctcttaggatttgtaactgtgaaaatacgctcaataataacacccatttaaattgcaaaactcctgcactggaggtttgatttttaaatattcgtagacttgaaatcctgctggttcactgaggaaggcaattaatctcattggcaaatgtgatcattatgtgtatttagaggtggggagttttggggtggggggccagttaacagaggtagaggtaaaatatagtcaagcagctccatttgttataacattattagttatcagccaccacaccagaaagtgtgttcaccagtggaatgtcttatttttttattccattggaatttttcaacatgagtgctttatgaataattaaatattatggaggcaaaaattcaaatcaactgggctttgtgtttattgttttatttgcatttgtgcagataaagccgtcccatctgagagcatatttgagaatttaatactatgtttgtgagcactgagaaaatcaattaatggaaattaaatgttcaaagtttcacagtctgacagatgcaatctcaggctgaagcggctgagtgtctgcacaggcttggggaggagagcattccaagcccctaaattgaattgctaccatatagcaattagtttattgatttaattaagaatgccatcttttaattttcaggtcatgatcgaaacattttctgactgaataaatgggagaacactgaaattatagatctctatgagaaacaatcttttgataaatcaaaatctaatgtgaaactgatcctaaacattgacttgtgagtagacagacataatatatgcagattatttggggagttgtaaatgttcaacaaactgctgattccaaactaagatgaaatgtgtaattttgtggaccttgagcagaaaaattcacccagaaagtaaaagtctgtaagtacattttcagaaataacttctcttacagggcaagaatgatctttcctctttcaaagaactagaacaatccatactttcactatgagacagggcatcatttgctgtatttttagccaagactccttaagaaatcatgaatattctttaatttaatggtacacctatctatccttccacaaatatctaagagtttggccacattttacacatcagaagagtcactcgcaatgtccaagatgaacttcaaagtcagagcgagatcaagagattgtgagaacacgggttatgacattttatagataaggaggccagttctctgaggttctttagaagcaatataaatgtaccaaaatgtttttgtaggcaaacttctttaaggcagagacaaggcaccaaagaacgtttttttatgtgtatatggttttcttttccttttttttaatcttgccagatttctggaaaagtgttttgatttgttgttgttttaaatatacaccaaacacaaacaaaggggaaaaatccaagcattaaaaaataaaggagtcatatgtgtgttcaccagaggaatgtcttatttttttttattccattggaatttttcaacatgagtgctttatgaataattatgaagggagagaagttaggttttagactattgttactatgttataccaccaccaccacgttattatctttgcatcactatgattattagatttactaaatgtgcctctatccatgtgtccggcatcaggacaagctcactgtatgcgctatcttctctatgtctcacaacactggatggggtgggtgctagttccttcccaattttacagatgagaaaattgaggcttggagaggaaatgaacttgattccttttatgtagctaaaataatcaggtgaaacaagacgaaactaatagatgttttgggattaagtagatgacaaatatggtgtcctcattgtttatgggggtttttttgtttgctttttttttttctttgagacggagtcttgctctgtcacccaggcactggagtgcagtggcacaatcatggctcactgtaaccttgaactcctgggctcaagcaaacctcctgcctcagtttcctgagtagctggtggtaactggtagaagtgggagttagtaactgggagaagcaggagtcaacccgtcttcatctaactcagagcatgggttcctgaagcgacttcatacagctgctttggatggtagcaacattctgactgttagggagactttgtaggaaggaaggtgagcactggagagcggagattcctgctggagacgatggtgcctttagcaccatcacccaggggagtgccttacaggagggaaagatggggggcctcagaccgagaagccctgcccactgggccacatggcatgatgccaagttcttctagcgaaacgtgcaggaacgcaggatatgcatctctacttactggcatagggggagttggcagctgagccgttgaggaaggtgggggagccgcccaaattggacattgcggcagagccgtatccgttcatgctcgtggtgacggagttatagttggtctgctggggagtggtgctcggcacgtacccgtgtggtgatacgctgcttgagttgcgggtgaaacctgaggggcgggggcaaaaccggaggtgagggtggcattcagatggtggcaatcctggaagactcggggaaaggaaggtctctgtttctggccccgtcgccgcaacccagagggaagggattgggtgattcatgtgcgtgggttggtggtgctagctctgtgattaaaatgggaagcgagcaaaagacacatttcttaggagatcataaatacttagcagggccgtgagaaatggcaatgctgggcctataaattatcattttagagcagaaataaatcccgatctaagagatgtaccctggagttaacaggttcctattccctgggcaagaatgatgtgctttgggccctcaaaactttaattccatccctctctgtgatctgtcattcatggtttatggtgaaaagtcaaatgtagagagatggctaaatgcatgcatcctttctagccctctatattagattacccgaatgatagctaggaccaatattgtacaataatatcttatacacataaactaagaatctcccttttgggatgaaaataattttttaatgtaaaaattgttcatgaccaataaatgaggagatggggtgcttaaggttggggagggaagagaaaagcaagcttctgaccctgattggtggcttgtgatgcctcggagacattcacggccagttgtccactgaacgaattcacgcccatcatccctgcgtggaccgaggtgttagcaagggccgggagttggttgtggttgcggggaacactgtacagggcctcggcaatgtcggccgctctcttcagaatgatttcctgaaaagtcaaaggaatatccccttcagctgcccccagtcatattcccaataataccattttttcggtgccaggtaccgtgctcagggttttcaatggtcagctgcattaacttctgtgaccctcatgacaaacctgttatattagtctcaccatcatcatgcctgtatccgaaatggggaaactgaggctcagaaagtcaaaaacctcaccgaagtacactcacctatttaagaacagagctgagattcataagcccatttgtctgactttgaaagtccattatcttaactataccttcatactaccctacagtccatacaggacagcaccatggggttttccatccttcccaataacatgtaggaagtctgaggttacccagggggagaggaagagaggctgcaattcacctcccctattgatgttaagggaaggctgtagatgactacctgcattactgagtattaatgggactgtgtcccccagacattgactcaggctacatgaaaaaggagtgaatggtttgtcagactcagtttcctaagctatgtgaatcttatacatggagttctatgaaacagaagcagacaatactattcaggccttgctatactttttggagaaaaaattaaaccctctttctcttcctaaatttgcttgaaaacctgagagaaataaaataaagcaccagtaactctcctcttcaattaggaagtatgttcccactaaagattagttttaaatggagtaccttttctcatacagaaaatgattcagtggaaagggcaataaaaggtttacaaaagaggattgaatcatcttgcaacatgttatatctgaattacttatactcttaactcatgcacatggcttttatattgtttgtgctttctcattacgatgaggaatctgagatctttaattgcatgtggcagtccacacaggctagacacccacagcgctcacctggttgttgtgtggcatcccatacagtgcttctaccagatccgcagcccttttgagtattacttcctgtcaagagaaaagcagatacaatcctttgagtgaaggcaggttgtcgttatcttttgacatgatcacattccagtccctctggccatactttgccaaggcactgctataaaggccgtagcttggggaaccccagaagggtgttaaatcaccaatttatccctgttcacatacacacttaattgagtcaaaaggtgagcatcattggtactgcgagataaaatacatcactcaatagtctgccataggcatgataaagcactcatatgtttattgctgaatacaattcctaggtcatttactagattactacaattgatgtcattcagtcgtggtatgaatccctaagatgtgtttattttgcacttaattgcttattccagtaaccatgaccttatcagacaggtcattttcgagggatttccaatcaatcttcagctactagaagcatgtagtattaaacttcttttgtttatctctcttggatggtagagacataatataagagggtgatgtaggaaacccacatactgaggcaatgcactgtttgtcaaaaactcttatgaaaggactctactgtcctcagaggccccctctgcaccaattttcattactggcagtatctatttctttaatagcaattatttgctatttcagtattgtgtgatttcccccatttgctcattcattctcatcctagatagatgcttggctactcattccagttgaaggaaaaatatctccctctttttacttaggtggacctccatatttagcctgcatgcttggttctaataatagggagtactctacaaagtgagtgtggtgctaatatttttggttctaactaaaagaaatctctctcttcatttttccctaattttcttcagattcatttccactagaatgtgaaaagaaaagcaaagttaagcttgatgcatgtaaaaggtaggggcttgtcagagaaccaaacgtaagggtgtggtaggatcatcagaggtgatttgcatgaagatatgtttaccatttttgactgtgggtaaagtttcaaacagaagtgtaactttaaatattttacacaatagatttctacatggagaagcagtgctgttcaattttcacagactgcagtcgctgatcagaaaatagggagataatcgcattcattttgctgtcatcatagcctcttcaaaaatccttgaacaactcttgaaatgacaagcttttagatacatattagcatttttcaattttaaattctctataatataagataaagtagttgtcatactacagtaactacttatgacatatctaatgtcctaaattcaaaaataagatagtggggttttcagttctcaataaacatttatgcttgccttaagctgatagaccccctttataaaacagtttagttatttttcatgtagggagtaaagaacattatataatcaaagggatttgaaccaatacatctgaaatcatttctttattttttaatgtaagctacaagctaatttaccactttttgtttgctgtagtagtgtctgaccacagcagttaataatttactattgtacgggcacactaaaccctatccccagatcaaattcagcctgtgttgccttcactaaaacctcttggctttatctggctcttaggaaagatgaaaacaaaaaacaggatcaagtgagtttatttactaagattagacttctctaggcctatgttcatttatttctccaaataaatatttatgccagtgttggggcttggcagggaacgtattttcctttctttccattttaggggggaaaaaggcaagtctcccgtttgtcaaaagcgtgatgaggcacagaaagaaactgcacttgtgaacttcactcttgtaacactataattgaggacttagagcagtgtaccttattttaattaatttcacagaagcagggaggagggaagttcaaaattaaactccaagatctttgaagttttcataagcctgaaaacataccatctatcagtatatattatatatccttggtgatagagtttttcaatgacaaaatctacttttttttttctccttatgtcgatatccagagctctcatccccatttaatcctttgagaataaaacacgtggatcttgtttcctaaaggagcatccttctttgatccatgatgctgccttctttgatccaccatgctggggcatgttttcccattgagtacattgccataggtaggtcatcagtacagcatcacttcaggccagcagtcttggatttgaggagtgtgaacctggatttcttgtcttgaaagggacacccttaaataatatcttacccattaaaaaatatccttcactgtagtatcaacttgtaaggacttaagaaagacttggttgagctttgcccatgtgatttggcttctattaggtatttctgcaaatgggaaggagaaaggaaatttctgggtcctccatgagttagtgcaatggacctgcaaactgcttggatttcggtgaccagaaaattgctctcacctccatgtcattacgctcccagtgaactagcccccaggcgtgtttgtgttggggatctaatatattgcctttcaatcagagctgagagccactgaacacacagacagaacatgacgagcaggtcaggaaagcaataaagattttacagagctgtccaaggtgctaaatttactcaataatgggtttggcaccatagtgttaacctctcatttactaccagtttgagggactaaattgaagtagctgacttcatttaccttgaaatgtatattttatgacattatgtaagtagattgaaagggcactgcagttttaacaatttaaaggctaaagcatgtttaagatgaaacttgaatatttattgtatattgcacttaaagtatatagaatgttaaaatgtattgattaaatttgtaaaaggcattataaaaatgacaggtagtataaaagatgtatgccttttaaaatcaaattgatagtgtatgccatctcttctgtggtcacaagtgtaatttttttgcagttttatatggtaatttgaaaaatctgtaatttcacattaggaaatgattgagccttggatgttaaaaaaagaaatttcccataaggggaagagctggatgtttcatataatcttttgtctctaaaattgttcttaaattcttattttttgtggcattaggcaggagcacagtctaaggatctttcattttaatatgcaattttaatatttctgaaaagaaagagcacttgactagtactaatatctaatgtttcaaggcatttatttgtcaggggagattttctcttcttttcataatgtttaaaacgtctccctgcttgcaatttcaaacataagagtggatattagacaattccaagataattaatcctatccttggattttttttttttaaaaatcccttttgggaattaaagacaaatactagtatcctaaatattgaaaagccccagagtctccttgtagaggtaatgtttgttctccaatctacattctgagtcagacaatttttctgctcatggccttggatttcttctctcttaaagatacaaaaaagctttactccttaaaaacaacaactacttttcactgattgatttcatctcactatcaaaacgtggcttcacctgtcttgctatgaccataggttgatggttatgtgagtggggttctatggagaaaaatgtggatgcattattcttactctatttagagtctacagaaatgttagggagaccgaaggaggaatggggttccaagaaacagttcaaatgtagctggcatgggttttacttatattttggaagctttataataaaaatgctgaatgggctacaaatataaagggaagattcagctttactttctactttgcaacccaattagcaaatattgtttgagcttcttgttgcccttgtctgtcatcatatgtggatcttattctccagcaactttcagggcacattatcttcccagcatcgacctacaaagtttgatgagagtcacaaaagattgtcgccatcacttggtcctaccatctttgtccagtcatctctccctatgtatttgaagaactgctctctatgcttgtcctccccagcctagaagtaaaacatttggctcctttctatctccataccttcactccttttgccttcccctttttttggagggaatgctggcttcaatctgtgcccatggacaatgcctctctccatcctctgaagcctcgtactgaaggggatcgtgatggtatggtaatgaaggagatcactctcatttattgaaagtggagcaagaactcattcaaccttcatagaaagcctcttaaggtattctttctattactatctggcagatgaggaaactgacactcagagaggtcagctaactttcccaaagtttccaccgctgactagtggctgagcatggattcaaccccaggcctgttagacatcagagcctggctcttgaaaatcacactgttctatcagaaataattccaccttcactgataccccagctcctaatatctctatttcctctgaaaaagagtgctgaccatctgtgtcacccagcacagcacagaagtatatactgagaggtcattctgctctgatctgaagtgtgttagtcatcattctccatagctagactgcagactttttgaggccagtgataggttcttaatctccttatctaagctcctaccataatgtttagcaaaccacaagtcttgagaaattcatgttgatgtgttattctaagatacagttactgatttttaaaagtacacacttaatttgtatgatgaaatgacaaagtcatatttggcatggtttataaaagtagaagacttaaatttggtgttccatttagctacagactcttaaatccaatatataaattcccaaaggtcaagttttgatcactgtgagtttttttatgtcacttttttatgaatttgctctttcattcctgctggcttggacttacattttaattttgtgattaatacaatgaatcatgtctagtacagacattatctcaagttataggctgctagcaacatgaggttggtccttatggtcctcagccttttattagctgtactcttaggcccttggaaatagttaggtatttgcacattcatagaaagacacattgggaaccaggcatatcatgacaaatatgcagacatagttaactcatcttctattttatgagttaaaaatcttaggattattcaccatctgtgggagtccttctctttagcctttgacctgaaatctatagctaataagctcaagttcactggccacatctagcctcctagagtgaagggaaaggttgtctaactggccaatactgggcccatttataaacccagttcaatgttttgggcaactcaaccccagatgagcagggaagatagtctgaactttcttttgttcatagcacatataggctgatgatcataaagctgatagatacccatacacgaacacaacattaattttcatgtttcagcattagattttgagactctgggaactccgcccataaaattaaagcccagggatgcttcagtaatttcagaggataatctgtgcttggctttatgcttacccaaataggaaatgttttcaggaatgtagattgaaacagaaaaaaaaaactacaagcatccataatcaaagtcaagttgagttgggtgatttctgagaaagaagcacaatacttccctgtcactgcacatttccctgatacccatttatcaccaatctactttgctttatcaggggattcaaaatatagtggccaaatatcagcaacacacaatgaagtgaaatgagaaaatcactcttgatgtagagatgataagcacctatcaatgaaatcagcattgatttcactgccttccttcgtatagggtttactgcaggacccagattttgatgtgtgcattcagctcctagactttaagtcctggatctttccccactgacttctgaaagcctgggtgacattactgattggaaaggccgaatgctgagaaattgattggaagtttcttgcagcccatttcctgcagagctggatgtacaatgcaataaatactagttgtcctgagatgtatttctttggagggtagttttatatcccagcttcctttgtgtttattcagccaaatggaaaattccacaatggtagactttgcattctaaaaaatcagtataatgagggcagtgagggaaagagtaaaacaaaccaaaataacacttgggcaccgtttagtttcccatcctctgagacattcctcaaatttttcatttttcttgtaatataaacttcttgaaatagagcttagtgcagatcattagaagcctttagtgtcacactttaaacactctttccttagaagccctatgactgagaagagtcacttacatttagcatggatataattaaacatgtttctgttgaaaggggcattctcattatagctaaggaccactttagagtaaattgaaatggaaaggaggaacataaatgaggtataggtagcaagtagttatttgcagggaggcataaaatgccaaatgtataacaattatattttacaaccccacattctaaagacttcatagtattttagtatataagaagattcagctgaagcttagattgccctacagaacattctagctagcgcatactttttgcccagagtctttttaaaaactgaaattcaaaccacagtaaaaatctctagacatttccagaacaaaggaattaaatattttgaaagagtctactgctattaataccaaaggccaaggcaccaaaaacattctagtctagagaaaatgcagcaggaggacctcttctgaacctcctctgattttaaagttgattttatgttcagattagatgacagccctcttacttctcaaacatattattatgaaccagcatgcggcatggttggaggtaaaccagaaagccttgcctttgttaaaaacatggtataggagactctgaatcatatgaaattaaactaggttgtaagctaacgcggctatatcaacgtaagacatactaacttacgtgattgacttttacaatggaaagaaaggctgttttcaagcaactgttattgccacaatggaaaaaaaaaatcaatgaaagtgaaatgaacaagagattttgtctgagttgcagttaataccactgaggagctatggatattaaaaggtcaacaaataaattagccagagtgttatgaaataaatgatttggctcataattttattgagtgaaaattgttcgctgcctattagaccaggtaatttttatctggtgcctcaattactgtcccgtaagcaataatatagttgtaagagctgttggttcgatcgtgtgacctctgagaagctggctaggacagctgactttactatgatggataactaagcttgggctccatgaggtgccaagcttccctttcctgcaaggggatctcataaaagaaacattacagcttgattcattttaccaaaatgttcgacttttcaagtgtcagcagttaagtataaattgtgaaaccaggtatttctgagaagagttatgacaatggctttcccctcccttttttttttttatttggtctcctggcattttcttctaaatggtgtcatggtaattggtgaatgggagcctggggtgcttcccgccacagatacagtgaaaaatggtgtctgcacccttgttgactatgacctgcttggaggtacagagctgaacttggtaacctctggcgggatcttcttattccaattcattgtactggtttaagaccaacgctgtgggttaggtcctgctgagtgccttggaaatcgactttctgatcaggataaaagtctctgcttaaagagaaagctctggacagagatgcctttttcaggggtaggttgtaaagtcagcacatgaaacaaaaacggcctagagtcaaaattacccttgaaaatcttttaagtcacctttaagtcgccaaggcctgggcttttagaaaacacaaaaagccaaaaattaactacttctgtttctctttgtcttttggctgtggcttctttccctcagccaaggctgaataaataccgagcttaaaagtagagggactgctcagtaaacaaagagatgtatttgtcatgtacacatacgtggatgtgtttgtatgtttggtgtgtgtgtatacaaatgcacgtgcatatttatatttttggacgtatactatagggaaacttgagtgacacgttcccatactatatagatacataagggaggcaaaaatataatttgcttttgcttcttcaactgttgagcatgaacatcatcggttatcatatgtatctccagacaaacgatatctgtaaatgataattctcaagcctttacagatggtcctgagtataactgcaattaaaatccactgcttcaagactgttggggcttggtacttattactctaatgctccactgaagtgttactcagggctgaaaatagtgagcaaggcttaagacctccaagcatctccattcctaagggcttcagtctttaaggggaggatgttgggtggctggaggtagaaatgagtttgcctcttggttctcctgtcacctacccttgaactaatgagtaattatgttcaatgcccctgtatgcagggtatgatatgaagtaagttacccttagtcctccccatcaagaactcagtgctaaaaaggaactcgaaagagttccagcactgagctattggataacggttactgcaagtccctcccacaatgactctgcagctaaagagggaaagcatggtacccagggtttgtctgcatttacatgtgaattcttcctgccgcttccacctagctcagccctttgtgagctaacctcaggtctaggccaccacttgcctccttccctaaccaggctggaagggttttaagactgattttgtaaattggctttttttcttaaaatctcttaattctgggaggcactgcttaggggatataggctctggatctggagtccaatagacttggctcaaatccatgttctgcgatgtattagcagcgtaaacacatgcctctgtgtcctcatctgtaaaacagagttaataccaacacctggtttagtagattatatttagttagtgcttatcaggcaataaccagcaatattattaataatccccatttattttccaaggaactctggcaaaatatatgcattcttacagtcaatgtgtattgcgtgccttgagtgctatgtttgagatataatcctattttcaaaactctataaaagactctaaatggattactggttaggaagtatgggaagttaggaaacctccacttactagctgcataagcttgagaaggttacttgtcctgtataaatctcagtttcctcatctctaaattgggaaggaaacaataatgacaagcagaagcatttgccgcaaaataagtcagctaaagataaataacttaaagaggtgagaattacaactttcatgggggtcatcggcctttttactgaggctacaacttctttccccagataaattacatgtgcaggcatttgtgtgtgcatgttcataacgcacacatgcacgcacacacacacaggaattctaaatgcaatttcaggggtacacagatccaggctaaactccctggataaaaagaaatataagtagtagtggataccaagcccctagactgagcatattatcaaatggggaaatggaatctgcctgtaagttttctggtagatacaggagagagtgggggaaatggacagcattccatagcttgtgtttttgacaagagaatgcagagatgtttcctggaatcaaactcaggcatgttttttctaagagctgaatataccataagatttgccatttgtttctgtgttttcgtctgaggagggtcactttcatttcaggatataatgttaatcgagtttcctcaaattaaaaaagtaaatacacgagaaagagaaagagagatagtgagagtgagagagaggctagtgtcagtgtggaagatgaagatgttaagtcgttcttcatcctttgctgaaacccttagtcatctccctttctgctaggaggcaacgtggttatgcaaagatatcttatttgtattttcactgatgcaactgcaggttttgaattactgatagtctttgcataaagactaaaacaataaaagcataattagaatacattgtatacagccaactccagttttattttgccccagctctgtatttatgataaatcactaaacatgaatgctctttagggagggtgattttaggtctcgtctctccactgagcaaaaacagtgcctgtgactggagtctgaatttcaattttgcaagtgtacagttgaagtgaataatatttggcacaatgcagtgcacaactgagccactaaatggctgatttactaaattattattagatgagcccttgctgttccaaatgaaagtgcagtcactgtcttccttcatggtgtgttcaaattgttctgtgtttaaatattcagcatgaggctaatgtgaactgatgaactgagactataaacattcactttcaatatagatagagcgacagagatgcaacatatcatgtggccagcagaggtgaaaatgatttatatttaaggatgttgctgcctacttccattactttaaggtactcttaattagcctggtgtttgaaatgactaattcacatgtacagggagagccacttcatagagactgagattttcgaatgccagtgaaggagaagctaccgtgaggatttgctacctctgtatttccaaggaagccttgagttccttcacggcaggctggccacacagcaccaccagagtagcatgtctgccagagatactatggtgcttgacattcaatgtgcttttggagacccaccaaaagggtccacaacccctccttcccaccatccaccccactggtgttcacctcccttataattccaacctactgcacagccagccacactggtacttcaatccccatgtcactgacttctttactgacacctgctggaatgaacaacaactttttgctccttggacaaatagaaccctcctctctcttcccctttgagggcagttataggcaagcacttaaaatactgtgatcacttacagtagattagaattttttattggtgctgtgttgccataacaacatgaagacagcagatgacttaagctaagcttgcaaagcaaaaggctgctcatctggcagttaaaatgaatgcagttcatttcacaagtttcccatatggactcttagtgtatggtaatgaggagaccatatggtgagagaaaatgcactgagaacaattgggttccactggctgagtgggaagttgggagagaaaacccgggtgagagattccggtgtgctctctgggttcaaggtttggcggaggtttgtttgggatggttgttttccataggggtttcacgtttcttaatccgttccttaatatgtcggctgtgtgaaatgacaaacatcttgcaaattttgcaatatcattcatcacaaactgtcagcagtgtttgcaaatctgacttgcaagatcttttaaatgtgttgttcttaaaaggcaacagtactaagtttttagacaaagtgcaggaaaatttaagcacttctgacaagcagaaacattaacagtaatcattttaaaaacactcgcatcttttgcctgcatgtttagctgtaaataatgctcgaatgtataaaagctttaaagtaaaaatgtaataaatactttttttatgtttcataaaggataaaaaatgctttgagccatgtctacgtgttatctatacctaccaacatagagatggatagctcccattctccttactactaaccagattggggacctaggaggacagcttgaaaaaggctctgaagtcaattctgtactatacatgcttcataaaagatgaatataaatgcattagttagacacggtgagctaaattagaaggtcaggcagggctgggagggctgaaaaatcacacaaccaatgagtgtaattactcttttttaagtctattaagtggtggtgttctatcaaggctcaggggtataggacatgaagaacaagataaagtaatgtgtatttattactcccactggatcaatttaccagatattttcagctccataaagcaaaatacacaaatgcagcctttgttacttttcccaaactgctttattttctctaaaagaggggctggctcttggagaaaagacattggccctgagaaggtccccaggccaagccttctcagtagggaaatgagagaaagctggtgagaatctacataaggatgggggccaggtgtcaggtgtctgcagaggagacacctcaaggcaggagaagtgggaactcaacatagtgacggcagtgaggctaccgaccctgagggcctgagtttgaatgaatggtagttttcccgcgtgctagctgtgatgtcgtagcaagtcactcagatctctggggactctaacttctcatctgtaaaatggggaacacccacagtgcagggattagtggcccccatttactggagtcttgctagatgccagggatgcctcttggcataaattatctcattaacacctgacaacaatgccgtgaggcagctgctttacagaggagaaacctgaagcatgggaggttgagtcatgtgtaccaagtaggggatcatgtttccaaaacgcacatccttctgacttgagagcccactctcttggcctctatgatcttcgaaaaccttaataatgcagtgctgggctcacagtaggcatgaagtaaacattccttgcttcctaggattcacagctgacacgcctgacgccagctaagctcagggctcactctcactcactgccttagggctaaggctcactgaccactcacgaaggcaactaacaaactgcaagggggcggagacatttctgaccttgaacacagagagcgctccttgcccaatgtgtctggattgcatcactgcggccatcagcatctcagaatttctgatcgaccatgttccccatcccctccacctctaaattataagaaaagtcaaccttgacctcaaagttggtcacatgttcctccccttcctgccaggatccagagagaaaggcgaaactgtatgaaacagaacagaatgctgtgatttaaaaaccttagcctgcccttttctccctgtgtatatgaaaaaggaaaccaaaaaacatctggggttagcataatcacagtattttaaatttgtgtgtacagcaactatcactgatggtgactttcagggacaaaataatttacagagcaggattccgcttgctcccgttttcctatttggtaaatggtaaagatgtctgctgcccagcctctctcgcaggagggactccaataaaacaaagcacgtccaagtttttttgaaaaagcacatgcctgtatacaaaggcatattattatggaaagctgtctgcttggtctttggagcagtttcatttgacagaatgtgtgggtggttgtatgaatctagctttgtctattcacaaacacatgggtttaataaagaggagtttgttttttaaggtgtgtggtccatagctcactgaaacactcctgtttgacaaacactgaccatgatcctaagaaaggcgcagcccatttttatctccctaacaatggacagcaggagtataaatctcccaagtccacaggaataccttgtgctggctccatccgccacttcctgaccctgcccttgaactctcgctccactttaacattcaaagccaagaggacagccactcggctctgagtcacactgagagcttcctggggtgggctccggccagcccttgcacgatcaagtggctagatgcaagccgtggagtgtttccttaacacacaaatccattgtgtccttgattactctttccaaacccaggaaaaaagggttgggaattttaccatcagggacaaagtgacacgtgcctatgctatttgttcaacatttctgaacataacatgcaaccataaaagtgttttcaaaagtaagtacacaaaactcaaccctagattcccatttctctcctttcctttcttataagaaaaagaactgtctggtttccgtagacctcaaccattaaaccagatttgtcttctatttttctttgagacagggtcttctggctctgtcacccaggctggagtgcaatggtaggtatgtctcactgcagccttgaccacctaggcttaagcagcccttccacctcagcctcccaagtagcttggactacgtgcacacaccaccatgcctagctaacgttttttttagtttgtagagatagggttttgtgatggtacccaggctagtatccaattcctggccttaagcaattctcccacctctgcttcccaaattgctgggattaccagcatgagccactgctcgataagtatttttaaagtggcaactatgggccagatgctatgccaagggcacccatgagatgacctctttatccttacatgatcccctatgagttagcatgattaattatccccattttatcaatgaagaaactgaggcacagaggagaaatcacatgttcaactgctcaccaggattaggatttcctgctctgcagagattgggtggaagagctctcagaagcaagggtcccattctcactcaactggcaaatcatcatagctaccttttgttggctgctaaataagtcattgtaataaaactcgaaaaggtacaacatagcaccatccacatttagtggatgaggacattgaggcacagagaggtaaacaattttgacctaggttgcatagctagcaagtggccaatgtctgaattccactttgtccaacctgactctcctcaatacctccagtggactctagagatcaaatggtaaagcaagtgctaaatataaagtgaatacagtgcccaaatgttcctcactgggaacaatgggaagaatctggcattgtacccctgcctttgttctagcacgaagacagctaaggcacctaccattagtcagacccacatcatttatatcatcgtgctataaaattaccagttgtcccataggaaatgcacgggaccatgttcttgctagacagaggaacctaatggtaaatctctccacagaccatctataccatgggtggagactgctgtttattattatagttagattatttaatctactaaataatattaaataacctgtagatgatttaattgcttaccaagaataaattggggtggaaaaggaaagggaaggacagcacttcagtggaagtgaggttgttcttggaaattgaagcttgaaactgaaggcatcatctctgaaaactgaaggtgtttttccctcaaagtcaagatgcaggacacaggcccttgctcatcacagtccttcctctccggagcagttagcgctcctcctctccatgcgcctcacctctgtgtagtggcctgaggggtggatttctcccagacagggccagttctgacaggtggccctgcctacaagggcagccagcacacgggtaggatttgatgacgaactgatactccaaggaggttcaccaagctaagaaggatggcaacttcatttttgcaagtgttttacacggatacataaacctagaaatggcatatctctagacttactgtggcaagaaagagtccttgaaactactaattcaatttaatgttaatagttttcacttgtgtaataaatgaagctttttgccgtcagtaaacagtgaatgcaagctcaacgaattctgtactttgaacttccttcgcatttaactgccctctcctctgagtcctcacagaacgttggttgcacttttctttaatgtgctattatttttatgattagttgtgtttgggattctctcccacataaagcccaagttcctcaggtacagggatggggatatcccaaacattcacaacaggtatgcaatagtcaataaaggtcagtttccttctttctgcactggcaattaatgatgtattggtgacatatatgactctgtcttgaatttttgtttaatttctctcatatttgtgcctattttcccaaccaggtagaatgccttaggagaagagaggttgtctttgcccaatctcaagatctaccaaaacattttgagctctaactattctcctcttgccaggactaagtacggatcctcgtagacagaaatttggtgctgctttttcttttgagaattggtaagatgtagcgattaagtagcccagactctagggccatgctgcataggttcaaatcttggtttagcgatttacatgctatgtgaccttgagcaaattattatttaatctctccttgcttattttctcttctaaaataggaatggtaataataccaacatcagagcattgttgagaggataaaatggcataacagatataaaagtaagcacagtgttgcctggcacataagtgcttgctacttttattattgcttaccttacagcaccaaacacacaaaacacaaaaatatgagttgtttacctgtgaactaatttttatcagcagcagagttttctgcaaatcgctcaagtccaaattttcaggaattacaaaaaggcagtatcctcacctttggcaaacgctcagggtcaccagggtgccgaggaatgaccttctgtaacctctggaaaccataatcgatggtgggttcgttgagcgctgcaataaagaagtcacacaattagtacattttcaagaaataaagctgaacatggcttgcaacactaatggtgtggaaataaccaggaagtccaaagtttaactgatacttttgaattggatcacaagatggttgtgtgaatgatctcttggctaaactttccaccatctgctttataccacggtggggagtgacccgcccaaaagaacattaggagtaggtcttgaacagtgttcctttggccaaattctacactccttacatgatcataaatagaaagtaaaatggtatttgatgtgaggtttttagtatccactttaattcagttgctcaggtaaaagcactcaagggcttgcctggtggtatctatacattgtaaacagcaggagaattaaaagtatctgcttaactgcaaaatccttagcggacctcagctgatacaatatctcagcacaaataagcatgcaagaggctggtgagagtagaggagagtgagtagaagtgaatctttgaggtatggaaagccagtgccacccttgagagagtctgcaaagggatgggtattgaaaatgccctgattcaaaactctcacatctgaaatgatagatcctttcaccaacattgatattatttgggaccagcatctgtgaagtactagcttagagcagccgagtctccaagaataatccttgaaaacaccaaaagaagagcaaacctggaataacatttggagacaatggaccttgctgtgtgcacattgactacacactctttaaagcatccttaaattaaacacaatattaagtggactctggtctatcattttcaaaatttctccctggtatgtgaaatatcttcaggctgtctcacgtgaaacagcggagatggaaaacacggcagctccagctcctatccatagcctccacatccctatattctctaagtaaggggtaggtgggtgtttttttaaaatttcttgtcttttttagtgtaatcaaagtgctcaaccatgtattttctcacatgctgaataaaaaagacagtctgtgtagttctgacatttagctatacattaaaaaacaagttgccacacgttttgcttaaaatgcatttccattaacctaaattttaaaagtaagattcatactagtactaactttaaaaaactgtattaaattcaaataggtcccaaggctaatggaagcaatttgtataccaacccaaactgactggcccacttttcaaaatacaggtatgataatcttgtggttttaaaaggacatttaaattgaaagactgtgaatttagtacataattataccaatagaactctttaacttgtcaacttgtaaatctaaaaggctatcaatcatttctaaagaggaaataaaccttaaaattccttgattgacagtgcttactttttatgtaaggaaaaaaaaaagctgcataaagtggccagaaatccatttacaaaagtacattgttttacacaggtgagtaaaaagccaataattacacctccaaaagacacataaatcagagtaagtactttttcttcacttgtatattttaagttagagtgaactttaggtaactttttattagaaagatttttttcccccaaatgcaatgcttattgaagtcattaatagagtggcattttcatttaagataatgtaatcatttttgcaaatatgagatttagttaaccctccccccatttccaaacagtaaactttcaacctgtctcttgtggaaattaactaaaattacacccaggtgtatcaaatctttctatctatactagtatatgagttaaggcacaatatttattattccttccattttatgaattactttctaaacccttgagaagaattcttttttcaaattagacttgtagagaaaatgccatagaattctttaggcagggaagctgcaacttgtaaaatccactgtatttaatcaagagatgcatgagagagacaggaatgagcaccaaggtttaagttatttataatatccacccccacccataatgctaattgccaacaaaaatgtttaaccataaatagtagctttagacaattaaatgcatcattttaatatctgaaaacataattcagcatcctgaaaattctaattcttggttttacttttcagtctaagataccagtaaaatttgaattgttgccccaccacttcaatcattagcataatgaattcctattgtgtctagaaattcatggttgttaattgaatgactgtctgatgtatggcggggagagagatgtttctccggctatatggccagctcacagaggaatgaccgacaatatcagcaattaaaagaaccaattcaaatatcatatggaactaatagctaaagagctgaagagaagtcattcggctgccacagagtaattgaattagacatattaaactcattattcaaagaaaaataaggatttactccatggacgtgtactatgagagaggaaatatttaaatagtaaggcaagggcttttaacttatgtcccatgcctttatgatttgctgtctgttcatagctttaaacaagttaacctgccctcaatacaggtattgaatattacaatggaatcgtccagtgctgcagacaaagctaacattaaagatgctagacaaagctcactgtcctaaatccaaaggaacctgatgatttatctgattgcattgactagagaaaaaaagtaaaccaattactgactgtgggggagccatctgacaaagactgttattttaactgcccccacaaaaaatatattaaacatctgggaagtgggggatggttaatttaaggcacccgcatggaatagaatatgatgccatcctcaaaagcaatgccataggaaaaaatatttactgatatattgcttggttaaaaagtagattacaggagcatgtgtacaatatagttactttttttaaacaaacatatatagaataaagaaaatatgtctgtgtataaactgccaaatagtagttatttctaagtagcgggtcttaaagtgcttttcttcctgttctttttgctgtgaattttctaaattttccacaatgaacatatattacttatataatcagagaaaaaggttaagagcaagagattgttgctgagatggaatttgacctgcttgtataaagtaatgacataagaaactatgctttaagaggggtctgtataccctttaataaccttgcataggttattacagaccataagaaaaataagtagtatacttttggccagttgtataaatatgtgactattcataaactctctgaaaatcaacagagagggtaacagggaggaatcataaagaatggtatatttatttcatcagtgggggtagtcataccttagggacatacatctactctgcaagaatgtaatataaagttaatccttcaacaaagtgacctcattgtacccaagcgcagggctcaggaggcaccagaagaaatgggactaaccaatttttttccccctcaaacttgggacaattccgagaatctggtagagcaagaaaaaaaaacttaattggacacaattaactacaaataaagaagcatgagcatcttagattgaaaaaagaaaaacagatgaagctgtaaactgcaagaggaatggaatgatgagaacagcttgtgtggccctgcttccaaatacccagtccacacactctgaaaagggtctgagagggtgtcaccctaaaccagttaggtttagaagaatccattatcccaaatagaaaagcctcaatgtttataccatgagaataaaatggggccaatgtatgcattttaaaaattccaaaagacattaaattatccatttattcagtaatcatttttagtgcttaccatatgctcaagaagagggggtggcattcgtaggaatgaactgtttagtgtcacaacatcataagccctttaaaacaaactttccgaaaggtacacataatccaacccccaaagacagatgaaatcctctacttgcagagctgggatgcagctcagcatctcagcatctcacagccaggtcctccttatagtcacctcctctgctcctctttctgacaaagtctagggtcacaatacacttaatggggatacattaatttaaagaacaatcaggctgttgaggggccacagcaattgaattcaagctgtcttccactgaccccttcaaactcatttactggtagaaagatatttactgaacccacatagtaggacttcgtggagttgtgtacagcttatggaggggtacatctgaaacgttcctgtaaatgcatgaaaagcaaaatcaaatgctcccaaacaggagagtaagcttgcagggcaaatgtctcagctgagatttgagaaggatcccctcacccacagctatgatgtgatactggggaatggatattggtgggatgtatctgttgtatgcaccaggatgccatttgaactgtatcaacattactacttttgaaaaaaaagttaatgaaatggttaaaaaaatcaaactgttttattctggctttatgttgggactgcttatagagggctttaggttccttccggatctcatcatctcagagtcccctaaaggaaaccagcaactttctattccaaccgatctctcagcctttctctttatgggcttcaacccaggtggtggtcaagacagaacagctctggttctacaaagctataatctctaatgtccaaatgtgcatgcagcatgaaatgctatatgcaaagaaaatcgagataacacaactagtttttatgcactcatactaatcacaagcttctaaaattcaattgaaaactcataataatgagtgaattctaaccaaatatatatgtggccttttcatgcctatagtctctttttctttcttaaagaaatccacttcacaaacacatcaaataaaggaaattctctgtaagggggtatatttgcaaattaaaatcatatagtcaagccagatgcattctcagttatgaaaaatgatttttctctttttggagtttccttttaaagaagccactcctccgtccccgttaacttcttgaatacttattcctggaaacgatggaaatgagaggctgcagagttctgttcagaaacaccaggggaaaagtgctttgggtgccattccaacattggcttacagaattccctgcttttatagctcagcgactcactgccgtgctttcacatatttctggggttttaatttcctttttttaatggttgtgtgacatgatgtcattttgactggaaataaaaagaaatgcagatattaggaaggcaatattaatattctattgccatttaatgtccaaacaaatatctagactctatgccaagtaataaataaaacctcatagcagaggcaatgataaaactagcacctgggtctccaagcttccctggtgactactccatatttgaactaaaggagtaacagcagagcatttccctccaaggcagatccattctgggcatgagagttattacatatgtgttaggcagagcctttttgttccataatggccccatttttccctcagtcactaaattaacaaccagaggtaaacaataaaacagcaagttatcttcacaaatctatctttaagactgagtttaaaatatataaaccgaaaaatcagccagaaacctgaacaaggccagaaatattgttcacgaggaaatttgttgcatttccagccatttggatatttcattacctgcctagatacttgatgcacaaacggcacaccaggtcacctcttccgtgggagtgatacacttcctaagaaacccaacaccaaattccttgcaagtgagctcctgctttcccgtgaaatgcttttacagcctggtgcccctgcctcggagagagcgaggctcaggagggcttcagggaaggactcctggaaccacagaaagctgtaactttctgcaacaagaagggtgtcaagacgaagccaacataggcagaattaaccaatagagaagccagaggaaaatttccaaactgcctttgaacatgccctgatttttttttttttttttttttttttttttttttttgagacggagtctcgctccgtcgcccagggtggagtgcagtggcgcgatctcggctcgctgcaaactccgcctcccgggttcatgccattctcctgcctcagccttccgagtagctgggactacaggcgcccaccaccacgcccagctaatttttttgtatttttaatagagacggggtttcaccgtgttagacaggatggtctcgatctcctgacctcgtgatccgcccgcttcggcctcccaaagtgctgggattacaaccgtgagccaccgcgtccgatcaccctgatgtcttatttgtagtcttcaggtctcttgatgtgtgacaacaactttgagattcaaaaatcaagcaaaggaagcaaggcctctctaccacaggcacaatcagaggtattaggtgccttgagtggttacgtcctttttacaaagagtgcagccagggtaacatgcaaagaaaaggctgaagacagaaggtcaactgaaaagcaaagagcctaggaggatgaaacaaagcaggggcactcggaggaagactgatgagggaagatcctcaggactgtagcttggaatgcaaagaacttgcatatgtttggaaattaacaattcttggagaagtaaaagccatcaagaagaggaacaaagaattaagagacttgcttttgtttttcaaaatgaaatcaccttactgtttttctaaatctaaaagtaatgttaacataattattatataaaaaatagtttaaaggaggaaaacccccataatatccccattcatgtagaagcatgattgatattttagtatgtatgcttccaaacattttcacaatactgttttataaaaatatagattatatacaggcttatacctatctctttctttttgatgtttgtagcttaccgtattatacagatagacataatttatgtaacaaatcctctactaactggaatgtaaggttttcttcccaaaattttcactgacttaagaagcatttataataagcacttctcaggataaaagaatatgcacatttcaagtctttcagtatacatatttcctaactatccttcataaaatttatgccaatttacattttgacaggttactttcaaaggcatctgcaaaagaaaactaatttttaagattttgcatcttgaactcaattattctctaagttataaggacctctgaagattgtaggtgttaacagtcacaatgattccttgtagaggtgccattttaaacataccctgaggtcatataagactctttttccagtaataacaaagtgctttctagaaattatctccttggttcctacaatatgcccttgacgtaaatgttaaaaattactcctaattcaaaggtgggaaactgaggcacagaaagagttggttgcataaattagcacagaagcctcattgtttatatttttgtagtcctttattattccaagatgactattttatgttaatattgatgaacctcaatttgccacacattaacaagtcctgataccaaatcaattaaactgctgttttttgtttttgtttttactaaatatccgtgaaacaaaatcccagcactaacaggaatctctgtgcctaggctcctgacattttacacatgaacaagccgtttggtggcctgatttttattatgtaaggctcaccatgtcaactaacacaaaccttttggggaggccaccctagtattttaaatttgcccccaaatgctcaagaaactgttttctgtccatcaggttcttcttattggtctaagcctacaaggagctctcaaatgctgatttgactttagagagaaagagacacaaatgctgtctctgagatacattaaaccaatttatactacaaccggttggcattttctagatgtgtggtgagaagttactggcagaagtggagcatctcttcatgaacagacccctttcttgccctggagggctatactgtgtctaaaatgggaagtaggtgaacctccaataattaggagaaactgtattgctctctaagtgtactacagttgatgagaaaagctgcccctgttactgtgtttaaagtgctctgaacagcatggccgtccaggagccttaatttagattcccaaatttgatccaactttaaaactaaaataaaatcccttgagcaaacagaagttgaatgtacacaattttttttttgacctttcaatctttttcatttgggtgtttttttaatttggatcattcacgattaggtttcaaagccaaatttgctcctttaaatgagaagagaagaataatttccactttgtaatggatgatggcgtttaaatattggagaccaacatattctgtctttcttaacatttaaggatacgtccataattctcttccctactggcatagtttctgatataacaagagtaatattacttctataattgttcttcagatttcttcccaaagagttttgacattagctgttatcaagggggtaaaatcacccagcctgtctgataaacatgttttcttatatccccaccccagcaagtgctgtgacactatacttttatcaccccgtgtgtgttcagaatgagcttagaacagcaattgccgggaataggcaggcgataaaccgcattgatttaacacatcttgttttcaatcatgcttggattttctgagcacgcatttttcctgtactctggcttgtagcttttatctgacgagctgatcccttttcactggaaaatgaaaaggtcgcacaataagacacggtttactggaacttgaacacgcaccagggaaagtattttagataaatactgtcagacatagtggagctgaatttcaacaacacaattgctaaacaacaatacttattactctcctagaacaagcctaccagtgacttatggctctcagcaggggacagcaccgagtcaggctccaaggcgaagaaatccttccctgagccttgtgctaaccaaacgcggagttctgggctgaagtcctacttgtgattgttaatatcatggttttatgagacaactcagaaaatgactcccactgttcacagagttgtttcctccaaaccagtggacaggtttcagaagagttgtaatgaaattataacagagctctgcagacggtcagactggaaaggaaaaaacaaatcccaagaatggtgataaaaaagtgactccaaatcatccactaattccactaataagacaggaaagtacttgtaactggaagatattagaagattaagtgattatttggtaacattttaatggaattacagagaacttacaacaagtatgccatgcagcgagctacaatggccttgcagataagcctggaagtttttatcagccaaagcttcaacttaaatagcatcttgatttaaaaataaatgaagtcaggcttcttcagtattgacctaacctaaatgattatttttgctgagcatcttgatcctaagaagtctcctccccctgactattatactctagaacacttttaacacacattttgcttatacatttattgtctactacttcagagctcctcaaactttctctgttcacagtaccctgagtatctcagcaatcccttcaaagcatccctaagccaaaagcaatgcccaacaattctgtttattaactacttagatgcgaacagcttaaactttatgttccagcaacttagtaggacatacatatttgacaaaaactatataaagaaatggacaaaaaatatataacattttatttcattttaaaataatcacaatttactagtgaaacatgtgttcctggtgggcaccacacaactttgcacacctcagaatcagactaaacacagccaccttcatttttgattccatattggttttcacgtggcacttttttttgtaaccacagtaaatgctgaaaaccagctttgcaaagatatgacaccatcaaaaggatgcactgtaaggctgggcacagtggctcacacctgtaatcctagcacattgggaggctgaggcagaaggatagctgcagcccaagagtttgaaaccagcctggtcaatatagtgagacctcgtctctacaaaagattaaaaaattagccaagcatggtggtatatgactgtggttccagctactcgggaggctgaagtgggagaacagcttgagctggggagttccaagccacagtgagccatgatttcactactgccctccagcctgggtgacagagcaagaccctgtctttaaaaaaaaaaaaaaaaaagcagtataatgtaatattgagttttgaactaccttaaactggtagtttatacagtatctgatgtacttgaagtatcactgtttccctcaagtttgaaatatctcatagcatcccattaagtttgtagggacaccttggttgataagtttagaaaacatggattcactgagaagcataatattaattaaatgctaagtgccacaatgaattacattcattcatgtgtatcttgtcttcttttaataattacaacagcagcaacagcagctcacacttcctaaggacttactgtgtgccaggcactttatatggattaacctatccttcacaacaactctataaggaggtactatcattattcccattagacacagaagaaaatggaggcttggagagttcagactttgcctaaatccaccgagctaatgaaagtaggggctgggattcaaacccaggcagtctgcctcgagagccctactctgaacctgttcattagagcagcaagttaggccaaccaagggctcctcagagcagatctctaataattttggcttccaggacttttgtgatactgtttttgctattcatgtatccttctatctacaatctgttttagtcctttcctttgtctcaatttatattccatgaaaacactccagaacccatttgacttccattttcctaataacacattcttcttccctttgtcccaaccgtcctggagtaagactcagctagactgcagccaggctacataattgacaggatatatgttccttttggaaaagtcacttacattctttaagtattcctcaactgtaaagtgaagatttaatgtgctattatttgtacagtgattagcacataaatactcaataggcagttgttattactattaatagaatataggccatgtgctagaaacaggggcaggtgcaatgaatacaggactaattagacatatttacatattccccactctcaaggaactccagagtctagaggggcagaaagacacaaacagaattctaaaacagtgtggcaaatacaacagcaggaagatgtggggttctagaacagcgggtgtgttacacttgtccttgggactcaaccttccccatctcctttatgctaacttggaattacagtttaaaaaattctaccacctctggttctcaaatattaccctgaaaatgagctccatctggagtaggacacaaccattttaaaacaatgtaagttctgtgaacaaaggagaaaaaaataggagacacctaattaagacaggattcatttccagacttggggtgttttatactgtttaattaattaaataaaattgcaggcttgctgtatacaaggccccatgcttaagaagatgaaaagaaaaagatgtacaacatgcaagtccagtgccctgtgagtccccagctggaaatgattgattccatttgaaaaactcttctaggcactgtgccatacccttgagaagaacatggtccagtggggagacagacctgtaattggctacccaaaaatatacaaaactgtagcattattaatgtacactgcacaaaaggaggaaaaaattaattctctgtagtagagtcagggaaatacttagctcaaatatctgagttgggtatggaaagataaataggatttttctacggaaaaggacaggaaaagcattccaggcaataggaacagaaagagcaaagggagttatacaaaagatgtgttcaagtagggttggatgttccagtttgggcagagtacagcttaacatgttgagagtgaggtgttaaaggttaaccataagtaacagtattggccttggtgccttgctaagagcaggtagagagcaaggagtcatttaagattttccagatcgtaggagcaacacgatgtgatcaacattttaaagagccatagaagtaaaatgaaggttggctcttaaaggcagcattattgtaataatccaaatggaaaataaaagaccaactaatgatggggtggtcatggaggaaaaagtagatttcagagagatattttagaataaaatctacatgaattcagcaacatgccagatgtaaggcaatacgaagaatgggggatggctgacatttctaatttatctgactgagtggaaacagtggccatttagcagaaagaaaactatatacaggaggaaaaaaaatcatgagttcaatttcagacatgctggaatttaggtgccagaagatctaggtaaaaatatttagtagacagtcgagaataaagaacagaagctcagactgggcacggtggctcatgcctgcaatcccagccctttgggaggctaaggtgggtggatcacttgaggccaggagttcaagaccagcctggctaacatggtgaaactccgtctctactaaaaatacaaaaatcagccaggtgtggtagtgcatacttgtagtcccagctacttgggaggctgaggcaggagaatcgcttgaatctgggaggtggaggttgcagtgagcactgcagcctgggcaacaaagtgagacactgtcaaaaaaaaaaccagaagcttaggaaaaagatcagtgatggagttaattctatcaggaacaccaatatataggtaatagcaaaaaccacatgtgaaaagagaacccagggcagacactacggggaacacaagcaggtaaggaatggttagagagagattgagagacaaaacaggacaaatacacgtcaaaaaggtatagaaagaataccaggagagaatagtatcaccgaaacgaggaactcaaaatataaggtgttatcaacaccatctagtgcagtcaagcaaccaaccaggagaggtctgaggagaagttgtaaatgtaagcaaatttgtaaattagtatattaggaagttgtaaatgttatactaagatcattagcataaatggcacacacagtttcagacaacttgtggatgctttaatcctaaagttctggttttcttcagtctcactctataactcccagtaaaaagatatgaacctaaatgagtaagtgaggttggcaaacttgtttgcccaattgtagcttagcttatcataagagccatacaagaaagcgtggaggacactcagtcccagatcagtccccagtcctaaagaaaactgtagaacttcagatgcctcaaggcaaaagctgtcacattcaccggaaacaactatgatgataaaccttgagctgacttttagatttggttaattcctgttagtatatttggagcagtgaagatgaggggatttccatggttcttgatgttttctgctgacactcttaatgcctgtcttttaagaagtggattgaactaagttaatgacttaaggtacccagtgaagttctacttcttctaatctaccctagatttggacttgtgctccgtctcctcgccacaaaatattgacaaaatatagtgtataataactagaatttaatcttcccctttggatgttggtggtcttaatattggtccccagcgtcttacaatcaatagatgtttagttaagcagttcacttgttttggagtaacagttattgtgtgggcaatgggtatgtggccacttccgcaataaccccgggtctcctgacagagtgaacattacaatcacatatttgttgctattagctcgtgagatggtggaaaccaattttgaaaagcaagtaataaagcaccacataaaaaataatggtgtaattacttcttggtcaggtaatacctactgtgacgataaaaaccaaagggaacaccaagcatcaaaagtgggtttgctgtaaatttgacactggttctgaccttcagcaaggaaaaggtttgaacccacccacctaagccaggtacacagaagactctttgtgtcgtgtatctttaccaagtctccatgtaaaagcattttagtgaatttatctcattagtgcctacatcagttctcaagagctgaagagactagaccagttgctacattactgacccaaaggctttcataatctcatttgaatttaggccccaaagaaaggggtctggtaactgcattagaaagaaattgccatgtggatataatttgttgtctaaatgtagaggataaagagggagggtgggggttctaattggaatatggaccacactgtccaggagaaagtgaaaataatgttggctgttgctgttgatctataagcaaacaccctggtaatccactaacctaagtggaagaaaccaatcagcctccaccttcaggctctgattctttctttcacgtgccatcccaagtgctagagaggctttcctaattcccatggaataatgtgggtgagtgtagggagtgaaagagaggcttagctaaagttatgccctgaacttttaaggataggatagcacagtccatgtttcaggacatcatggttaagtttttattactactgctttgggttatttccagcttgggggaagactcgtggttaatatttctgtttagcttgtctgagagctgcaaatggttctcctaaggtacacgcatcattagaagactttatgacaggacgctgttagagcatagcatttgtcacagcacaagatgaagcaaaagtaggttagcttttactaataaaagtgacaattggttaaattcttaataacagcaactttaatggagataatgagaactcttatacccagaaggttggttagaaatcagtacaagctttctggagggcaaactggctattttgggtggggaggatgaaagaattttaagcttagagactggatctgtattaagttcagaggcatccccaaaagtaggcccagtggccacataaactatttttccaagtgggcaaaggcctttagaaatgccatctagcgttaccagaagcccttgttcttgctaagattcctctggacctctttttccttctaactggaattaagagactgaagttccccaaactgaatcttgcatttctctctatattgatgggtggaatggacctgcttaaaaccaacaaggaaaaaaaaagtgaccttccttctatactctctctataatcttcctgctcctattgaagcctggtgaatttagaggaaataaaaatacatatttagctccatctgcggaattcactttgcctgagaccaatatgtgagatattgttgctggctttttcagagggctgggacatatctacaggagcagagatcggcttgataaactgctgacctattctcaaatggaaaatttttgtgattatattgggacaataggtattgtgaccctttaaggacaaaatcaaatatactggattgcatttttcaaaagctaccaaaacaacttttagatacgaatacattcttctaagtctcccttctaactctagatttaacagtgtgatcttgatgtggtcaggtagagaggggcaaaggcacatctactcaatcaacttcagaactttattactgcaaaaatcttccttcagcaaacacaaccaggcttggaaagcctaagtgaccagtgtaagatcaacagctagtcaacagctgaatcacaactaaaactcaaatgttggagccgaaccaaccccagtcctctgtgtcattcctccatgtaagcctgacttaaaataaataggatcatttgttgagaagcggttctgagcatttcacttttgcaaacttaattttttcctttggataccccaaaaggtagatattcctatttcacagatgagaaaactgtggctgctagtcttgggtgaaggattggtaggcaaagaaatgaaatgtgattgaattgcacctatggaaaaagacaacatcaaatctgtcattcagatgacatcttcatatacatgatctatctcctattactgctggccatttcaaagccaaatagacctgccactttataaaacaaacaccaactaaaaggaagacaacaaatgttcccaggaccctgaaagtatcatggaccatgtctacaaagcatccgcatgttttaaagccattgccaagctgtcctttaaaggctgttttgcaaaaacctccaagactaaaaacaacatgctgtgactttacctacattcttgtaatggaaatgagataagaatagtagttcatagtaattgatgcacaatgaccttgtgccagtgactgtgctaagcactatcttacaaatcaccaactctttgctgtctctgtgaagtctgtactgttatcatcaccattttacaggagaaagacccttaggacgatagaggggtgacggatcttgcctaagttgcacagcagtaagagctgaaccagggcaggctgtcactattgttcactggcttctctgtgatggactgcccctgtggaagcatttagctaatacattggaagtaatggtgttatctttcccttcaggacaacacaggagaaaacaaatagtaaaagatgcctacagtaaaaatatctgtcttagacttgaaaaatataaatgtatatccacatatgctacataaagacttgacttggttaagacatatgttttaaaagggaaagttgccagaatggatcacacttaaatacaaaaccagtttctgtgcggtgtgtggtggtgacatcacccacaaaaaacatgggaaatgacacacgcttctccatgaccatcgtccagcttgtttaatctcaactggcaagtttcccctcatcaagtaagttgaaaatggttatggaatccagaggtagctccggataacacgggtggaattctggtatgccttcttcattaactgctcataacccagaaatgagaataaagctgctcttcctggggagtcttttaactgaaaaaccaatcttaattgaatgcacatatcagttaactatcttcggattcacaaaccattaatgccccattttcacatagtgtcttctttctggcttgtctgaaggctggcattctcagggctgtgcttagaggaatgtgagattcagcaggaatatggaagggacaggagagaaaagaagagagcatattaagtgctcatcttcacaaccaaacgagcgttctgggactgagcagtaagagcgtcaaataatgctgcccttgcaaaattgacgtcctcccatcactgctccgagtcagtggcaaaggaatcacaaataatgccattctgccctctgaataccagttaagcaggcttcaaatgtgcctactgagggaagaggaggcttgtaaatagagcctggcagatgtaaaaggatggtataatgatcaaaggaggggggaagaaaactaattgcagatttctctcttgaaatatttggcctgtttgaaagtcccactttgtctctccagagcagaaaaacctaagcaggagtttgaggtgtgtccccaaggcaatcttgtcaagttgtggcccacagcatggcaattccctgtggaagagggcctagattgactgcccttctatgccaggagaagcaagctccttgaggaagcacatacctcttcccgagtatgtggcctcttaaagtgacaagggtgcaagagtatgtatctctgctaataaagacatcatttacaattggactttgtgaaagacagaagcgtatttaagttctttctgaatttggaactacttggatcctatcaaaaacaattttctaattgtcattaaaatactggaaaccatgaagaagatccacctcccaaaatatgcaatgccatctctttagatttcctgcttttgctttggaaataaactcagaatctaatagtcttccccttggccaagattctaaaaccaacagtgaccataatcctgtaaacacagaaagagattcctaactcactatattcctggccttgaaactttggtgtggaaggcaccaccaaatcaggtcacttgagtctaggatcaaccacgctacagtgaagtcaacacttggtagaaaactgtgaaagtgggctctagtatacctcctagcaatgccattagttgtgacataagtcaataagttcctatagagtttaggatttggggaaaacaggtaatacttttgtattacacgagggaggtgaatatacactgaataatagcagtgatgagtttcttttacacggcaggaatattttcttggctgttggatttagcatatcaacaagggaggctggacataccttttctcagagtttcattagcctgctagaatatttagaggtctgggcaaggtaaactaactctcccatgtttgtgctgaagtagaggtacaggtcccactctgagtattgaattatcttttctcatgatgacatcaacattgaaactacagagagcctcttttgtagtcaacagtatgggacactggatttttatctccctttggacaatgagattgtggttagcataacactggtaaatctaacattaatgctctgtcaaaaattgttttatgaaggctagaaagaggttggagagaaaggaggtgcatccaggaatagatacaaaaacattgaaagagaaactgaaatcaattctgtaaacagcagaagtcaaagcatcgtagttgtcattaagcacctaccattataatattcaaacaataagatatttcctgaaatatcagatcaattcttaaaggagagctgttcccagtggggtttacttgtggtcctctgtccgacatccattagacagggtccctgtctttagtagcatgggttcaaacaaatgataagagaggaaatagattccattctctctgtttactttattactattgatttatgaattccctctgatctatttcctaactgggcagataatatacatttagtaccaaaggtaattatccaaaatgaatctagtttgcaactgggtgataaaaaagagagaggagactgatagattaaatacttatcattaaaaagtatggctgattgtattaatatagatacaagagctttaatattctcactttacggctagatataatttcctagactaattgtgagttcatgtggacacttgggcatattttatttctactctatattttatagcatcattttatagtgcaaataataaaagcattatatgaaaaaattatttcaaaagttttttttaaaaatctaccacttgcaaaaaaaaatcatttagggcatttaaaaaaaaatcttcataaagggatagaacatttagttaccacaaattactatggtttttaaagcatcaaagttagagaaaagagcaaagattgtatcattatacgagtataaataaaacaacttaaatttctagcaatagtgaatggataaataaatatagtaaatccacactgtgggagatgatgcagcctattaacatgtttatgaagaaattttaatgcgtgggaaaatgcttattaggctatgtgaaaaaaacaggatataaaactgtgtgtgtgtaaacacatatacagtataaccacaaatacgaagaaaatgttcatatatatttgttatgtatagaaaaatatgaaagaaatatacaaaaatctttttagtggtcaactctgggtgatggctattggatgatttgaactccttaaattctatcctgtttttctctaaattttctaaattagcacatattatttttatatctaagcacgtattagagagacgggcgaatgaacaacttagaatgaatggaaggtaggacacatgttgcgtttgcccctggctcataatgacctgagggccatcacatgccagggactcctttactgatgcctctttggaacctctccacttacaggcagagtaagctgtctgcagaatcctaccagatgtgtccaagcgtcatacactcagggatcatcacacttttaaaagacatacgtagttatagaaataccaaagtactgaggaaagagtacagtggaacagttaagaggatgaattctggagtcagacggtctggccaggttcctccacttgagtaactctggcaaatgcttaatctatgtctcagtctccttacctgttgaatcaggacagtcaagtgccttccctatagagatgttcagggattcaatgggctaaatatttgtaaaacacttagaagactacgttatacaataagtacttatccattaaatgaatacatctttaaaattctgataatattgatcagaatcaacttacaaataaagaaatggacatggccaaaatatttataaaacatttgagcatttgtaagttgctgaggcaagggtgcaatttcagttgagcttaagtcgagactcaggattgtagtggttttagatggtttttttatactgccaaagatctgtccatccatacatttttatctagaatgatgttgatgatgctaaggttcaagggaataattactatgtgcagtactatttgtagtgttttgttccccactctatatttagattctaacagaagatgtgaaactaaatagatactcaataaaagtttactgaatgaaaacacaaatgaatgacttcaccacagctgcatcaagttgtctaaatatgattatatttccacaaaggagccattgttaaatgaactttccctctattaagaactaggattgaagtatcaaatttcttagaatctaaaactttttactattataacttagaaacaattagatggcaagattaaaaggggaaaaagtatttattccaaaaaaaaaaaaaaaaaagcacagcttaggacttgaatatcttcaaggatccatttcttaggaaatctataaagatgcagaaagctttagaaatggagataccaagacagcaatggcagcaccaataaacagaaatagacggttcatctcactagttctgtggttttctcctacccagtagagcgtgacaagagaatgttaaagtaactgaaatcaagaacaatactggaaataagaacagtctacaatggcaaatttttactgtaatacatttcgttactgagtgagggaggaaaacaactgtttttagatactgtccattgttttctatacatttcaaagctcctcttcacacatgtaactttcaaactgacagtggtaactttcagcattttgtggagatcttggctccaatgcagcaaataagaagtgaaatgtcccacggttgtaaaatcttgataagttatccgtgtcacatttttcaaatgtggaactgctcacaccacacagataattatagatgaccagattgtaactgttttattgcttctttttccccataaattttaattttggaaagttaagtgaaaaatgtggtttcaatttcctacaaattgcacacaatttggttttaacaagaaaatagaaagaaagggtatgttctttaaagtgaattatgaactagagtttgttttcgctcgctcaacaccgcaaaaataataaagcacaaaatttagaaaagatgccttacaaaatggaaatcatgaactatagtaagaaagcagaaagtaatttttttttatctaaacatgatttaagcaatctaacaggataatataattgagctagtctttctccctctggtgaagcaagctagaaggaaaggataccggagtagaagccgacaatcttaatacatgtataacaggaaatctgttaataagaaaaggctttgtgtatctccatcttactctctccacaactgtcagcaacaacaaaagaactattaaaagcaatcaattttgaaaccatttaaacatatacctagaaacacaacaaaacacaagaatttataaaggaacttttagtggaaagaaattctagccctctgatgggttctggctataatcttagagttagaccaacatgctttcttgattcaaggtagtggtctgctacaactagcataactaaaggcaggaaccccatgaagtgtctcgaccacaccaaaaccaccagctggaaagcaaataaggaaatcaatcaaccagatattttttctcctttctgccaaaaactttgagtgaatgcacttttcttcattaaattgaccactgctttcacctttttagcaatgtagactgttaggcaaaataaattattcattattcaggcaaaaactatttcatcaaagttgttgatcttcattgaccaaattctccatggcctatgttactaaatagcaccaccatagctttctcaaatttctacttccaaaaatgtttactttcagacagattgtgacgaccacaaaacttacctgcatgagtattctataaacaaagttgttgtagaccaaatgttaacatgagtccctggtaaaatgttgtagccctagattttttttttctggctaaaatatagtatttgctaattttttttctaactagggtttaaagttgcaagtctagagtgcttctgactgttagaacatgaggctggcttatgaaggtccagttataagctgggacttggcaaacttgaagtattacccattgactaatacttctattagtcaaaactgtaaacttctggtcaactacatattttacatattactgcatgaagctctagcagaagttcaccatcctaaatagcctttaaaggcttcacaattaacaagagatgatttactctcttgaaatataaaagctgacttttcccacccaaaagccaataaatctttggtgttggtgaaaggccattctctacctgtagcaatcaagttatgcaaccctcaggcaatgacttttcattgaactcagacctgactgaccacagcattcacaaacatctcagtccccagtgctcaactgacagtgcagcctgatcgccacgatgttgcaatagaaggaaagaatttcctagcaaaatgctccaaagcttcaataacataagaatccacacaaggccatcttgagaaggaagcaagtgatatggtttactcttaaatccaggctggagtattcttcattcattcatttatttattctgtcaataacttttccaaaagagcctcctcaacctatgccactcaccagccttgattccaaatctatgatatcagattggatttttttctagttagaaaaagtattagcaaatactacattttgaccagatcaaaaacaccatcctgacctgacaaagacccccaaatatttgactcattgtaataagcaccttattttgctctaaacaaaagtatttagatgacaatggatgaatattggaaactctactcaattcaatgcaaacaattttaattgcaaggaatttttcttacttaaaattgaattcagttgagtgctcaggcttttccatagcatgataaagaaaatgaaaacaccctaagtaacctcaaatctctcatgagaggtcggggagataaggtattaagaggacagagtgggacaatgacaacaatgagtttgggacatcatttgtataaggtcctggactattgtagaacatattatggctgagaagtaaaattaaaagggggatagatgatgatggtgtagagtttttcttataatttcttataaactaatgtttattgttttgtttttttttcacatataaagactgcccattgcccaattttaagaagatggagctcagtaattaggaaaaaagtagaaaacacacatttaaagtaatctttcctaccctgagccccctggccatatcccctccccacttctctagttccctggactcccaggttaggctgtcttctccctagccatttacccagatttctaccagagcattttgtcactttgatttgcatcatatgccagcacagcctgcctcctgttcatccttgctctgcacctgtctcctattttatcttagtgctttgtaccacactttgcacatagttgacattcaataaaaggcagagaatgaaattcaagagacgaatagacttctactttaggaagttcattttattttcaagctcctaaatctttattgggattaactagctgaaggcctaaaagtggaaagaaatacagggattgggaaggcattttgagatatttgatggacttggaactcccacagaattttaaaaaagaaaacaaaggctgaggcctgcaagggccttggtacaatgcccttggagggagaggggcttcatggaaaatggttgccatgataggatttggggagaacctctatgtttgagggagtttgggtcaggacctatccgtggaagcaaaaactagtgcccaaatattcaaaacatagtttggtgaaagatcacctatgattctgaacgaaatagtgtagataaagacatctggaagttttcctattgaaaaaaagaaagtgtgaaatcagatacttttgtttttaaggctctctttcttaaatttcctaacttggccaaaatgtcaatggtactttagcagcttaaagagctcagcagcaaaccttactaagttctgtagttggccctggctgctaacttgctgaatgtgttgggctgttgaggtgagttctactggagtcttggttgagccccccagattccaggctctcattctggcaggctgtttccctctggccaaatctcaaccacagatcaactttcccagcctctggagatgaagcgttttggctgccttctgaccaagtgtgagaattttttttttttctgtttatgagatagactatagcgtgtttcccagggtaatcagtcatcttgacctgtgatcacaggaaaaggcagacaaaactgggagagtctagatcaatggatttgttttgtaaaatcactgaactctgttgggacaaatttgattttttcttttgccccctttatttttttaaattgagtaacttactcattcttcaaaaattacttagaatattttacttgaatccattcctgattaaaaataacctcttgaagtataaacgtaatggtttttgaattccttttttattccttcatcaatccacttatctgacaaccattacaggactttaactctctgccagtcattgtgcttgtggtgcctaacatgcaaactctatccttgcagctgcctttttttttaattccccagtaaacatttaataaagaaatagatgaatgaatgaaagaatgaacaaatgaattaactaaataatgaagagggcaaattcaaactggagagacaagcagaacagtgtgaaattcatgcatgtgccacggtttgtgtgtgcctatggatttaggacattctaccacagatttaaaatgtggacacgtgggcactaattcctgtagccttgaagttgaggcactggacataaaagacaaagttagtggagcctttctgtaaaataacatgacttctcaccctcatgctgaaaaaaaaaaaaaaaagaaaaagaaagtgggctcattccaaataccccatcacccttcacaggctgagccaggagcttgcctccttgtggctaaattggaacaatgctttgctcagtttggacccagatgtcagtgtggtggtacagatggcaagaccacacatctgcttacaaaatttgagaggagaaaagggcttcagtggcatccagggcttcaaaaggcatgctacatgcatacatcctaaagggaaggcgggctctctgctgggtaacccatagtgatcagtacaataccaccctgtttcccttgtaggcttacccctgcactctccttcctgcaaatgtttatagcctcccttctactgcatcaagtcagactttaactgtctctcattacaagagtcactgaggaaagtatggaacaaactgaaacttgaggaaatcagacttgttagactataatttctatgagggcagggattatgcacatctttgcacattatgtacgtggtatctccggtaactaacatactgaggatgattaataaatatttgttgaatgaataaatggggcacagtgcaacatttccattacctttgtgcctaaatactgaagatcatgttatacgcacaagagcctggactctgaagccagtctgccagtgtaaaagtcctgcctttgccactttctagttgcataaccttcagcaaatgctgaacacctctttgactcagtttcttcatttgtaatacagcgataataatactacctgtcttgtagtgtttttaagattagatgtctaaaaatatgttgagtgcttaaaactgtgtggtagagtaagtgctttgtgagtgttagcagcagtagctgtttgttatttattaataagaatcgggggctttgttcattcagcaagcactttttgagcatcttctagacaaggcatagtacgaggcactggaaatacacttgtaaaccaaatggaagtaaactctgagataatcacagattgagaaccacttaaagtctttaataacagctaccattttttgagttcttcatgtgcaccttttatcatgtgccaagtactttactcgtattatttcaattgtcacaacaaactagtgaagaagatatgcttatttattttctccattattgaggtaagaaaatagaggtttaaatgataatgtaatctctctatggccagagggcaaggtcttgactcttgatccattcatttacttaacatctactgggtactgctgaatacaaagctctgggctgatgagagaggacttatacacgtaagaaaatcacagtgacagtcacaagtttgtatttcaataatcagcctgtctcaaattaaaaagaagcacacaacagagaaggattacaatagattagctaggatatgacatttatcttcctgaatttgagactacactatgaaacaaccagcagaatggccaacagttgacttttgacaatctgtttgcccacaagggaaaaactagtgttttaggacaattcaaatgcacctgccctttataaaacatcaatgacttttttaaaaaaacatatgagctattagaaaagtaatcttaatattctttttaattcaggcaccaagaagctaagtaatcattgttgcaattaattgctttcatgttgcttgccactttcttttcattatgagaaattaaaagacagaagcaaattatacaatatatatttattcaaactgagatgacgtgacatcatttactgtatttgtacttcccaaacatggcgtggttattcttttaaaactaaaattcctctagctccaaactgacttagcatactccctgcagtgatacacttgataatcatgactcaaaaatgtggagctagaaaaggctgagataatatgttgtcactcccatatttatcaccacatttcctgaatcatccagcttcataatgatgatttcttttcattctttgcactgtttggcaactacatgttttgtgaatacctaaaacgcttataaatattctcttcccttggaaccaataaatcttgaaaattaaaagacaaagttaaaatgacttgtgcacttcaccaacgtctccattaaatgtaccatacatctcacaatttcaatattcacagtttaagactcagtgacgactttcaatcttactatgtggataaagaaggaggggtgtgctttgcagtttattgaaagctattttgggagttagtcttgatagttagatgtcttattctttctgcttctccatccttccccctctattcgcctttattgtcaccaggcatgagcctcttgttccatggacctatttttttagagtcagaaagggagagacagatattacagaaacaacagtttcaaggatctgctacaatgacatgaatcaatgtttttgaaatttcaggaagcttgatctactgagaacatagtcagctggtacggctcatatttctagataatgatcacagagtggctgggggatgggatagggagagtgaatcttctgggcaaatgatagcatagcgtgagcgctggggaaagtccacagatgcttggaaataaaaataagtgtacctgggtgatgctgtgagggcttacagtgctatccatttgtatactgtacaaattctaaggtacacatggctgtctaaagaagtcctctagctcccctcattgcactgtaccagatcatcctccctatttctttcttaacacttttgccaatctgattattatcttctctgcctccttgtgtattgcctgccttctttcactggaatacaggtgtcttgggggcaagaacctcacctttctgggttacagaacatagaaaatgcctggaacataatagctattcaaaatgttttaattaaattggaatttgaatattattgcaccctcccctccaaaaaaaaaataatgtgacaacaaaatattcatgtttcctcaatactacttgtaagatcatcttaaagtctgaaaagaacctagaattcttcgggaatgaaatacagtctgccattttaaggcctcactgtgatgatagtacattgccaagtagatttgtcctttaagactttagaaattctaggtgaattaataaattcacggttatcacaaatcagaaattcatgacttatgaacttgaatttcaaagtttcaggccaaatttatttaaagattttgctcaggaaccatcatagtcctgctgagtccaaaaattgtcttaaaatgtaaaacaatgccccattaaagcaaaagccaacattttccatggcccaacgtggcataagtgtattgttttcaatttagtgacttaacaagaaatacaacagccaagacaggaattccttccaaacatgagaacccattatataagatgaagatctgttcggcccctaaatgaaccacacaacataggaattgtcattagctactataaggcaatgaagaacttataaaaccagagccaatgtgttattaagaccaggcatggtggctttaaggcaatatagatttctgagctatttatttatttattattattattgcaggtcccactctcccagccgcaactattccaactctgcaggacccatgtaacaaggcgatagtatctaagaaataatgagcgaaggaatgctgttctttctttcagagcaatctcaggtgcgatcttataccgtaaaggactggatcaatactcccagcagcaagccgctcgataccccctgaattattgcttcatttttcttcttattatagatgagttgtgttattattttcctcaaatcgatattttacaaccttttttatccgcttctccataaattttgtgattactttaaactgggaattccggtacactaaataagatgcagtatctgaaagggacagaatgtactgacatgttttttgtttttgtttttgttttactcttttagacacaatgccttgtttaaagcacgtcataatcaatagccaaagaaaagtttaacataaccctgtgcttgcaaaataaaagtgcaaatcctttaaaatagcaacagcccaaacagcacaaagctgaaaaacacaaaaagaggcaggattgatcagcactttgcatctgaaatttcattcctaatgctttttctcccctcagttaaagggccaatgcaattcccttaaattgtttctcacaaaggagataactctatgcaccttggagagatttaattggcttctatagctgtctcctgctaagtgtttaaaacatcagcaaatcaaatcatgtaaactcatatcctgttctgctgtcggtttgctccaagcttgattatttcgatgttaacattagcagcgcctacactcaacgaaagagatcaggaatatactctctccccgagttccgggatgacttgagttaattctatgcttcctatgaaataatgtgtgttatttggcagagaatgctcagtggtaactaaataatcattacagtgcagccagtggtaattacatggtaattcacattaacttcataataagcactgtatttttcactatatccatctgagaatgaggcagaatcatagtctttcatttctttttaatgctacccaaaataaaaataaagtaaaatcatttgaagggcaggaggacaaggaatataatcctggtgagttaagctagagatttcattaaagaaatacttaaatccattaagtctaattagacatgacatcccaggattcacaaacagtggttctaataaactcattaaaaatttttggtgatttctttagaaaatgggagaatattatattataggctgttttattacattaaggttttataattttatacgggctcttctctttttatgtaaaagcctatggaactttataagaatagttctacttaaatcaatgagtcttaaacaacaatgtgcttcttgtaacatgtacttaataatgcaataaactattctaagtagtatagaataaaatggggagtactttattctggttggctaaaagatagcaggatataggggctcaattccttatagcattgcagtgcacaatttatacctcaacccccatttacatacatattatttaatttgggcaattatgaagtcctgaaagcacttttctattaccacctggatccttagaaggattcacaccataaatgcatcatatataaatgtataaagcagccttcttagaagaaagcagcgggaacaactttaattgaatacttatattagagattaaattaggtctgtttttaaatgagctacccttaattagctgcagttggaaaaggggaatagatatgttttactttttactctactcattacctgtagcatcaatggacaactggccctttttggcttttcaccaataattgagtgcctttttaggaaggcctggaaacaaaatcttttctttgaatcctaacacaagccccaaataaggtttagaacagaaatcccttatataatacaatcttgattttttgttttgttctgttttgtttttgggacggagtcttgctctgtcacccaggctggagtgcagtggcacaatctcagctcactacaagctccacctcctgggttcacaccattctcctgcctcagcctcccaagtagctgggactacaggcgcccgccactgcgcccagctacttttttgtatttttagtagagacggggtttcaccatgttagccaggatggtctcgatctcctgacctcgtgatccgcctgcctcggcctcccaaagtgctgggattacaagcgtaagccactgcacccagctaatttttttatgaattgggatatgccatggaaaaattgaatgataccctcctcacctctaaccgcagtataatcctaacaacactttctggactcgttcattgttagccagtcaacgttcctgtcgggcatcaaacaaacagtaacttcactgggccaggaacacagcacagatctcttctcaaacaggttttaatcttatccctgatgaccatcatcttgcaagtatttctctctcattggcccttaatgatttgcctctaaacccactaagcagaagatcaccgaataaaggcatttacatcttatctcctcaaggaccaccaggggactgaggcacaaaggagggtccacagacattttgtggccaagagggaatttcaccaaaagtctccactgggcattaaattacaagagtgcagcaggggacagtatatttgggtggaccccactaagtccctccccaaatggacccagggaatatgatccaccagttccaatgaggtcttccaacaatgtgctggtgtctgacatgccctgctcttacagtgggctcccacaaaaagatgagataaaggacatgcctttaaattgcgtaactccacttcacccacagtgaaaatggcacttggcttttctgtggggctttgatttactcagaggtcaagaaaacccccttcttttttgtcaacagacagaaaagcatgtaaacaaatcagaataatgatgtccatgacaccctttttgtaaacatatcacatattggaaggtccaaggaattaagcgtctataccacctcaccctttccttgagagtttactgaaagattcatgaaattagagaaataaagagtttatcaaacgaccatggtgatgtttgttgattgattttcatatacattcaaaaattttatgtttttatatatttgcatacttgggaatctattcacaaagtaattagtaaatccatttatatgtgatctgctctggttttgtaagcaaatacatcctgtgttggtttgggaaagacccttcccttatctgagcctcagctgcctcctctacaaaatgttaggattggtccaggctatctctgaggacctttccaactctaaaactcaaaattacaggcaactgttctcttggatgctcttttgataagatccaccattaatcaggcacttactgtatgccatgcactgtactaagctttttatatgcatgaccttatcaaaccctcacagcagtcctgtgatatattctcattcctattttgcagatgagaaaaatggagtctcagagtggttaagaaactggcaagaatttgggccaggattcaaactgggatctgtcatgattctagagctctatagtcatacagtttctttataactaggtgagcctaaggaaaatatatgtagtgtggagacaagctcttggctgataggtggaagaaaaggaatctggtgtaaatatctaccactaactgacagactttagccaagtctttaaaactctgtaagccttgttttcaccatctataaagacatcaacaacttggacaactagattatcttgaagactcacatcccatatatttaaggtcacatttgtcagtcattccttcacacattttttaatgcattgatttgactaatatttattgcatctcactccgtgctgggcactgtgaatacactggttgagaaagacaaggacacggccttcaggaagcttataatctagtgagagacacaggctacacacaaggaagcaaagaaataattcagattgtatcagctggtgatagcgctgtcaataaaagaactacatgtactcaaagtgtcaatgctggggaggcagcttgaggttctagaagcccccagtctaactagtgaattatgttcatagaaaactaaaaagtggaataaaactgggataagtccatttggtaggtataaaaatctaagatattgaaaggtataatcaactagttggaggatacagatctgatatcagacccatcactagatggcttaaatgaccataagtgaaccgcttcacttctttctacacctcatttttacacctgaaaatggggctaaaaatacctgtctttcctcataaagaacaaaaaggaattgatgaatgagaaaggctttgtcaactataaaaatgcatttaagtacatttacttgtttctacaaacattatgatgaagaagagacacatagtgtcagtagtcagacctgtactttgacccccgatacagaacattccagtaagtcacaacaatttttttgctttgatgctagtaattttattaaggaaaatttctaaacctttagataaccctcctatgtcttctgagctaaccaatgcaaatgtttcatttttctagtcttaaaaaagtagagaattatgagaattacaagcttgctgaaaacagattattcagagacactccttcatctaaacctcgctacaagctcaaagagtcatcctggcctcattgactattttaaaaatcaattaaaactaaaaggaaatgatgaacgtgtgtagaatgactgggaaggccatattttgtgcagatatttaaatgtgaatatatttttggcattaaacaaagatctaaattaactccataatgactgggagttggtgcttcctgcagctaaccaccgaggctgatcccaggtggctatgcctagcaagtcaggccttccacccgtgatgtaaagaagttaaccacagttgatgttaacaggaaaaagatgaacaattacatgtgccaggttgaacagcagtgggtatgaggggaagtcgctcttctgttgttgtttctgctcatgatttagggagtgccagtttctgtctacctctcaccattgagagatactgcagaaaaactcaggcctgatattaatgggatggtttccacctgcactctcagtaccttgaataatatgaggtccatgtaaaagggtgagcctactttattcaagtcaaaaatatctgacttgtggtacagataattcaactcataccaaggattgcacagggctgaggacccagcaacgggaaagaaatatcagcatgctgaactatatatgggcagatcccctgccctccaaaaaaagttatctcattaaatatttgagtatttttaaagcaagatgctttctcaattatgttactttaaatcggtaggggcatgaaataatcataatcaatggtggtttagtaatgcttacggaggtgcagaagtcagtcaagacaaaaaggattagaaagttaatataaatgtagtatctttttaaggaggattgacctcttatcattacaagcattcctcaaaacaagccttttaaatatcggtttttaaaatattgctaatggttacttatggctgagaaaaaaatcttccagtgaaagcaccatgcatagatttaaaaagaggtgtatcacaaacaacttagaagagactataatgggagaaaaatggctctggctttgatttttttaaaacaactgatggaaaaaatgacttgaaaaagtttgattaagggtggaaacccaaaatgcagaagttgtatttgtaaatgttgtaaattatgtatgtgatattagacatgtacaagtaacaaaatttatatgtgaaatattgtaagtagacatttgataatgtattggtatctataaatatgtatatggtttacttgctctggaagccctaaacttcactagaaaaaagggagaacaccaaatattcagaatcacactatattctggcatagctgatgttaaaaattctaaaaaaagacaagatatggctgtccaatgatagaggaatgatgaagcaaattatggtgcagccatcagatggactattatacacccaccaaaatgcattcagggagaatttgaactaacagaggaaatgtgtagtgtataatataaacaacaaagcaggacgcaaaactatataaacctattgtgacttgctgataaaaatataggagtattttttagtaccttctttgaatacccttgaatacttccaaatagtttattggctttgaaaagcaaatcatgttatatcatactaaaaagattagaggttcaaaactttacagtcttgcattacattggcaagaatacatatacagctcagttcctacttttattgttaatagctttctaatcccttaccagaaatttataatttagaaatggcaacacatcttaaagattaaagccatgtgataaatagttcatgtcccttaataaccaaatctcatgccttagattgtgagagcttatctgtctcttccttctatatggtttctatattagaagtaagtactcaaaaacattaacagtgattatccctgagggatgaaataatggataatcattatttcatacttttttgtattttaaaaatcttccatataagtatgcattatgttcacaattatataatttggttaaaatacttaaggctccagttcctgtcagaactcacgtgtcctagaaatacctgccactctcccatcaccaacaactgcatttcagggaatcaggtaattccataaattaacaaggtaaagtagcatgccaggaggcttactcagtgcaggctctggtacccttcaccagggttcaagtcctggctcctccacttactaaataacccaggaagtcacttcacctgagttttttggtgttaaaaataggctaataatagggcttgtcttacacagattctcaggggtggcaccagggggtgggggtggggattgctttacatttagtaattgtagagaacaagaagactgggagaaaagatagagttagggtgaaaaaaaaggtgtggaataggagagaacaacaggagaaaagtcaacaaatgtcaaaagcccactgaagtgggaaaccagaagagcagggagagaaaggaggagctgaaagctctagcaagaaatgctgctggcctatggaggatcagagaggggcctacatttacctattttttgttacaattttggatttgattacatttcagatatcgttagggttttagatgagttccattttaacttacgaaaagtacagcacgtggtgggtcccgggaagcaggggagcatgattatggaattcatttaccttggaggttgtttagcttgaaaacagaagcagtgccacactatatagctaaatgcttttgggagccgctcccaagctctcaggacactgggtccttggagcaacacacacccactcatttggggatggctgataaatttcagatcctgaccccaaataatccaggtgtaggacttattgaccctgtgctgtgggtttttcagaaagaaaaagagaggagaaaccaaattccagggggctatgctttaacatgaagataatgatatatctcagtataaggttctgctagggcataagatgattatcaatgactaaaaattgttttaaattcataactccctgatatttatgtatttttaaatgaaaaaagataaataatatgatgtaagatataattattatggtaataagtcagatatatgcataggaaaaatactgcaaaatatatatcattaaacaatattaatagctcacatttattgagtgtttatgtaacaagaaaccggtaggaatgtaagcaatttcaatattattttaattatgttttattggtgcttcctaaatgatctgaaatcaatatgcataactttgcagtaaagaatgaaaaacaaaagtgaatgccctagcgggtcccacgtctcttcgttaactttaacaatgaacaggactggcatccacatcactgcaaacacagataagtaaaacgaataatcctccatcaaacatttggaatacatcttaggaaaagaggaaaagaaatttagagttccacttcctactcctattccacaatatttgagaaaatttcaagatatacagtcaaaagctgaagggttaatttatcatgatgttcggtttaaaaaaagtgaaaacttgaatacttccaaatagtttattggctttgaaaaccaaatcatgttatatcatactaaaaagattagaggttcaaaactttacagtgttgcattacattggcaagaatacatatacagctcagttcctacttttattgttaatagctttctaatcccttaccagaaatttatagtttagaaatggcaacacatcttaagattaaagccatgtgacaaatagttcatgttccttaataaccaaatctcatgccttagattggaccagcttatctgcttcttcctactgtacggtttcattggtaggaaatacttcatatccctattacatgaatgatgaatgggaccgttggttatggtctgttatttgcttggctgtagtcaatatgttttctttggacagggatttctgtgatttatctctctcccggccttatcacttattaactctgggtagacaggaaaaagccaaggttgtatataaggcctcgtggccatttagacctctaatgtcagtgaaaatatcccttttaatgatcctgttatactggctactcaagtcctgattacactccactccaaataggaaataaaggtcatatttcttggaaagtatatttgtaaaatatgcaaaataatatgcttccttcagatcagctttattctttgcagaaatggctctcattttatagctgtcacggaagtacaatggttactttcagtgacttttgttgttgttgttgttctcattatgacaccaacagtatttaactgtacaaatgccagcagattcagaatcactgatcacatcagcatacatctgatcagggaaaaatcatatgttgtggaacaaaaaaaaaaggagaggcttgggacctaccctttgtatcacaaaagcaaaaagaataaacactccctctgccttgaattcttttctttgtgtgtaaatggttcatttggagtaatatttaagacatgtggacaggagcagcctgtgaatttttctttcttgttgggtctattccaattaggacactgctaaggcagagctgctagtcaagtattcattacccagccctctttcagctgaatccctaagtgaaaacaatctgacaaaaaagaaaacacattcttgccttcctttctccaattctttctgagtttgcttaggcttgtctttataacaattaacatatgtatagaatattacgctatgcaaaatattttcatggccattttttcattgatattcacaagatccttgggatgcacagaaaagtgatggccctaccatcccttaagttgagggagacaaaaatctagcagctttaacccctctgtctccctcatccccacatctaacccatcaagtcctttccatttttcctcttaaattcctcttgattcctctcactccattccatctccactgattaccacccaaatcaaagtcaccaaatctctttcccagactactgcaatgacctcctaagaggccttccaagatacattctggtctcctatgcttcttgaagccagagttagtttgttcccaaaatgtaaacctggtcacgtccacctgtcatttcagacacttcaaaactgtccattgttcttaagataacaacaaaactcctccccatggcttataaagttttgcatacccttgtccctgactacttctcgcagccttctgtctcacagttctcctcctccctcttgattttccagcctcactgcaattcttacagccgtccaaggtaccgtgtttcctcccacccagggccttctcatttgctccctctgctggaaggctcattccctaaccccatgctacccccacccttcactggttgttgggttagctctttgtcatccttcaaacttcagcttgtgcaatttttcctgtagagaaatatctctaactgactggtcagggctcttttattatgtgctgatcaaaagcgctgtttctttctggacacgtaccaggtttgaaatagtaaacttatgaacacccattttccctcttagtctttagaataaagaaaacagggattgtgtctggttttgcttaacactgtttcaggacttggcctagaactggtttagaacattgcctagaataagacaggcaatccacaaacatttgtgaggtgaatgaatgaagtaacaaaaggaagtggtaaaatcagaacagaacacaggtatttttattcctattctaatgcctagaaagaaacaatgtctttactcataatcaaagctgacacatacataacatcaaactctaatgacaaattctttggattttcaaaaatatatatacccactatctgcttttctcacttacttttggggagcactcatactggaccaggtactctcaggattgcattacatacattaacccttttactccttagatgaaggtactattaaaatagctccattttacagataagaaaatgaaattcataatataagccaaatcccattttttcatttaaagaaactatgttctatgtatgtaaaacttcaagtagaaagggacagattcttaattaacagctcttatttacattccatgttatccagaggacaaaaatcaatgaagacccattgatcctgggcaatatgtcaatgatagcacctattgcaagtaaaatgctgagccaaatcccttcaacatagtgtataaaataagattgaggaagagtttctatttcttcatgaagcttgtggactttttatgatttgtctacctatgaacagaacaagagaactaaggacaaaaggaagtgaatgatgaatgggatggttttagcacctgggacaaaagagattcaaggacagagactctcccagtcaatcaagatgagttacagggagcaccaaagtcagtccgactgactcatttcacaatgaagagactggagtccagagcacataagcaacttgtctcacagctagcgagtagcaaggctgggatacgatgcaagcctcattgctatcagcccagggctctgtccactataccacagcggtcagagaacacttcagagaggtaagagtttgaactggatccttcaggtgaatcaccatgcccaaagtagctaaagtgagctggaggcacagcaaggaaactggtttgactggagcatcataagccctagccccagagcacagtgagccaaactcgggacttgggctacgtcttacatacagtgagcaaagagggaaggtttctctgcagggtaatgacatgaaagtggctattcagagcgtactgtgacaaagaatttatgtaagaaaagactaaagtgcaggagatccattaggtgcaaactctccacttcttccctaaaaccaatgactttgttcaagcccaaggtggcagcctttattttgtggaggaggtttccaagaatgagaaacagagatttctggtgaaaactctggaagctggagttgaagctgattataatctaaatacttttgaagacagttggtgataggctgtactcctgttgctaggacctccagaggaggggctgagatggaaataagagaacaagcatgtgttgttccctaaaaaagttaacaccagagaactttacaaatcaggagtatctgattaaaatattagctgtgtgatgcattcctgcaaaaatatttgttttaagcaaattattacatttacacttatgcatttctttttcttgctactttatttacactttgctccttttatttggggttgacaggtgttacttgtttctttaaactgatgcctatagttgtgttactaaaaatcccaaaagacatttcttagatttctagggagatgacaaggatgataaacaatccatggaaaatagttactcctggtagggactcagaaacaaaggaatgaatcataatggccaccatttattaatggaaactactagtatctagcctcatgctaaatacagttccatgattctaaaactttacatatgtttccctgatcctaaaaacaaccccagcaaggtattattattatttccttataaagataaggtgactgtggtttagaggcatcatatgatgtcccaaggataacctctctagtaaatggtagatctgagaattcaatctatatccatcatcttgaacctaagcagtcaatcagtatgcgaggtactatccccttaggagggagggaggaaaggatgaggggagtaaagaaaagagagaggaaggcgaaagggagataggagagatgggagagcaagaagaaaataagagggatagggagaaaaaacggaaaacttaaaagtcatagtaaaagatgtcaagttccacagagcatatgcagacaaaatagcccctcctatgtgcaaagcaacgtgttatgcattggcaaaggatgtggagttattctgggcacaaggtacaaacaggaagtatttccacgaagaattctcatttcgaagttagttcacaggctaatacacaggaatgtgggttagtccttccacaggaacaggaaattgggtgaaaaatgtttggaattggaaaagttagtggtagaaaagatctgataagtgacctaaccagacatctgagttgttagatgatcattcatcagggttttcaccaacttttggggggtcaggtggtgtacagctctcagggtacccctaggctgctcaaaccttgtcctggtgtcccattctttcagtcatatattccccgagaatatatgaaaattcttacagaaaatataactagaatgaaggcaacacatgcatttggaattggccgcttcttatcaggaaaaccaactacaaaaactttgaggaagcagctaaaggtgcctaagagtcttttattagcttccaaggctacttagggattagcaggagagatcacgattcgaaaagatccaagccacttaaagatgtaacacctgcaagaaaacaagctgtgagaataataaaggtattagggagagcccttacatggcagtgaggttatagtggatttaattcccactggactgaccagaaacgataatagggctttgaaatcaatcctgtgattagatagtgtttttgtttccttctcttagaaaacatttattgaaaattaaagtcagccttgccctacatttacataagaataactggacacaataaagtaagatctagaaagtgctattgagcttttctgcttctaatccagtcaggattcactttccagagtctgtgactctgattggacaaacacaagggcatggcacattagcagctatggattcctcgtgcgtctctggtctgaagaaccaatgagggagagatgtacgcttgcttaccatccttacaaggggagccagcttgcaggcaatctgtgcttggtcagattcttccctccccaaaaggtctgcctttattagtatagattaggccatgctgttcctgccttttttctttttttttaatgttatggacttttagagacatttacatctacaaatgccaactctctcttgcatactttaaaaacagcaataaggccttagtttggggtgttacttttcagctcaataatatttttcaagggaaaaattccaagtgatatttcactaacaaataagagggttagctcacccaatccagaaaaccaagcctcacatcttgaaatactatggatgttaaagaaaatgaagtgtgaacttctgtgggtggacaaaggagggggccgtacatttgcaatgatctgagcagttgtttggatacaaagaacagagaggttttatgagccatctctatacccttactattaagtggtgacagcagaggtaaactgagtaaatcacagaggccagtagccccagccatgaacaagcaacgcatggtagaggcatttaatgctaatgatcaaaaggtccatgtgtaggtcaccaatgaacacagattccctttcatcagaaatgatgtgatgtcacaataactgttaacagccaagtaactataccagaggggaaatcattgtgccaatttcttcagatttttatttttccgatatggggagaggttagaactctcttctagaatatttaaaaaaaaaaaaaaaggcttcttgtctggtgcccacagtttgaggccagatcaccagaagcattttttcataccttaaatttcccacagatgtatacatgtgcatatgcgccaacttattgctcttacccttaactacttttctaggcttgaaaatccaacacttttttcttaattccagtgtgatatagattttctaagatgtgatttcttaaactgatggcaatttttttttttagtgtttaaaaaaactccaaataatgatggatccctagctcttttctcttgagaacttaagtaatttaatgagggtgatttttttttctaacttttatggccaggtggctctaggggatattttgttgaagactgattaaaaataatttcttctaaatgagacctgaccacaaaatggaaccattaatgggcagggacgttgtcaccaaagcggaaaccatgcctgattgcctcctgtacctcccaccacacaagcattttcttctttttcttctccttttcttgttcttaatagctgagtaaataagcagccagcgaggcctaatgttttcggccaaaaacagagtccaaacttctcagagaaaacatttggcctctgtggttttgaaatatgttccagaacaccgagttcagtgggggaacattgtgaaaaactcccatccattggaatgatgctggggaatgttacagtatcagaagtttcaattggtccttttcctgcagccccataatgagacttgtaaaacacacacacacacacacacacacacacatgcacacagacacacacacacacacacacacacacacacacacacacacacacactgctatgtggaagttctcatgggaaaaatgaatggcaagaaatcctagctttaaaagaaacagctaatctgctagtttgattattcttcaaaacttacgctgaaccaatgagcctaattaaaaacacttggcctacttctataaagcatcatagctttctctacgcttcgtttgtatacaccacaaaactccagaaagactattattttttcaagtgctcactaacaaagtgctgactttgttgggatggctgagctaatttcttgaactcagtgtgaaaccttagctaaacaaaattgtggtaattttccttaatttgtaaaagtgattggagtgcaaacaaaattttcctcttgggtcaatcctataattttcagttaactaaaactaatcgtcaggcaggcaccaaacctgcattttgtttaaagggctgggaggcatttccaagggtcaggatgcattaattgtttttataatttcgagagagagagagagagagagaaactgggtgactaagaagtatgtttggttttacttctaatattgaaatacaagggaaagatgctctgaagtaaaatgtcacagaaaaataaaattcgtccacttaattgtatggttataattacaatttgttaactgttatcccttcactgctctgttatctctttgtgtgaaagcaacttccgctctgtacttaatctggtcttgtggtcttttactgaatggaaaaggaaacctgggactagttcgtggagacagctaccactatccaaggatgactgacactaagcagagggcccagaaccgcactccacctgtggttctttgagcagcagcatcagcctcacctgggattgcttaagaaacaggatctcaggttctacctagacctactgtagcagaatgtgaattgtaaaagatccctgggtatttggtttgcacttcacaatctagggatctcttagcgtacacattgggcactcagcctttatacttgatgtcattccacagagatgctgcctggttctctctgtctgatgggagggaattcacattcactctgaaaccctagcttcttgccgcaaggcggatccatgtgccaaggctgttttgggaggacaaaaatgcagcatacttggaaagaaggcaccaacccagaattaaatatgaaaactaccaattgtatgtaatacaagtgccgtgaacaggctagaggaaagacgtactgttcatgaaagcacaaacctactccataaagccaacaaaccctaacaaggtggcttaacatccagaaactcaggactagctacacctctttccccttctcttatttttcatgtggcatctttaggtatccaaccagttatttcaacagaacgcgccattcaacatggacacctagaagaattcttaatacaataataaaagcaccatgtttggtcatacatatggtaaaatgaagaaagaaagcaggctttaactagattttaaaataaaatacatgcttttatacagacaagataaggggaaagaccccacaagaccacggcagttctgtgctcaccatgtgctgtggttcttacctgtataaatgaatctgcctggtgttcctttgcagaactgcttagatttgtaggacagtgtgacttccacaacaccagggatgtgccgaggaggggtctgcacacggatggcatgaggagtgatcaactggaggagacatttggggggaaaaattgtcattgcaatagttaaaacttcacagtcttcctaatagctctccataaacaaagctttaaaacacataattaacctgtctatgtttaaatccaatcttgatggaacctgcgtgaaagacactgacaacaatatttacaaatgctctgagtacagccataacaatattatctgggttttcctacatggcaggccctctgcttcctggtttgaacagggaacctggcctaatgaaatgatttatctactacaggatatcctttggaaaatctctgaagcagacacccaaatcagagccgagctttgccgtgactctccagaagctgatgggcctggtgtttgaactgagcctgtcaacatgtggaaaacacagaggtagggaaacagcaggccaaggcactgtgattagctgcggagtgcacgtatgaagtacccctgaagaccatttggtgtattaactaccagaggcacaatcaaagagctttacaggggaaagcaaagaatctgcctccctggaatagcttatggatctagcagaactaaggactctccataaaagggaaagggaaagggaaggctggggaggctgcggaatgatcactggtccattatgcaatgccacgtgcacaatgagaaagttcatttctgaactctgttggcaatcagattacaccatgaagcagaatttattttgtattactcttatctttgtttacataactaaaatgttattaatggccataaaactggcattatctggttctttgaaaaatccagccctggtatttgactggttgacctctgatggtgctggattctacatgttctctttctatgggattctgcaattgtctactctttgactcctttcagatgcagttagctcaatatttgtggtattgagtccactgcatacagtggataatttatacagtatacatgagtttaaactaacatgcttgttctgttctcatggggataacttagaaagggctcttatatcaatgtgcaaaccaggcccagtttgagtgttttgcccagagaatcacagataacaccatgagaggctggatgcggccaatgggtccctgactggataaactgttctaacaccaagtcctagggaaaataatttgagaaagttgttattgctaaagcccacaagtaatttatatcaaatgttccttcttgaaacaagaaaaagtcatatctgcataaaaaccattttaacttagcaattacaaataccctgtattatatcttgtaatataaaaaagccctaaatgactgttgaggtatgaagaactatttatccctgtactaaatggctccaggtttctaagattttgaaattatttctcttttattccgcttctttgtctttttttttcctgttgttcttagcaccttctaatttgctcttgtaatctgtgagcatggaaatcaggaaatcgagtttaataatgtagagagaataagaagaaagaggctctgaagggcagtgaaagatgatcttccccaaatcaagagcatgttaattgttgagacactgttactgcaatgttgggaactaaaacttgtagagtacccaggaggtatctaccacattgctggatattttacatacaaacactaatttggtcagaacaatgactgtatttttatccttttttttttcaggtgagaaaacagaatcttaaaattaagttgttgcataagcaactttacccttgtcatagcaagtcagagcaaaaggcaacactgatgcagttcaaaaaagtcacgggacaaacacttcctttgtaatcatagagaaaaaaattgttcatatagaagctttttaaaggtagtaacaaactcagtttttttctgatccaaagactttgtgtgtgtgttttctgtacctatgctctctccatttttcatttattgcctggagctttgccatgcttttggtggtaaaggatgttccatgttgttatatttcaaatagaaggtatgcttctaattttaacacgtacttgggatatagagtaccattaactcacaataatactgataagaactttcagccagttagaaaacacttcacctgctctccttgttctcaggggaaataaattttaaaagatggaaagatattagtaaatagatggatgaagattctttttaagtatagggacttaatatgtatgagttgctataccgaggaacaaaattcacgggctttataaattgattagatatgactgcaataaaactacagactgagagtgaggctttagcataaagcattaggctcaggaaatgcaaacaaattttcatttacaatttcattttcaattttaattaattgccctaactaaagcagagattccttctaaacaacaatccttcacagatgaggtagaatctgaatcataatagagaataaatttgttgatgttttcctagctgtgaatattagtctgggaagaatctctagcattgacacatgatattgatgcttatggaggaaaaacattttagctaactttgatcaatttgaaagcacaggcttatttactaatcactcaaagaactgtagaatttattgctggaaggaatgctagtgatagtttaaagctaatcttcttattttgacagataaggacacaaaaatctagaaatgtctggtggctccgaaaattgacccaacatgctagaggagggacagggtctagatctagggtgtagaactccggacccacaaatcacaaaataaatttcacacattgttccagcctggttgaacccaaggcagccactcaaagcaacagaaggagggagggctagtctaaatttttcaaactttcatcattggaatatcactttcttagttttgtcatatctatataccacctatacaattacatacttaataatttaaaaagtgattatctttttatttaaaaaacttattttaaaagaaaactttatgtcactaccataattggaaaactgatatcaactgcaaaataagaaggtattgtagatattaatcttgaagttaatataaattatagctagatattgttgacaacctgaaggaatttattgaaaagggtgattagctagtgttaaatattaaagacttttttgccctgagactttatccctttaataaaaatcataattatggaataaaacaaagattaaaagagaaacaaaaggagtgatgaaaagagaaaccaaaaggagactaactttctcacagtgtgattcagttctatttcatgtctgtgtcaaatctaaaaatgtctcctgtactaccaaggacccatgccccattactttggtaaatactgttctaagtgattagagaacagattcattctttgacttaacttccttaaattacaagccaaacaatttgggctagaaataaatattcttctgaaactctgtagcatctgccactactctttcccttccttggaacactccattttcttatgagacaataatcataagacgtaagacttgcaaagtgtctgatggtttaccaaagcactttcatgttcactaattttttaaaatcatgtttgtggtttatgtatttcagatgagaaaagttgatggtcaggcaagttaatattatttaaaacacttggatgaaaaccaatctcttatacttataaagaagtattttccagatatcttctcttattcattgattcctgattattttggttttcttcatttgctccacttttctgtcaacttgttagttgtagaaatatcacaagttttgtcttctttttttttctctatttgcctagcacttcttgatttcactcattagctcagccacctcagctaaactgatttccaaatctacacttgtagacttgatctctttggctaagcatcaaattttattagcaacagagtaacagaatctccccaaataagtcttcttgccatctcaatctcaacatgacccaagctaaatttatcatcttactacctgtaaatatatttcttgtttctgtgtctcctgtctcagttaaaggaatgttagcctttgaattacccaaaacagaaaacttgagtttatcattatttctttttcttcctttatttttcttcagtcatattgattctgccccaaactgggccccactggctcttctctgcttcttctctttctcctgttcaggctgtcactgtttcttacactattacaacagtaggaaaaattgccttctaaatggtctccctctacttctactttttccaccataattatcttcttcaaatacaatctcatcatattatgccctgcctcaaaccaaaccctcagctgccccctttgcctattacatagttcaaactccttgacagaataatatttagggttcgccaaggcctgatggccagtttcccttcctaggcacacttcccactttgctttaccacatattggagtaaagggcatgtggatacacgaaaacaccattcccttgcccaacagttttgctttctccatgccattctttcctaaacattcttctactgacattctacttgttcttgaagaccccaatcatacgttccctcttccagtaagttttacctgatcctaagggtgaaagttgcctgcatttttgaggaatttatactgttatgatattgatactataatacttagcagcctattttgctttgtgccataaatagtgtcctatacatctttctctcattagatatttcctgagatcaggaacacagtctaattcacatttgcaacctctaaagtagttaacttggcctggtgtggtggctcacatctgtaatctcaacagtttgggacgctgaggcagaaggatcacttgagcccaggaatttgagaccagcctgagaaacaaagtaagaccctgtctctacaaaaaaaaaattttaattagccaggcatggcagcatgcgcctgtagtcccagctacttgggaggctgaagtgggaggattgcttgagcccaggaagtcgaggttgcagtaagtcgtgattgtgccactgctgtccagcctgggcaacagagcaagactgtctcagaaaaaataataaaataaaataaaataaaaaacaaattaagtagttaatgacttacatacaagatattttcaaaatatttctggaataaatatttacataaattaggccagaattctactaaatcattgactccactgggtatcataatcattatccatgagtccaggtgagtctactgttcttaacctgataatactcaactcttgttttctacctaagttgcttttaatgttagttatctgactagctcgacactcagatctcaatatgagcttgagaccactgcttgtatatcatgtaagtggtaaaaaagaaaaggatgtctaaatgtctgtaactccagtgagaaatgataagatgaaatgaaaaaaaaaaggtttaaaaattaatacttaaaaagtatgccacacaagatctttgctaaatggtaagagtgtttatttctggactgataacattcagtgtgatttgtcttctctgtctgcctcttcctcctatgtgtatgtatttctgtgtgtgtaaatgtcccaaacttgcactggatcatgtaaataattatggaataaacctatttgtacatataaagccattatttttattatgagaaaaatgttatttaaaaagtagaataacatcagtttggggcaatatgtattacatgtgattatataagaattagatgcgtatttgcacagaagaaaggaaaaacttcaaaatgttaatggaagttacctctagatggtagaggtatgggtaattttactttcttctgtatgcttctctgaattctccaactgctcaacaataaaaatgcattaatactatattcataagaaataatttttctatgtggcagtaagatgaaacacacataatctctgcaggcctccaggtgaggctgtcagcatgccagggacctgccggcagcaacacttctgctccctctaagctgcctgtgtgagcattttctcttctccagactcagaccacagaacctgaagaatcctgtgggggttagccaggcgagatatgcccactgtggcctctgggtacaaagtaaagccactgtggccatgacaagatggagccagacatgaaggtggttgaatggggcctctccttgacagaagagctgaaatcaggagagagaatgcatggtagttcatgcagctgtgcacgtagaactccaaagaggcagcctgcaaagtctggaagcccagaagagaggcagggaagaggacaatcttctacatgcgtattagacagcctcccatcatatcaaaagtatggcccacatggtaggtaaatgagagtatctagtgtttaaaaatatgagtggaagcatgttgtagaattccgcagcttttattatctatattgttctagttctcactaaattgatgatggtaatgaccttgataacgacttcaactataatgaccttttgttgtctttttcccatatgtcaagcgctatgttaaactctttcagtgatttacatcctgtagtattatggggtaggtatgattattagctggttcatagatgagaaaaataagtttcaggaaagttaagaaatatgatcaagaaaccaactggaagtggccagtcggcctgactaatgaccatcattatacaaccatgactatctgttcatatgactgttcattgtttttccataattcctggtacatgtactttgcatctgacctctgcctttgaaagcatggattgtatctgcagcttttcccataccttgaaatgaactgggaacatagtggccactcaaaacaactttcctcactggtgaaaggcaagctgagaatgattcccaaggaaaacaaaaaagcaattccaagataagcctttatccatgttttccaaccaataggagtaggtaaaataaatgcaagttgaagttgcaagccacaaagccaaaaaataactggggttactagaaagcacaccagcgatttctcattactaggtttaggacctaatattttaaccttaatcaccttcaacacttaaaagtaaagaaaaaaagtccaaaacaagcaaagactcaaagagaagggataaaaggaaggaaatgtttcttctctggaaaaataatgagcatttgtggctagaaaaagcctaaagtgggcactggcaaggtggtttttagatgttacccattgaagggtctgcgttctaaggcatgctagcccattcactcattgacaccctctgtgcctcagtttactaatcttatactgcaccagctcctatgtgctctgtggaggtgctgataataatattatacatgctttatgtttgggtagagcttctctggggaccctaaagcactttccagattaattttttaatttatgtattaataattctcacagcattctcccttctcctcagttaggataataatatccatctcttttgagataggcagggggtactgagtgatagacatgaagcagacacttaaataagaaaactgtaacataaaagcataattaaagctctagaaccaaatcaaactacggatttttaaagagataccaaggtgttagggaacaaacaggcaaacttgttttccctccactactctgaaacatgcatctttttggagttagacacggcatttaaaatatattattttcagggttgctaaaggaagctgaaatatgaaaagtatatattcttggcgactgtgctggctgaacctccatattatatctctatttccctgaagtggctaccacataaatcaggggatgccagctcttcttctgagttccttggtgtgttttggtttgttccctaatcagagttctctgggtttcataacacagattctttcattcccaagaattgcctgtctcaaaagcagtgtatgatttctcagagaacgtgagaaaaagccagaggaggcatttactgtttcacaaaaattctggtttccttttgtcctttcaagaaaataactttaaaccgatgtttaccaaaatatgctgagtcacatgaatccttaaagataaactttatgtatgaatgtcaaaggagacttttgaaattaaagtctcaggaattgagttaaatgggggacttaaaatctagcttttgaatagtcagtcatgttacttaacactgaaatttctctcaatatagatatcgacatagactcagatggatggtagagagatgtagatatgctttcctattcattgtccgtgtccccctaagtagaatatcagccccataaggatatgaccttggccttctttgtttttgctatgtttccagtgtttaacaaggccctggaactagtagtcactcaataaatacttgaacattgaatgaataaatatcgtgatgccattagccaccactaataattaagataaagattcactaaagtttcttatgaatctacaaaaaggaaataatcaacaccactccattcagaattctttttactaaaaaattcccaaacaaacaacaacaaaaaaaaaactttttactttccaccacaaacttcctggtatcctcattaagcattcacagaaatatactgcccagttctgaccaggcatctaaccaggtcccgaaatcaatgcagttaattgtacaaaacaaaatggcaacaagatcatctttcaaaataacagatttgggagaaaaaagactgaagtaaatacattatgcttccactacctctggttttgtgggttatttatttatttattttgtaatttattttttaaataaactttctccagctctcttcccaggatgtagatcttgtgccagttgggccccattaaagactggatcccatcctgaccatctgggagctggaaaagcaagggtgagttcctgaggcccagggtattccagaaggagagcatcagacaccagcaacgccagcccctgtggtttgaggctgcacaatgagctctttctcaaggcttgtttttctaaattcagtcaagaaggaacatcattccctactcaggcctggctcagtgtcctatgttccttgcttgtttgtttgaaaattaaaatataaaaggaaaaggaaatcagaatgcatttatggaaggggatgaatgcttgttatcaacattggcaattcacatggcagaatctttgcctatggaattagtaaagaaaaatataaaagccaaaagactgataaagtagtcagggaataaattcacctttcaccaaaagacttgtagagtctctccaagcttaaaaacaaacaaaaaaagatgtcaaagctttacgatacagagactcactctaacattttttgtggtgtttgtcatatctagatatgatatacattgatactagcacatgcaaccagtaattcctcacttaacgtgttcattcaggaactcagagatgtaataaaagtaagcactacaaaaaactgaagccaaaccccttttaataatgtggctgtacaactgcttctgctgaaagtctttcaaggttgccttatatatatcctgctgttttaaatagaatatactaaatataattgccagctcttttttgattactcagggccactgtcattaatgagctgcacagtaatatagttctgtgtttgctttttcggctttccatttcttccctagacatcaggccatcagctgtcactgagcctgtatccaatagcctgcctccacacatgatcttcctctagtttgggcctcctaatttgctgtgacctaggaaaacagataacatagtttgttaagaagtattgttctcattaacccaaagctttttattttatttacttttttggcttgcttctggtttcatgctgaattttagggagttgagattattataacacatctctggataaatgaattttattacattcatattagatagttaagagatagctatggagtcaggtggactttgattcaaatccaagccttgtcaataatcagctgtgggacctttggaaagtcactcaacctctgtgaccttcagtttccttattggggaaagggggagagagtaggatgggacttgttatctgatagtttattacaaggattaattgacacaattcctgtaacaagtgtaggaaaaggcatcacttgtatcaatcagtcaacacgtgttacttctattactactcaatcttcaccatcaccaatagatttacattaagacatttatgtgcatacttattacacaacaattatatctaaatataaactacctacccatacatgcattagcaaaacctggaccacaatctgtctagtactgacactttcaagcattgtcaactacaacagttgctattagggagcatttgtttgactgaatgaatgaatgaatgaaaggggaaatagtgtcattcaacaaattttcactaatgcctcagaagtgcaaagctctgtgctgggcatcacagaaaattaagctgtatttatcctggatcctgcattcaaggaagagggaatgcccttaaatcaggataattaaagatggaaaggtataaggaacacagtatggtagaaataaggcaacataagaatttagacagaagagaaaatattctatacctggagtcatatgggaagattccagagaaaaaggtggtattttacaggatcttaaagggcagagggatatgggcacagaaaggagggaaaaggatcccatggagagcaatggcaccagcaagacagggagaaaagttactgcaggtacaaggagcagctaacaagtcaatggaatagaacataaattaaaatgaatgttggttgaggatgttgaaaagaaaggttggagtcaaggtggtgtgcttgaatcccaaagaagttgtggctttagaaaagagaaagccagtaaaggttgtataaggtagaaggctttatttagttcagggtatcagggagccaacctagtgatcagcaatcagcaagaaaggaatacagcactatctagatatccataaatattcattttcttcataaaagtcacatgactgcagccaggtgtgaattctgtcattgattcatatgaaaattagaaattcatcacacttctgtggttcctattttcaagttacagacacgtgtacctcctgaacacgctgtaaataatgagctgaaaatgtcatcttaaagtctttttttaactatttcataattatcaacatagaaaatagatttcaagtgcctcagtcatcaaaaataacaatatagactaaggcttcttaggaataaagtgagcatggctgtaactatgtaactatattaaaaaggccattagaccatttttatctgttttttttttaatatgctggctcatttagaaatgatttctcataaaattacttgggcttgaaagttgttcttcaaagtcatattcaaagtttaatgcaactaatccagactgcttttaaatttgttaacaaataaagtttataattttgcacaaagcaacttctatataatagatggtcaataagcacaggttaaatataggacatgaaacatatttagaaaaaaataggcaactaggagttattttaaatccacacatttaatcaactttgaattaaatttatacatgtaagcctcaatatatgtaaaataaatggacacaactatttacattgtattacatttctatcatgacattttgaaagaggtaatatttgacataatgtctttctccgtcttaattttcttttttattttagtggagctgtatctcacataaaaggtggtatagataagtcttcagagtgttagggcaattatgtataaaatttaggaaggtttggtaaatttctggaagtatgttaaaagcccatggaaatttcatgagaaaatctggtataaccaaaagctgaatgggggtgaagctggatgtcaagagaactgggctctgagcccagcattaagtagataatatgctcccaggacaagccaccctaccactgtgaagtctctttttcctcacaaaataagaaactatacttgactgaaaaaaggtttctcaaggcccttaaaatgtggtgactctacatgtggttcagtaagagtcaaggccgggcaaaaaggcctgggaaacttccggtggaatacctgtatgcatcttagtcaaccactcttgaatatcatagggaagccaatcctcttgtttattgacaatcattcctctgagctatgtgtacaaaggagaatggaaagtagagatagataggaagaaagaaagaaatgaaggactgcatttaccacttggttttccaattttttgatttaagtggcaaaattgcttctgagcccctaaaccaccatttacccaactatattcactcacaggtctcccccagaggtttcttttgacttcatgccccgtgtctgggaatgtagctgaagaaagcatgcatctggataaagacaacgaggagaacctgtgtgagactaattgcttcacacacgaggaaactttggcttcatccatctgagctaagtggtactggcaatctttaaatatagctgccctacaaaatcatatagcatctaatgccaagtgtgtactgactaaaaccagatgcaaaatatgagggaaattttgttcaaagccttgcagcattggagaataatggctctaaacattcctggtctaatctgaatgatattctgcaaatatttaagatggttttctcacatctatcccagtccaaccactttgtgattgaatttcatgacttggctccattaacatgaaatcaaaatgcacttcagccatcaccaatatatctccctgtaaggtgatccttggggaaaaaaaaaagagttctgccttcacaaaagtttgggacatgctgaatactgcatctaagtatttgcggtgcatgctagtacctcaaacgttgtgcaaagccctagaagaaagaccagcagaatttgactcagcatttcccaaacttaccaggaaaaacctccctctctcatctcccaatgggtatctattaatatcctgaagaactagtcttccataacattatctagaagacgaattaggccaacactgtggcgtaagtctcagatttatatcagataccagaatctgaagcatagagagtaaaaatattgactaaagacctatcaatagggagatgcagttttgtggccaattaaattgttttgatgaagtttaaataattcttttgcaaatcaacatcacatctgtgtattgcaagtgtgctctgaaagaaaagaacaatagtggaagaaaaggagcagtttccacctgccaccactgtccccttctgactgtgggaggattctcaggggaataaactctaaaaggaatcactaggctgggtgcagtcactcatgcctgtaatccaagcacttcgggaggctgaggcgggcagatcacgatgtcaggagtttgagaccagcctggccaacacggcaaaaccccgtctctactaaaaatacaaagattagctgggtgtggtggcacgcacctgtagtcccagctacttgggaggctgaggcaggagaatcgcttgaacctgggaagtggaggttgcagtgggctgagaccatgccactgcactccagcctgagcaacagagcaagattccatctcaaaaaaaaaaaaaaaaaaaggaattgctagaattgtagcactgatttcaaagaggatatagactaagtctttcattttcagatgagaaactgaggtccagcgaccaacaatgactaaatctatatcctctgattgggcaatggaaggacaatcaatacccaagtctctcaattggttccttatccactgctaccccatgcaatctcaacccttgcagcctggaatattattctctgctccccacgaaacccaccattgtacttttttttttaattgacagcttaaatactctaaattgtataaattctgtgataaaataaaagggtcatgagagcctaacatacctaacacagagctacatccatatgtaagaggaacttgattggtcattcaaaccatctacttctgactacaccactctctctgctttccagaacttagcgtgaattgtaaactaccaatttaatactagattatataaatatattatgtaactctctaatttgctgcatggaagcaagttgtctttccaaataaaacaccagatcccacaaagcccaactttaattacccatggtacctatcccagtgctagacacccagcaggcaagccaaccagtgctcactctttagaaattggaggaattcagaggagatattaaactaacaattagttctgcacaccagaagcaggagcccctccctgctccaaatcacatgttggtagaaaagcaaaacaaccaagtgcggctctggtcaagaaaaataatctcaccccacattaaacatcacacatcaaccctgctagttttcctagatttgtatataaaatactaaaacaattttttaaaagacttttagagtaggacagggcaaggagcacaagaataagagtaaaataatttactttctaaaaagagggagaggagaaatcgcaagaaacaataaagaaagaggaagggggcaaatcaaattcacaagaacgccatgtgaacttgggagctcgcagaaggcagagctgagttaggagcaataaagtgcccctttcttcttcccacccctcagggggtgatccatgagctaaactgaactactcattggcagaagattggattggtagggaaagagcacagattagagtctgttaagccagcctgattttctctggctctttaaaaaattctttagctaaaaaaagactctaaataatggcattagctgctaatctaaaatgttatccacttgtcctagcctgccagcctgcttcctgggtgtgttgggtatagagtaaggaaatgcagaagtgataaaagtctacttaaaattagaaggcctggatcttagacatggcacaaacctcaagatcatgtggtctggggcaaagactttggatggacagggatccagctctagagatgaggctaaacaggtgaactgtcttgccctagcgtaggcatgtatcctttacttcataaagataaattctacctagaatccagtggtgccgatcacaaacatatacaactggaagatgaagggaagccctcttacctctctgagtctgtacatgccaattctacctgaccttggaaggtaacagcaactgttaaggcacccccagcacaagacatcatggcaatgtgagcctatcaccctgatctgataacaccctatgataaaaatggtggcacaggctaaattatgaaagttaagaaggtaagccctggggttggactgtttgggttcaagtcccatctctctaccacttggcaactgaaccacttacttatttaacttccccaagcttcaatttcctcatcagtaaaatgagaacaacatcatacgcagtggtgagaatcccacaagagcactaccaaacatttatcatattgcctggcaggaactaagtgctcagtgaatgaatgttagctaatattagtcacactctgcattttctgtagctttttcttagatgtcttctgatcaaattctgattctgtacaatgcaagccttgacaaatggcctcaaacttggttaatatttttctgcttctacaaaaataaaaggcactcatgtaattttattcgattaaaaacaaccatcatcactactacaattactattactactttctactactataccacctggcttatgaaacctcattttttttctttctttcctctttctgtcattcttccctctctcaagattgcatgtgctctcttattaactaggacttttccttcctttataaaaaaaatatggtatagttcaaatccagtctctagtcctatctggctgtgtaaccttgggcaagctttttaacctctctgaaactcagtttactcatatgtaaaattagaataacaggagtattgcatacaagcctattgtgaggcttaaagtaatacccataaagtgcctacacatgatgaacccttagcaagtctgagctatttctccattcccaccattatacaatggatttctttatttggggcagtatcaaattctctccctgcatgaaaaggcagagaaaattgtgtgtgccaagtagcctgtacgaaaacctaaatatagaaatagtttagaatattacaaaaaagggttcacttctacaaggatcattcttctgaacatcaggacaatcatgatgataacagcccaatttaaagtcctacatccaggtacccaactgctaatgcagttggatttgcttgttttaaaagaagatctgcacaaatattttgggaaacagtttgcaccaggacagggtcatagttgatttatgacatagctacaaccaagagcagcacgaaagcaggggctggacaatgaaggagcatgcatcctccaccctcagctcctggctggacccaccctgacccctgggacagagtgaagaggggctcctggcacacacaaggcagtggcactggagggacagaggagggaggaggacaaagatattacattaatgggttttccttcctatgactttcatcaattttgttatatagaaacagatcctttaaagcaatttggataaatccaagttacatgctaacctccctttgctgttcccaaaacaggtcaagaaagtaggaaagtgagaaaaaatggagggaccttgattaagcgtaaggcagaggtgcaaatgcatgatttcctgatgtgtccttattccatattcaatggagtccacttgggttaagaaggcacaaggttttacaggaagcttcagactaacccacctccttctcaaagggtcagtaatttttaatgccaattttgagctccactttgactacaatgacatgaaacaaggagtccgtattatatttactcttcccatctctcaacttccttgataagcaacagaaagaaagatggaaaaggtagaagatacagcccacaagacctgggacagtctgtcctcatgaggactgctgtctccagcaggaggaagacagcaggctggcagcaaaacatgccatgaatttgatgcttctaatttacaacccaatagtttcaacaaaacatagagtacagttggcaaggggaagttactccacctttcatacctgaaatgttccatcttgcctaaaaattagttgagtgggctgggaagctcatctctgatttggctttatgagaactttgattctacgaccaaatgcataccccttgtttgctgagtagaaaataccaaggcagcagcagcacaagctagcaaggggcctgcctgagtgggttactggcagtaagcagtatacacagaaggcttacaaagaacagcgtctgttctggaaagacaaacatacccaagtatcacagtcttaactttctgctcatctgcatggcccctctagagagaaaacaacacaaagaaataggctaaaccagtgtcacgggagcacagctagaaatggaaatctttgtgtggccatatacaaatcacttacattctataggctttgggcagctgctctctggctatgtaactatttgtcttggagcttcactatccttatcaagaaaagaaatatgctacgagtatctacctcgtagtgtagaaagaagggtgagatgatctacctcaaggtttagcacattgcctagcatatggtaagtctcagtaagttaggatgactacatgcttacaaagcaaatggggtgaatgaaccctatggtaccttgtaaccctaacattgtttttattctaaactttagtgaagtgaaagagagagtgctcggagcatgctggctaagaaactggggctcagaactgagaacacaatggcagatttgccacggcatctatataacgggatgcatgttttgtaatcttgagctgatgctgatggttgccagacaagtcaactggtaggttaaaagaacaatcacagtgcttggacagtactgcacaattagaacatagtcattttcatggggttgcagtcacacactgagatgcttgagagctgtaaattcctagagctagaaaaagccctttgtggttctaggttctcccagcaaatcactctgtctgatgaatagtcaccaaataagtcaagaaccacctacacctggattatgctgccattgaatgatgttccttgaagatcaggctaccgtagactctttctgcaaaatagtcacagattacacccttgctaaaacttgaatgggctttttctatacatcttgtgactttgcatctcctcttcaattcccaacatacaataggacctccacaccatggcaagcccaagaagacaaactgcaaaacagaagctctcccattgcttatgggccaaagaaaggaagtcattccagtagtaactgttgcctcctggtaaacccaaaccaactcttctagtttccccaaattctgtagactgaagctggcccacccagagcggcaccactagagtctacacattctattagaaattcaagtatagacagtatcttcaactagatcaagctattagatattaatgttcagacaacacctacctcactccagaccagcatggtaccgaatatgacctgtaacccatcaaagaaattgtcccctatgatgatcacagtcgcacctcccgtcgtccatccttcactcgggctgatggctttgatacagggagtagctgcttttcaacacacatgaaaaagagaaggagtctgctgttagaaccaaactttaatgatgaagacttgagaaaaaggaaaaaaaaaatcttttatcttttcactaacagaaagtccctcaagatctcagcatttcccagccacattaggacctgaaacttcagggtgcaacttcagtttttaaaagcattcttttcattgtttctattaagatacatatattttacccaaatctttatcaaacctgaaactttatgaaataaaacacaaagcaaattttaatttgtgaaatgctaaggatttttttcttattaaatatgggtgactttctggaatatattggaaaccttacagaattgcttcatagttaaatatatctcctgaaaagaaaacttacgtttttttagataaacattaccatccaataggaaactaagaaagagaggagcctggagcgggaaatgattcttgctccatgccttctgtctgaaacactaacattgcaacatgtctcattaaaaatcattacgattttttttcaaataaatgtcatagatcccattttacagatgtgaagaatgcaggtcactcggggtgaattatgtaaccaaatagctgagtcagggctcaaccacagagttttccatgacctttgctttgctgtctttcccaggcataaaaccctagaattgactttttcaaaatttcatatctcttttctttccattataaatggcccttggagatgggaaataatttgcaaatactgtgattccaaatagactggaggtggtttgtttaatgagcatggcatactttcaacagaattgctgggcataaatgtaattcttggattgtttttaaaatctctcagggtgcaccttcgtgccactgagggtttttaactctacagtgtcatgcttctgttctcatgattatttttatgaacaacaagaaagcaacatcctaaagggagatattgttcaaggagagaaaatgggaccctcatctttaataaaaagtttattaagtatccaagactgactttctgagcattgaagccaatgagagcactagttaattttaacgggaaaaaactggcaaaaaaatatttggactttgtcaaatttggcaaaatgtcatgctttaacttttgcaagaaggaaagaaaatattaagtccagcccggtgggaccattgctcacgtgccaccacacaaacaaatagaatgggtttgattttgattcaaattaatcttaaaaatttgcacagagaaatttggaaatatccaaactaaacatttcatgttggctgaactcatagcaatgcatttacaactaaaactgggcagttcagatgacttttctcttctctactttctcccaaaaacaaaataattaatcaagaagatgtaaatgattcgtgacttgacatttcttgtctgattttttaacatacatagaggttgtgatcagtgttccacaactatagggctttttcttaaacaaaagtgacctttaaaagtaaaaaatgtttaaatgcatgattaagtactcccaaaccagtggtaccatatgatgtatgatttgaagcaagttataagagaaataaactatatttaacaactacataaagttctaaaaatatatgcagtttggaaacattttgttaatgtccccaaatatcaattcttaatttataactcagtctacttagttgctagaatggagtacaaaaggtgttatgatatccctagtacttctgagaagaacaggttattggtttaactgaattggtcttgagagtcctgactgagtcaaactgtggaatccaatggggtcattaattgctgaccctgagattacccacacagatcacaaaatggtctttgtgtttattatcagttttagctttggaatttctgttaatttttatttttttaatcacacacacatatttctttagctaaatacggtctcctgcaggctttctcatcattgcacaaagggaggtggaagggggtgtttctgtgtctttgagaaaccctcctacaggaaaggccttaaaatagcatggccaagacctgctggttttgaacttgaccccttccctcttttttcccacttgttatacgtaggatacagaagtcacgtgggtgtacatgcatgcgtgtgtatgtgctttcaaacacttcccaaggaaagttgcaatgttttcaaatactgtgagcaattttccagaagcaaagctatatgtcaatgcctcagaggcaagaaagagcatcaagcttccagagataaccaggtgaggaaacaatatttgacaccattgtcttagttttagagaaataaagccttaaaggaagtaccccaggaagaatgacacacccctcagtccctcctacctctacactcagcaccatccaccatccctgcttcgagactatatgccattcttagagcaggtaagtcattcagacctttctaagtttagacctctaagggttccaaagctcctcctatacatctgttataacatattagtcttgaggggaagctctgtgacacctccccactgacaaatttcaaaaatatgtaaaggaatcatgagctatcccagagagagaggatgaggaggggaagctagtagtatttagtaactggaggtcaaactgggtatagtggctcacacctgtaaacccagcactttgggaagccaaggtgaaaggatctcttgtggtcaagagttcaagactggcccaggcaacacagtaagactctgtctcttgaaaggttttttaaaaactagccaggtgcaagcctgtcatactagctactggggaggctgaggcagaaggattgcttgagcccaggagttcaaggctgcagtgagctatgactgcaccactgtactccagacagagtgagactctgtctcttaaaataaataaataaattaattaattaaattaaattaaagaatgctaagtatccaacaatgcatgaatgcatgggatagtccccataaatgaagaaccccaacatgtcaataatgcaatgtagaaaaccctgtgaccagcaaaagagaatcaggcccaagagctattgttaagaattcacagacccatgtagaccaaggcaagacatacaaacgaatgcagcagctcaggatctcagaacaagcatgagattaatggccactgtttctcaacatctgtaatgcaacgggaaggtgctggtgaattgcacgtgccccagggaaaggtgacagcactgctcagcttcagcctttggtgaccccataaaaatgcaggcctagcatcgtctgggtttctggtgatctttccaaagaagccaggaagccacatttttatgtcaaatttttcaatctttcaatgttggaaacgaattcagtatttttttaatgcgtaggccaaacaaaatgtttgtgggctggctttaactcacaggctgctattttacattttaaccctactcacaacacaactgccaggctaaaagaagacctggaaatacttgcaattgtggctaaaactataggtacccaaatgttcattgcggtattgacagcaaaaaattcagatgtctaggtgctcccagtagggggtggttaaagaaattatggtatattcacacgatagaatactaggagtgtcattaaaatacacaaaacaattctataaactgatatggaaagatttcaaaataggttagcaggtgaaaaaaacaatttgcaaactaaaggacagtgtaattaagttgatttttaaatgatatatatgaacctgtatatgaaccagtatgagtatgcatgcagttatatgtgaacaagtatgatggacaaaggcctggaaggaaggatatgtataactgtccccagcaggtccttataaaaagaactagactggggttgacagaaaaggaggactattaacatttattccctatatatttgtatgatttaaattttttcaatgtgtacaaataaggtactatgtaataataatttaaaaaattaagtagcagcagaacatttaattctatgagagcaaacagttgtactttttagagcaaaattacattttaaaaaaggaaaataaaacaaacaaaacagctgcgctgaccctgagcctccccttctctcctcattttggatatgttttctctgagaaagctcagacaacatgcaaagcagccaaggacttgtttcttacatttgggatacccagagagaaacagaggggagacagggaaaaatcacttttaatagtcacagtggatggattcagtggaatttgactgtgaaaagatttatgaaagagttcaattcagcacagggatgtgataatcaatacaagtctatctccaagcaaatattatggaatgtgggggcggtgtttgaatacaaaaccacttttaccagcaaatttttgatttaattaatacaagattctttcttcctctccaatgaattttcacactcataagtatccgcaaggccagtgacccaatttctggttttaaatctcattaaaaataaaagtttagggttagggggtggggtttgcctctttttttaaatcccttcccccacccctcaccagccacgaaagtagaggagattttccttccttcaaactatgacaataacatgattaccctaccacagtttagcataatggctctgaaatgctcatggcacattgcagagttaaaatggaaattattaggtagctcttctttgttataataatgatcactccacaaataaaagctcttctcccaaaggtactgcaaggcacaaaatgctaattctgaagattatgtgtgtgcttttattaaatattactatgccctgcctgtttgagggcttctctgctctgattgttttatgagtaccatgttaatgtcattcccatcttgctagcagcaggcacacattttagcgtttgtatgagagttgatcaaaggccacgtgctgggggaattgctgagaaaacacggacaagcgataaaaatctaacagattaattggtttaaatttcatttcagggtgttgaactttggctcaggactctaatactacaccgtgagtcagggcctaattaccagatttccaatttgcttcttgaacaatggtcatggtgagaaggaaaagagagggaagaattaaaaaaaaaaaaaaaagaaagaaagaaatcgttcagctccagtacgtatttaacaactaatgttctgtgtgcagacaactgcaccaggggacatttgctatcacctactctatctcccgagcatttatatttccttcgaacagccacagaaggcagaagaaatcagagatgccctcggtagtttaaaattttctgatttacagaataagtgttacatgattcaagtgcctgcacactcgcactgggagcatcagtctctttattagcaaggtgaatttataagctggaatcgcacttcagcctccaatagaaatgatctatttctttgatagaaagcaagggccaggagagccatgtttacctcgggttttatgggtagccttgggaataagggttaattgagctcagaggtgcctgcccattgaggtgaattagtggtgtgtgcagctatcagcagggccctagggctgctcttatttttccttctgaaatctctctgtgctgtgatcaatacctcacttgtttggggtagccatatagatgacccaggttcagcatttatcatatcttatccccaaaatgaggcatttgtgacaatcgatgtgacattatgaaagcctaattagagatatattgtttggcttttttctccattcctgtatctaaatacactggagaaacaacactctgtgagttgataaaatgtacaaatttagaaattttctaatctaaatctaaatctaaatctcaaggtgatataaggttcttttccattcccattacatatggtgtaggaaaacgtgcacactctccttttccagaattctattaaccagaactctctattagtgagcatttctacaaagcagaccactgatgcttacagtggaggtgaaaatactggcactagcctttactggcttctgagtaaagacagaaatatgaaattatgttaagttgattttaacatttggagtatgactgtatttgaaaatgggcaagagctccagttgttcaaattccacatctagcacctagtgcaaccttgaaacagtctcttaccttctttaagttgtagtttccataagggcactcacctcacagagttccagcaaaatacacagaaaatgcctacttgtgttttgttgctttactatgcaccacatagtatgctagttgctgctataataattaccatcagctccccattaactagagtttatttacgagaataccctatactctcatcagttcagattatgtattttattgtaagactttcctaagaactcccagttcagctgcttgctaacatatccaactaaatgtactgagtaggtggaactggcaacagtccctccaaagtagaatgtttttttaaggatctcatttgcctggaatgaatattaatgggaaacttttcagaaatgaggaatcgactttaatgttattgtcccaaatttttgagacttggcagaaaacataaaacccatgagctcagctcatttctacgggatacttgtgacctcgtaaaactcatgcttttctcccttttatctccttaattttggtgatgttgtacttgggagaaacggagagactattgagggcacaaaatattccacttggactcagcgcacagatatctcttcctcctgctcgatctgaatgcttgtttttgctggtgttttttttttttttttttcagtgaatgatgaccttcctgctcacagctccttagcactacaacctgccttctttgatcctgaaactagcagctactggacaggcaagaggacaaacagaaggttttcttccagctggaagactggacctctgtattttcaccatgcacaggaggcaaatctattctttgtttatccattctccaactggatgctttagaaaccagaagcaattagaatgcctgacctgaaccatggtaccagagtatgcaaacttcactttcagaatgctaactccaaataaacaaataaactcagccaataaacaaacaaacaaatttgacagtttcctcatgcaaggtgtagcagcctttataacacttatgctgttgctttaacttgtgttactagggatttgtttctgccttactttattttcttcagtaattgcattatgcagttaagcattttattgtttattagggtttttatttcattttgttatttgtctgcatttattgtcctgtccactagcatatctagataatacttggcaaagattcatgtattatatatgaaaaagagtcgtgtgtgtgtctgtgtgtgtgtgtgtgtgtgtgtgtgtgtgtgatgtttgtcactttaaggagaaatgtaacccatgatacagagatctctccatactagatgcaattaaacctattaaatattaaatgaggagattgagaatttcaagtgattttcatcctttattccaaagtgacttcatttggcaagaatgccctttgctttgacagcattaatggctctcgcagaaaagaagaaaaggaaaaattcacaggcactatttggaaatgtagctccaatgtccatctacattaaggcagtgttagcttagtggtgaatatctagatgtacctaaacttagcaaaatagtgtctaagttccaatttatgccatttgctaattatagactaagcccaaattatattctcttcctattttgcagctttcttattttattctgaattagcaaaatttttcaacaatcaatggacatagcacctgagcaagggaaggacaaaaatgctggtgcaacaactgtaatccaaaacattccagggcaagcgcttttggattcctgagtttgtctgtcggagatctggaactgtgtgcaggttcattacacggggttatttgacaatttagcagtaagaaatcttgacattttgatgtacctgtaacttctaaattgcacttgaaagacttgttgaaggctttttgatttaatgacacacaacatagcattgtttcataatatgcaaaaattgtttgttaactacactgcagctcagaattttataactcaaggtgtgactacactgttttccacctcatgtttgatctgccaaatccaaaattaaaatgtacaaaatattaatcctagagcagccaaaggcaaatattgtcatcagttctttgggtttctttcccacctcttattctatgactgtcagtcactccattgcaaagcaatggggaaaaattgtcatggagggtaagagaattttcaaaatgaattattcatggatccaattgtgatatttgttgcaacaatagtacattcacgtgcctctgattatacaataagtaaataactctcttcatcctgacaaggagaacttttatgcacaaaattatttttagtccaattctccttattgtcctgttgtaagaaaagtttgggaaatgaaagccaaggggaaaaaaggaaatgaaaataaccttccaaaaatggacacccaatattgtgaaaaggggaaacaattttcaggttaaaaaaatatgcaactgcttcttcaaggactatttaagtctttattcacaagcagtcttcctgggcctggaaaatcataaagccaaatatgagcaagtctagtggaaaatctgtgacgctaatcttggctggagtcgtatttttaacaggccttgaatgtgtgtgccggattatccagatggccatacaggaatcggcctgataggattaaacctttatgctgaactctgctccatctgttcgccaaggtttgcctttccttatctgaatatgaatttttagcctccttatgtctggaggcaggaccaaattcagcaataaaaacatagatgcgtgcagataatttagcatttcattagttactctcagttcatattaccttggtctttttctaggaaatgtttttgctatgaattttgctaagaagaaattttaaaacatgtagaatctacttttttgttagagggttttgtctttctcttcctattgaattctaggaatcattcaattcactattgtaataggagtttacgttgatgtttgcccacaaagataaaaaagatatggtatcctcttagcagaatttgactgtaagattagatgatgtataattccaattggatgaatgatccaagcagaagatagtcacatgtgttttcttctttttttttctattacaagaggatcggtaatagtcatcacttaacaaaattagctacaacactgtttctatcattttcattaagatttctatgttttaaggaggcatgtttttttttgctggggcaggggtatgggtgtgggagcagaagctataatttgagcttaaactggagtgaaaaaagcagacatctgttttgtcctccatgtatatatccctagaagcagtgaagtcatttattgatcaactggaaaagttggcttatggcaggcaggtttcaggaaaaaggccagtgggttgccattaagccagagcttggtagatggctctgggtttcaactctatgacaaagacaaatggagggctctgactaccaggcacggtggagagggccagtgacaagtttcccaggcaaacaaggtgcgaacgaaagaaaaagttgcatgagagagggatcttttagaatcctacttgtgagctggtttatagcaacatgatcattagatgtgctcagtgtgttcacgatggaaatctcaagagatggcagcctgtgtgcccttggccctaagaagagaggatccctccagcagtctagcaggattccacaggcttccttctcacagtaccctcactcaccctggctcttggctctatgctgtcgtgaatgtgggagtcaagcagctcatcaaataatgtaggcttttccactcacaagtacagttattatacttaagtagtacccttaactgaacatttaggggacagagaacagtcagacttcctatttaagcttaagatgacttacacttattgctatgaatgtgcacataaacattttgtaaaacacatgtcttaggctcctgaaattgacaacaattctagccaggtagtggttcccactttggaagtagatgcccctaggtgatgaagcctattataagtcatctcttgtaagatgggcaagttcacacacacaaccctactgtctatcttccacattctatcctaaatgaggacagctgactggatgtttgatcccattactcaatctgcttttgctttgcccattacagtagccactagctacacgcagctatttacatttaattttcaattaattaatatgaaatacaaattatttcctcagtcataccagccacatttcaagtagtcaatagttatagtggctagtagctatcatattggacagcacagagataggacacttccatcatcacaggaagttcaattggataccgctgatctcaggatcaagttttcataactcagcctataactgataaagactaatcagagctacaatatagggggtgccctccatagactaggaactgtgctaggaacaacgattaatctccaatccctccaatgaggagcacaaaatcaaatgctcacagggctaggcaggaaggtaagtcaatgaaatgggatgaggagatgcaatgggattggtggggattgtggctaaatgtagagtatgtgcttcatccaaaaggaagatgatttctgagttttccctacccgttgccatttgagaatgtggatccagcactaccagctcttctgattataaaagacattagtaaatccaggttttcatataatctctctatcttcaattgccagcaactaatacataatttctgaaggtgccatgcaacccaaacataaatatggctgaaggctggattcagttcatgatctaccactgtgcaacttatataaatcctcagagggctcagagtcatcttttactgattattaatttctgcaatcattgaactaatactgtcactgacttaccaaacaataaacataatcatggccaattctgctcctgatctttacgtcttctcccaaaacacacggaagtcccccagttggcctttctttgctatgcagaagattttctatacgcagtttgagagatgagctcctgttcctgaaggatttttattgtcatgcaagacagcatagatagtgactttttaagaaaaccatgttttgaatgtgagcagcattttgaaaccaaccttgcccaacctttaataatgcacaagtcctgctttgtgcttttcggaatagttctgcttatatttctctccacaaccgaggctgccattgctaacatatttcagtgaactttcattattcagagccttatcattttgagccagtttcctctcctccctgacacatttagtgacactgcaatccagcgtttgttacagcacagatgtttccgtggtgatgatctgtgatgtcataagcacaggaatatgtatcattgactttgcccacataagccatgcaaagaatgggaagtccactttcatctcaactctatgatgtactgactcaacttcctcaaaaattactctttggggtctgggctgttctgtctggacatcaaagagcaaatactcgcacttgcctgtttgtgattcatttctactacataattattagttatatgcaaagtccagtctacctatcaaaacccagattaaccttcctcaaataccagctttcaaaacttagccagcgggatcaagtccaccctcatgagtctggcccattctccctttctagcctcattttcagcctcagcagcagttaagagcaccagctctggattcagggggcctcagctagcccacatttcagcttcaccatttaccagcttgggcaaattacttcactttttgaaatcctcagtttctaccactttaattgaggacaataattataagacagcccacctcataggattgttgtaaggtttgaatgagttaatctatgtgaagagttcagtacagagtgggcaaaaattgtgagatgatgacgaagaggaggaggaagaagagaagttgctgtaggagaaggagaaggaaaatagggaagaagaaaagaaagatggtaatgaccagcttcccaaatccactgtctccaaacatcctttgcatgttcccagcatatttttttatgaaagatataccacttacttccatcacccaaacagttacttgccaaaaagatccatcttttgcatgaaggtgtctctttctatcccagtctacaaaacactaaccctttagtgaactcttcctatctttcccatttattatttactgcacttttccttgaactcatcttgatatatgcatgtgtttatagctgggcatgtatatacataggcaaatcaccccaactagtcaacgcatcccttgcagacagggacctcattcatttacaaactgggtagacagtactctgcactcaacccatacctgacaattaactagcattgttaagtttttaaagggttttaccatacattatcttaattattctttatatcaaccttgagcagtaggcaaacagaccatgttcctcattccactttacaaatgacatagctgaatctcagggattcaactggacttgagactttgagaatccatgttgattgatatagtcaaatgtttaaaacacccaaactacgcttcaactttggtgtttatctgaaatttctgttcagtttggctaaaatattcacttcaatcatacaaatacagccaaagtcccataaaatcttaagttgtgcaatttcttatccccaagatagagggtggatatttattaactttacagaatattactactctatttccaagtaaagttattttccccctaagactcagacccacatatgaattacagtaaaatctctctccaccttcttctatttccaagttcagaaaatggcatcctaatataatagcacaggtgccaatttaaatacaggaacattgaaaatactgccaaacttccaggcttagaagcttttctgttgttacatgttgggctgctaaacacacactgagtctgaacatctaacacaaacgatagcaacactatgagaaacatttttaaagtatcaggcagttccttttaactttcatttttaatctggacattgtccattccaatggtcttcactatagaatgttgcacgtatcatgaaaataataacaatttactaacaaatagactattctaaaatagtaccttaataacactttcccccaactctctttttcttttaaacagcaaagattggattccacaggcctttagctaaccaaatcaaggagagtttctaggattctgccaaagttgaaaggtagaggaatatgaggtttgactttatagatttgttgcacataatagttactggaaaagcacagctggtttgatgattccgccagaagattttggcaaagaaagaccaaagatatattttcttcctctatcaagaaatgatccaatacattggaactggctgggatatatccccctcacccaccagcccacggataatacacccaacagcatttgcctcaggcccagcacatagtaggtgctcagtatctgttggcttctccagctatgttcaaaagagaaacagataaaaaacaatgaagaattaaagatctcaatttgtaccaactacgttcattttaattatcattcttctaaatagtagcccaagtacattgctctctgttcatattcaacatttgcactatcttgaaatttttattactttgccccaaggacgatgaaagaaactgaagggttgagaagaggcctcaaatctgacactgtctgtgtccctgttccctgggtcccctgctgcatttctccccagaactgtggatgaaaaatgtgggtttgaacaactggtatcctgctgattgcaactgtcaattaaataagccagcaacacaggagcatatgttcgcatataaaatattgattaatttcacagattgggataaaaatatattagtacttgggttctgctttcatgcttagcgttcagatatgcactcagtccattcagatctatttctgcaccctgtgggctcaagagtgttacttttgtgtttcgcttttcttatctttctctggttgcccatgttagtgcttctgttataactgaccagcagcatacgtttaagcaggattttaattactaggtcatctcccagccgacttgcccacggcaggccggcagaaaagccacaatcctgcaatccatgcttcagattttctcttgtgtccctccaggtaaatctcttttttttgaggatgctaaaatcatgctgatggcatcatattcatctgataacaatgatgaccacctaatttctataaagtatcatttctgtccactgagtatttcaagttgcagggctggcacagggagtttgagatggggtgcctgatagtgtgacgtgataccaggactttttatcttaacccagaaaagcaccttcccatatatcactgcacatgccaactaacttacccttgggatttagcatagatctggcttttcaatttgcctttgagtaatgtcgtcaatttgtttcaattgaagcaagtattatattacatgctcaaatagcaggagaatttctctccacgtctgaagtccaatgtggaggggaggttagcactgactaaacaataagaaaaaacagtggtgaggacccctgtgtcaactacttggagattcaaaagctgcagataaaaacctaactttggccacgaccaaatccttaaaggatggcctcagtttcccaaatgtgtttagtaaaactaataatactagtgccctcccatggctgttaagagcattaaaagagatcatacaaagtgctcagcactgaacttgatgcagagaaagtacttaacaaccgctatcgtaacagtaaggccatgatcacccaaaacactgctctaaatgctaccattttatggacactgagttctgttagctcatgattaagaaactgcaatggaaccacatctcaaagtcaaagagtaaacaacctatggaaattttccaagtttagtttctcaaaaatggatctcagacctaacctaccttccctatttgccctccctacagcttctaatgttttatccccacgtggaattttgaatatgtgttcccctctcctgttcattctcattgaaaattttaaaagtttccctgattcttcagacttggctgagtcccccagttctaagctctcttaggagtctgtatttgtaccttatagcacttaaccatcattgcagtttaaatcattccgtgtgccattatttgtctaatatcggcacataaatacttacactcatgtgacagtctacgtcataatgctaacaactgtccctgccttatcacctctgtagccctattgtctgatataattggcagtcagtcaataaacatgtgttagtgttaaatagatgaatgattgaatgaataagcaaatgaactaaagaggaatcactggtgttattaagatgttaaggaactaaacagagtagctgaaaagttaagaattcttccaaaagttattaacaattgccactacacccacaatgggcttcttaggttgacaactggtggctacgtggagtcccatttcctgggtcgacctagcccccatttcagcagcaggcactctattctcttgggggttaaaattagcaccagtaagctccccctttagtgggctctaatcatgcaaggacccaggtggatcttgctgacagatgttaaggttagaaggaagggtagcagccagatgagaaaacagagccacccccttccggaggtaccaggacttcctgcctttagacccggtggttcctgcctgcctgcccctcccccatgcatcagtttcaacacagttgctgctctttctgtcatctgaactcaaattctatctcagaaattgatgggcgatcctgcccttgacaacacaatgtcagccttgctcagtgtccagctggttccgtatgtattatcataatgcgctgcctgggtggaccctggctgattttctctcctgatgcaagtcctctttccaaactaatttctgctctctgacatgcagaccctacttgtttaaaaataaaaaaacagcagcttgggagttttattttttaaaatcctgttaggatatttaagtctattctaacagtaaactgagcctaaaggactttcttttaaaaatgatttgactcaaaaaaagaatgtttcccagggtcctacactgtttcctggtgacttgaaagaattattacttcccccaacccttacagccctctctaacagcatttcccaaacttcagtcctgattttcctctatccctgtaccacttacactattatttacttaatagtatttagctgctatgtttgtttagatcaactttttctttaactttagtcttgccctaagcaataatagctgtgagatcatgattttgaagttggagttattgttttgtttacgcattaacataaacacacaaccattaaaaatgtttaaatgtttatcctccattttctaaaattatctcacctactgcatgggaaatagtggtctgaaagctcactgcaaactatcaagccgcttgtacacaacaccttcccagctgaagaaatccagggagaagaatgcagggtgagagctacctaaggcacaatggctatgtatgccacatttctatggcttttccaggcctcctagaaccaactgttaacctcctgcagagatggccaaggtggagggaaattggatcctttcacctgggcattttggtagccacttttccaaggctgcaggtgtgtagcccctcaagacataaaagaacctctcacagaattagctgggttcaaaaaacaaatcatcagagcttgaagggctcttccaagacccaccttaattgatgaggaaacagaggcccagagaaatcaaagtacatactcaaagtcatgtagtaaggtagtggcagagcttggttttaatttatttctgcacatataactgaaaatggtcaaacaaaaatatttcaaaatcaacccctggccactgcttctaaatatctcatcttaagaagggtttatgaacagcacatcaaagcttccacttgcccataaacatcatttgaagcctctgaaattctcaagtgaggggagctcctgtgacagataagtatagagacagcttggtttgaaacaatcaattaggcaaatcaatgcaattggaattatgatgcttttgtaaccaaatataagacaaaaaaaattaggcttaaaaaagttctgaccaggctggctcatacctgtaatgccagcactttgggagaccaaggggatgtaattgcttaagcccgggcattgaagaccagcctgagcaacataggaaccctgtctctacaaaatcaaaataattagcctgatgtgatggagtgcacctgtagtcccagctacttgggaagctgaggtgagaggatagcttgagtgcaggagtttgaggctaaagtgagctatgattgcaccactgcacttcatagcctgggcaacagagcaaggccctgtctcattaaaaaaaaagtttttacataaagtcctgtcatttctggccaaaatataagtagaaagcaacaatctttcctccccaaatctcccctacaacacacaacacaccacactttgtgcttattaaaattagtaaggtgtgactcactcatttattagctcaaccaaccaaatactggaaatttcccacagtttacaggtttgtcaagaaattcatataagaaactagcctccctatatccaaatcggtttcccatgttatttctagcatgaggtttacaaactcttcagtatcctaacggttgtttaactcatcatctcatcattttctcatggactccttcctccacaccttgtacacgtgccagagagcccatatggtcaacaaatgatttctagggagatgagttaggacattcttgcaaataaataaaatattaccagcatccttattatcttgccagccccacagaaaatatactagtcatcgaataaaatcagcattttttaaaattcaactagcagaatgtgtcccagccatgggaaaaatttccttcaggtttctgaaggaaaatcaactataaagtaaatatacatgatgtgccccattttttaaaaagatatgctctgggctaacttttgaaaagtctgttgaagataccagcacaattgccttgcttgtgttaagaaaaaaataagaacaataggataggagatggaaggaatttctcatactgtaatgtaacagagcagtagattagagtgcagacttcagcatcaagcttcctggatttgaaccctgggtctactacttaattgctgtgtgactttaggctagttattgaccctctctttagccttggttttctcctctttacaacagggtacttatagcactctgtgcctgtcatagtagggctcagggaatgtttattgttattattcttagcactgttattaggcagacctaaggtcaaattccaggtccaattctaattagttctgcagctttgagtaagttattgattctttctaaacctcagttttctcatctgtaaaatggtgataataattattatatatcatgagatttgttggaagacttgatgagatgataagtaaaatagttagcatggtgctggcatatatagtaaatgatccataaatgctaatagtttaaaaaaacaacaatagtggtagtaaataataatagagtaataaatattattacctggcctggttactgtcaagtatggcaaaaaagtctgagcactatttctcatttgttatcagtgctattggtggtgccatggtcaaatgagcagaacatagatcacctgctcatgaacccttcagtctgtctgatgctgagatcctgctggctaccatatccccagtgttaggatttccggtgttacctgctttatgaattactcagggaatacactggaaatcagtcttcactcacatcgttgtgcattatcttgaccacttaccacatcctttctatttcaaggaaagacaaaaggcatcttctcaactgcacaaagtaaaagccctgatttgatacctgaaaatctggggtctcagtgctctattttatgacacagctggatattcttagccctaatgttttgctcttacacctgtcttcttttctcaaatagggaaatcaattggtaaattgtaacatgccaccctcagtcacaaaagatgacaccaatatttttctacttagcctgggcccttcaccaagatgatcttgccttagtgggcttggctgggattctgcatcaaaactagccacagaagggctgttggctatgtgggaagctatgcatcatccatcatctgcccttgaatgtacatttctgtcaggaagctggatttattttacagacattcttctcagcatcctgggaatcccagaaagactggaggcaaggctaggccaatatgaaatggataggcattggggtggaccccaaatcctctggcatgtttatccagtgaccaggaaactatgcaaaccctgaaatgcacatggacaagtacaaagagtgctgaatggattttgagagaaacaagctatgtttaagcttgagcagattatatcccctctctgggtctctgtaaaatgaggaagagtgaaagaaatgaccttccatccttcactgacttcactcagtgtgagctgtggctcaggcattgcccctggtgggaggggagagagaaatttgggagggtatatttttctctgttgttttagtttattttcactcactaagttttggtggggtaatatacattttaatgggtcaaataatgcagcagtcctctactctaaagaccatgaaaaggtgagggtctccacaaatttaaaaagatgccaaaaggtacactctttctaagccacttacgaaaaactaaatcaataatacgaagccatctgaaaaaaaaagaggagaaaggactcttaaaatgtttgactttctatgaagaacacatgccctattgatacaataaggagtaattagggggacagctccaaagcacagccaactccctggtgagtttccaaagtccagcagcgaagagcaaagttataagtaggtctgagcaaacttgccctgggctttcaccggatctgaggagcccatgtaattgaaactgagttcatcaaagccctgcttgacctcctccccacttcgcaattgccaccaagaccatggcctgaccagcccactttggcctgcatgatgtagccctcacagccaccctagtctcatctcctgccactcctcccttgcctgggcgcaacaggagccctctcagtctccttttgttcctggaattcacctaagcaaaacaacccttgcacacagtttcctatacctggcaatttttttttttgtcccctttgcctagtgctatggtttgaatagatgaatggttcaatgtccctactaaaattcatgttgaaatgtaattgcagtttcaacagtattacgaggtaggacctttaagaagtgattaggtcatgggggctctaccttcctgaacaaactaattccattattgtgggagtgggttagttataaaagtgagctctcttcacccacacttgcttgccttttcacctttccacaataggatgatgcagcctggaagccctcaccagtgctggcatcatgcccttggacttcccagcctccagaaccgtaagacataaactccttttcctcaaaaattacccagtctgttaaagcaacagaaaacagactaagacacctagtaaaaacctactcatctcttcggttttggcataaatgagatttcctgaaacaaggcttccctgacacttcattactctcctctgcttttgtggtccccctttgatgcaccactctaattttgcttagtacctctcctctctattcacatcatatattctgtgaagacaaggactgagtctgcattatcctactgcacctagcttaatgtctggcatgtagtgcctgcttagtatgaatgagcgatttcaagtccaccttattgacaccttatcccttggctggagatccagaggaagggttctattagaaaatgccagtggatttctctgttcccaggaagctctatttctccaaagtcacctcctgcagaaagtcatgtgccaatagctttagttcagagcaccataaaatagtacatgctaaaaggaagcctagagaggaccccacctggctctcactggacatacaaaactgaggcccacagaagcaaagtgaccttcccagggccacttcagccagagagcctgatcctccttctatcctcttgttaggaccatattatacagaagggaaaagagacaggctcaatttgaggtagtctctccaagctcaaaccatctttctccacatttccgtaaaaacatgaaaacaaacaaacaaaaaaaccaaacaaatgaaaaacacatttaaatgcagctggtcacaggaagtcaatggtgctggacacccaggggcaactgacagaagcaaaaactgcctctgtctggatcaaaaggattatagaaggtcatatgctaaagatcaagaacaccaccatattgtcagggacagttgtaatgtgacactgcaaccaaaaggtcagaattcactggtggtggtgaacacctgactctatttctccaaagctataattacagccaggagatgggcccagtgagtctatcatcagtatttattcttcaaaatactttgagtgtgaccaaactccactattgtttttatttatcttgaaatcttggcacatttatgttttatgttgcagtctttattataactttgaagggaaatttaattgatttgtatctgatgcccacaaaagctaaatttcaatcattttccatttttaaaaactgagtatgttttaaagaatctatcttcaatctaaaaaaataagtaggaccccaggtcagagctcatgaacactaacatgtttatattctaaaaactcttgactaatagttccattgtttttttttccaaataaatatgaaggatgcacatattcaaaacaataacaaaaaaaaaaaaaactagatctaaagaataccctactggggacttaatcccactcctggaaatggctcctactggtgggtgagctctagaacgtgctcacatttctctagtcaccatggaggaggcaagtcctccaaaagcccaaaaaggggagaagggaaagaaaaagaagagaggaaaggagaaaaacacatgcacaccaaaataaaaaaatacatatatcccctttaaaaaaatgagcatttaaactgcttgtcagatggtttcctgacaaagccactagagtgtattcacaggcatttgcataaatgctgcctgtgagttcaccatagctgcaagcgctaatggtacataaagtaatttagtcacttctcccggcattctatgtcagaatgatgagcacgggcactttgccttgttgcatattagatcattagataataaagtgttagcgcatgcaagctgacaggggctctgcaccacagtgttgtgagggcaccgcattttgccacagggggaagaaacagagaaactgatgccacagttggccttgaattcaagtaaacacaacctggaactcaggggaacaacaatgccaatagcaacactcctcaggcccctcaatgactccccagaacacagtcttcatgaacttgcccaaatgactggaagacaaggcaagtacacagggtagcgctgaacatagccttgtggcagccactcagctcctttcatcccgagctcatgctttttcaaaaattggaactgagagagcagttacattttgaggctgcctgtctccacgactgtacatcttccataaagctattgcttaaagaagaaacctcactaggctaaatggtcccataaatatccagccaaagaaaatcttggtatttatgaatgaagagaaagtacgggggaagaccattttccacgatctatagcatgccaggattcactatctttggaccatgcaagagtctatgaaataaatttgcctttgtcaactctcatacttgaattacagggtcatttatcagagcacaggggtttgcgagtccatgggtcacataagaaagcccatgcatgaatgtaaagcacgatctctgtctctacttatacacagaaaggtgagccacaaaaggaaacttcctccaacagtctgacaagcaggatataaatagagatttgcagaatagcccaaaataattcaggctacctgtaaattagatggtaaaaagtccagaatgggggagaacgtaggttcccacaggtcacaagaggagaacatgctttgccgtctcaccatgcggtagctgtttgaaggcggtggggggtgggagcggagacacagagggatgagggtgtatgattctcaaagtcttttaaacagagcattttgaaataggacttttcaacagcaaaataaagtattaccctcacatcaacatgaattagcatctaggtccactcccacacattaccaatgaaagagttcaatagtcatcctttgctgagtagatatttatgtgtcagcctgaagtgtctaaatgagtgggtggttttgtgtggttggttgactcactctgcagagaagcagatttctatgctattgtcattactaagaatttgaacatgtctaccctttctttccactggagagaagtgaaataaggcttcggtgaaggcaaagccccttgctgaaggaaataggacatacctatgtccccaaggatggccaaccacttacacagtgaaatgtcaccattttttgaaaaatatagtaatatggccatctgtggactcataaactgaagcaggtgaataaaatgctgactttaaaacttagaataatatgacaccccaactgaaatattaacactcttagaagagggaatatctgagctgggaggaagcttagagctgtgttgatccagaggtctcaaactgttgacctgtggctgcattcttcctaagtggcttttttccccctctcctcccttcagtgtccaaaaattttgtaattagttaccaacaattaaaaattcactgttgccaaactggaacatctggccccacttgggctctcattccccttagcaacaactggctggggccgaggggcaccagagcgtgtacttgcctgtcttctcagcctccacccagcccacttccctatctacattacctgcccccacccaaagcacagatttttttttaaactctcctacagatcatcaccttcattttaacaaggaggaaatcaaggatcccaaaagctaaagcgatttgtccaaggtcaaatagaggccagagtgaaactaaattgaatttggggttcctggtacctatttcaagacctagtcctttatcatgctgcaaaataacgttactgatcctcattgcctagagggatcctttagagaaggctatattctatgtttgcttttggtttttgttggagggataatttgcctggtgtcaggagctttctcactggcttcccaagagcagaaataggagctgggtgtggcctgagcatattttgaaagtgtgaacccagatttcaaactgacagtcaagtctgtcaccagactgggcagtacctattgcaactaaccacccacagtcaaaaacataacttcaatccttaagcagcactctccaaatcatgcccactgagtatttccctaattttttcttcctcctttcacctaaacacctctagtcacacaatgccttaagtgactccaagggtattataaagacaacattactgtaaagtgaggatcagaataattttaagtacagaaatggaactaggaatgtaatcatgagcaggtgtttgaaatggcctcctgcaaaatgtaatatccatccatctcagcactaatgaaaccataaagaagcagcttttgaaagatgatggtttactttaaaaagactgtaaaactggatgtggtgaagaatcccttctaagagcattacatctggctaattaataaaaagtacagttcgtgtgttccataagcacaggggaaaaagccaggcaaaaatgatgagagtggcgtgtttattaaattgggatgctggcagagaagggagttttctaccttgtaaattatgggcaactcctggcccatggaaaaaagcaggcaatcaggtgatcatttgtgtggtagtgttctgaaaagaatcttgctgaccctagcaaactggaaagggaagtgagggaaatgggttgagagtttgaggcaattgaagaaagtctaatatggtgactggtatccagcagagcctcagtcactcattcttggatggacggatggacggatggatggatggatggatggatggatggatggatggatggatggatagatggatagatggatagatagatgaacggatggatggatgagtggagaggaggaagagtggatatattacacacacacatgcagcactgaaaaattcaggcgtgcccctaacccaacccatggttcttctgagtggcattcactttccttgattcaaatttttatctggtttccttcagtcctctcaaaggcaccactgattagccataattctcaagacaaatgggatttctccctaccaaagtctacttacagacagcaagttctatcacatggtgaagaggtaagagttaggtacagggcacaggagggacatttggtctgggcttcatattcagaaagcacctccaacctcgacattgaacctgatctccaaatgaagttcaacaggtggtcacagagatacaccaggagggtggtaaagaggatgggttcattataaaacctcaatggtcaattataaacatgtcaaatatatcacaattttagtgataccaaattgtgtggcctttccttatttttcccttggattggcctttccttattttgtaatccagtgggagcttagaataaagcaatggtccaggcctccttctttctctcaacctgaaaggaggcaatatcagccatttccagagtagagagtggtcccacaagaaaggtgggcctcagagatattttcctgtctttaaatatttgccaccatatgttgaagagaaaaaaccctagaggaccaatcttattcaaaaagacttttgaaatttgaaacagaatagaacatgtggtggagtggaagaaagaaaccaaatatattcacagttaaagtagcaatgccaaccaatgaaaatgattcgcctaccatgttccagataagagggcgtaccttccgaggggtcaagcctccgagccctccgcccatgcttggaattattatggacaaacatgttatcagagactgccaggacatggccatccacattgactgtcgtagacaccacgacctggagacataagaaagaaatgaatgaacattttaatataaaagcgtggtgggtaataaactcaagttaaataaataacagctgggagctgaagaaaattgcatagctatttcacataataactggtgcttatgctgtacaagtctaacaagaggagctattgatgagtgggtctttggcatggaacgcttttgatgcagttttaagtaaaattgcacagtttatagttatacagcagaaggtacactgttaaccataattttaacaagaggatctttattagcatatttttttacacaagggtggttgtgtttcacctaaattacccttcagtttagacactgaagcatatatcacagttgatcatgcaaataaaaatcttttgaatctttaaaatatttctccccactgtgtcagggttaagaggatagagaaatgaaaaagatttcagtaagagcagggatgcatttttctctcctggatgtctttttgagatttcttgtacgtttttctttccacattagtttggttcatcagaccaaagtccccctcactactattaccatcaccccaccccaaaaaattcctgctaattaagggtcttagatctgtttcaaattaaaaaaaaaactggtgggaatggcccaagacataatttagacactgaaaccatctcataaagtgactgtgaacccagtttgccagaagagacacaggcaaagatgttgtctcagagaactttgactaaaacaatgagaagaaatgacctacgcttctccttatattaaatggggaaagggattaaaactgaaacccacagagatatgtttattcatgcgacctcttacaaccaaatataataattgtctgtaattgcagcttcagctcccacctcatgctttgacatgggaaacagcaatcagcccgctcccgtttaatccacctattatgttgactaattaactttgctcgacagtttatttcttcctccattatcagcccctgtcagccgcaagcaccctgcagcataggggaaacctcaggctctttgattgatcaccgatagattgacatgcagattaatttaattagaatcacctcacttgagaaatgaaagacaatggcaagagggctaatagatctgctctcataatgaggcgagcctccagagcgaaggctgaggatttctgatttattttgctcaattccccagttgcttggaaagactctcgctttaattgttcttggttttgagaggcattagcctctgaagaggtgaaccgctttacaagggttggcacagatggaggcctcagtttctgaggaagccttttctccaagttggctgaagggggcatcgacttctgaagagtcttgtgtaacactctttcatcagctaagctgggcagaggggaaaacgccaggccctggcctatgcctgtgaattgtcagcttggacgccagtccccacagtcttcccatacttaaaagttccactgtcctcctcgttgacctaagtgcatcctggcaaaatacgatgaatttcctttcccagagcctcaaagatgcccacgaattgcaggctatgaacacatcacccatactagtagcataaggttgattttgttttctaaatctacttaattaaaatgcataggaaacagttgagagttcaatcagggaatcagagtattctccttagccactgtgaaaccccaaattccatctagaacaaatcatttgggggatgacatgtaagtttgatgcagaagtttgcagagtggttcttctctttattcatgattgaccaaccagatctgacacagccttatgtgtaaacacagcttgtatgtttacaggttaatttaaaagaaagaagaagagaagaaaacggtctactattttgccttcaaaaactatcatatgcagtggcaaagtcaatattatttaaggcaacagaaattcacttttctttttagagagacgacttcttaggacttacaattacataacagagctgggtctttcaaagaaattttgatttactatgagaccacaattgagcggtcactggagtcgttagctgaagaaactataaaaggaatcccaaaccatatctgttttcagtgtcaggaaatacagaaagtggttattctagatgtctgtcttaggaggaaaaaaaaaaaacaatgacaattcaccatgcacctgtaagacacaagctctacaaacttaaggcttaaaatattcagtatgtttcaaagacactgtcatctaatcctacattgaacaaaaatgtcaaaaacggttaaggaaaaaaaaactacaccccatatgtttttcttttcttggcaagagaagaaccaccagggccacatgtgtgatagaatcatttggctgaaatgccaatcaaaattggaaaaaagataatacagagaatctttatacttttaatttctagaaaataagcagctaatacgttcctcaaaaactcacagcacaacttccctaccacaaaacaatttctcccatttcaatttggaaatattcaggatatatttaaataaaacatatgctaaaattaatccacagagcgacttgtaaattaaaaaaaaaaaaacactgtgagatgcaaaaggggtactgaagtgtcctttaaaaataggcccatggtaggagggaaaagggcctttacagtttaccacataattaataaggtgctgacacattcacacaggcaaggggacagacaagcctgccaaatcttcaaccttcctaaattttgtcaataaaacacagcctaaatttgagacagataaacattaaaaatgattttacctttggacacaacaacactttccttctttctccccttttccactcccctgcccagagaaacagatgatgagaatacgaaggaaaagatatgtttagaatttcacgatatctgttataattacacctttactttctagaactgcactgtccaatacagaagccaaatgcctggctatttaaatttaaactaaacgacattttagattccctttctgagcctcaatagccacactgagcgtttcatagccataggcgactattgcctactgcattggacacggtgaacagggaatttttttatcattgcagaatgttctataggatggcactgctctagaatggttttgaaataaattgtgcacttgattcttgaagatgtccaagttatatctcctgaaataaatatcagcctatgtaaacaggtttagatttatacatatatgctttaatcactatatttttggaatgaaatttctattagggggctttgcttcttaatgtggcaatctagagatatgctgattaacactcagcatgttccagggtacttttcatctgggccttcctttctagttgagagtattcgttataagagaacgagaagggcaaaaaagaagtttctagctacccatggactttggatattttacactgatgttttcaatttcttggctcatatcagtggttcagaatctcctctgttatatccttttctggatagatatccctaaaaggtattattccaatccccctctatttagaatttgaaagaactagacacaaaatttcatccttggctctcaagctttcctggttgatgtgactttggccaggttaacttctctgagtcccagtgtccctgactctcaatgggaataaccaccatacttaactcataaggtaactgtgaggcttaaattaattaaagtggccagcatggttcctggttcacatggagcactcaataaacattagtagcagtaatagagtagtagttgtcaatttgtgggtgatgttaaacaagaagttcaaaagaatgtgtcgggttgataacctgaagtatcttaatgaccgtaaagaagacccagcatacactgtaattttaaataaaaggatacagaaagtgtttcttctatgtccactgctcaacacaaacgtacaattttaaagacctttgtgctagtaacacattattacacatttaggccttgcatgaattgcggttttcattggtttatataatgtcgctttctagaccctatctgtatcttagcctcttacatttgaggctttattataactaaatgaaaccttactattctgaaaatagtctgtaaatgagatgtctcatcagttcagtctagttttcccaatatttcccatcaatgaggatttctcaggagttttgttattggtgagtacttcctcaccatcacttctcaggcagcccctcttcccttcatgtcaggcaggagaccttgtatgtcctaactctattatctaagattcatgaagcataacctctgtctcatgagcagattttcaaaaagacacaagcagctaaattcaatcatgagtggaagatcacattaacaaaagtagcagtttgtggggaagaaggggttatgacaaaagcaacccaacatgttgaaatttgtatctttaagcatttctccaacaaacacagaatcagagcaaagattagaccataaatatatttttgtaatttaaatttagaatattgtgacagttaagtatttccttccaaaaaataaactcttcctcacgttaattttgaatgattatttaaaaattccaaatcttggttttcagtgctgatacatggtaactcagtaaaaggaaatcagtgttaaagttagtctgttctatgcttcctaacctctctgttttttgcttgttgtacttttgcattaatttagggcccctaatcacaaagctttaaaaatattaacttgaagtacactaaatgaaaagcactgggcagcatttcatggaataatactcagcaataaaaaggaacaaactattgatatcccagggaattatgttgagggtaaaaagccagtaaccaggggatacatactgcatgttaagggctgaattgttcctcccccagaaattcatgcattgaaggcctgatctccagtaccttagaatgtgactgtattttcagatagggctttgattactttaaaatgaggccattagagaggtctctaatccaatcctcacaggaggaaatttggacacacagagaaggtgagtatgattactaaaaaaggacaagatgagggatccttgtggtgatgaaaattccctatataaggactgtggtgttagacaaagctagacacatgatacaattttatagaactaaaaatacacccacacaaacaagtactagtaaaacaagggaaacctgaataagatggtagattacatgaatgtccatattctggttgtcatattgtaaaataactttgcaaaatgttactgaggaagactgggtaatgggtacatgggatcattctgtattacttctataactgcatgtaaacctaaaattatgtgaataaaaatctcaactaaataaaaggcattggcaaccaagatgtccttcaatggatgaatggaaaaacaaactggtaatccatataatagaatatcattttgcaatttaagaaaatgagctatcaagccacagacagtcatagaggggtcttaaatgcatattactaaataagaaaaagtgaatctcaagagtctatatactgtatgattccaactatacgatattctggaaaaggcaaaactatgaagacagtgaaaagatcagtggttgccaggagtctgggagaagagagggaggaatgggtgaaggataggggatttttagagcagtgaaaccattctgtataatactgtaatgatgtatatgtccatgcttttgtctaaacctatagaatgtacacacaaacagtgaactctagtgtaaactttaaattgatgttgatttttgagacagggtcctgctctgtcacccagactggagggcagtggtgtgatctcagcttactgcaacctctgcgtcccgggctcaactggtcctcccacctcagctcctgagtagctggaactagaggcatgcaccaccacactcagccttttttttttttttgtattttttttgtgaaaacagggtttcaccatgttgcccagactggtctcaaactcctgggctcatgtgatctacccatgtcagtctcccaaagtgctgggattatagtcatgagccaccacacccggcccacaaaactatggattttaataacatattaatattggcacatcaattgtaacatgtatcacactaatgcaagatgttaataataggggaaactgggggttaggggatggggatggggttgagaaggtattatatttctgtaaacctaaaactgctctacaaaataaactctctatattttttaaaaggtattgatcacacttctaccctcaaccccctatagtctacattctacattctacctgtcagctgaactactttgcagactcgtcaaatgttagagtcacaagagactccagagatcagctaatctagtggctcctaactaagagtttttgactgtaataatgggtgacattattgcacagagggaatcataaaagcatccacagtaaggctgcatactgaaatattcagttaactttcccttgtctgggaccctatcaactccatgtggaaactctggttatctcatctacatgagaagctctcaactagcagttttacatggctttaaagaactctaaagagaacgtgattcttaataaatgcaatttgattgaaaaatatgtcatcataggaggttcataggagaaaatgataaaaggagtcctcaatataagttatggcagtccagatttgtccaacacctccttttacagcttggaaaactaaggcccaggagtttaaaaaaacaacttcaagatcataggacaaattaagagcagaggcaagcctgaagggaaacctgtagactcacagtgcagttctcacccaccctcagttctggcctttcattttttttttgagatggagtcttgctctgtcaccaggccggactgcagggcgtaatctcggctcacagcaacctctgccacccagattcaagtaattctcctgcctcagcctcctgactagctgggactagaggggcacaccaccacacccagctaatttttatatttttagtagagacggtgtttcaccatgttggctaggatggtctcgatctcttgagctcgtgatccgtccatctcggcctcccaaaagtgctgggattacaggtgtaagccaacacagttggcctctggcctttcagtacacagtcctggcttacatcctctctctggactctcctaatacttccagtacaaatctatggtgcctgtgtgaccgactacagtttgagtattatttacataaaaatagtttgcagcagttaggtcttcattaactttgtcctttaaaatatccttggctgatatgaatgcgatattctcagaaatgttcctgattgctagcttctatctggttgaaagattccaaataactcattaaaaattatggaggacgcgtgaacctacaggatgtcatggagtggaactgctggagtaaaggagtggttaatggaattacattcgcactttaaggcttgaggcaaaaccagctcttaacaggaagacaagaacagacacttctaaatcctcagatacatgtgctaagctaatctagacctttggaaactagaattagcttctgtctcctgaacggtgacatatgataaacatgaaaagctcacaagtcatctgaacctcattcctccctctgtggatcaggatacttttgactactcttgagggtgtcattggtgtttagctggtgctctctgtgtgtgtgtcctcattggccattttaggtaggaatgagacaaacaggattgtcatgtgtgctctgtaacgatggggctatggcatacggacatggaaatcaggagcaagaaaatggcatattggtcaatggctcagattccagagtcagatgatcctgaatttgatccccagtcccatcacttacttgcttgtaatcttagatgagtcacttagtcataggaatacgtggtgagcccactatgtgcctaccatgtgccaaacattattctatgcactgaagaagcaacaatgaacaaaaccgataaagcatttaccaagcaggagtttagttcttactggggacagagagagagtcagacaataagtaagcaataaaagcaaatttcagattgtgataagttctaagaaaaaataaaatatcttccacctagatgattcctaggtgggagatatttttaattgggtgattaggaaaggcttctttaaggaagtgacaaaaaaagaggaaattttattttttgtatttttagaagaaatggggtttcgccatgttggccaggctggtctcaaactcctggcctcaagtgatccacctgcctcgtactcccaaagtgctcgacttacaggtatgagccaccgtgctcagcctgaaatctgaataaaaaatatccagtcattcaatgtgtcagaagagttttccagggagacagaatagaaagtgcaaagatcctgaggcaggaatgagtttggtgtatgtggggaagaaaaatgaaggaaggccaatgtgcttgacaggactaaagcaaataagagaaaaagtggtagaaaaataagtaagattatacatgtataacacttagtatgttgtctgacatataactagagctctacaagttacaacttaaaaagtggaagaatataaggataccttttgctggtaaatcccaacaactataggcatcttcagagccagcatccattggtaatcactgatcaaaccaaacacttttacattcatcctttaatgtattttacatttcctttaaaagcagctgtgtttaatgtagaaatacatgttctctaagtgcagggcgaccactcatcaaatgctgttcataaagattccttctcagtgatgcacactttctgccaaggctcagcataaggctcatgccaagatacatatttgcccaataagccataatggtttaatatatcaggttgaaaatcaccatttgtatttaccatgttatgtgacttaatcctgtattctgaaactatcattagagctgctttcagtataattaatcagcatggagcctcttgaaattattctgtatgaagagagtgatcgcagctcgggcccctagcattctgttggtagagaatttaattgcaagatgtgctatttgtcaaaacaatataacaatataagtacatccaagacaggggctgggagtcggtggaggagaaataaagaagcacatattcttatcccttttatgtaagtgtatttaaagcagacagaaactgcagatgtcaggcatgtattttaagaatcctctaatcattccctaaaacatacggatccagagataccatggcttgttaagcaaacagcaaagattctccaaaatttctagaatttacttgaaaaggcagggagttgccttttaatgtcataactcatgtcatcattttaaaaagcaaaacacatttttggtgggaatttgggatgaataacccagtggtttctcctcttctttactatccaaatgactaagatgtgaggcaagattgtttgcctccttagataaacatgaggtaaacatgagttttgtgtttgctattccctttgctcagaaccctctctggctcttcccaggatggtttatccttattcttgatctctgaacttgagtgtcctcacctcagaacgctttcctggtcacctactttaagagaggttgtctcccttctctactaaaaaaaaaatctaaaaattagccaggggtggtggtgcgtgactgtagtcccagctactctgaaggctgaggcaggagaatcgcttgaacccagaggttgcagtgagccaagatggcaccaccacactccagcctggcaacagagccagactccatctcaaaaaaaaaaaaaaagaaaaaaagagaggttttcatctcccaccccacactgtttttctctctcataataacctgtttaattttctttatagcagcagttacaatttctaatatttgtaattgttaatttgtacacatcttcattgcagctaatggcaattattctacatacatccattttcttgtcttcatgggctgcacagctagaccatgcaagcctccctatgattgcatatgaccatgtgactgacttctagccaatggaagtgagcaaatttgtaagccaaggcttttaaaaagcacatggcacccttcatgtgtccttctcccatcagaggactggataaagacagcagggttctgtagaataggagaggcataaaataaaaggagtccaggtccccaaataacctcaaggacaacacctgctcgtcaaccaggaacacctgccttgtaccattatgtgagcaagaaataaccttctgctgcaggtgagccattcgatattatatgttctatttgttacaagagctagtatcatcccaagaagaatataagtttcattagggcaaagaccttatctttcttattcatcatgatagactcaccacttagcacttcaataaatattactgaatgcacgcattcctgcatgtgtgcataactatgtcttctatttacattcatatatagttatagatctaatatttatacgtgaatatagatttatagccaatggaaaaactttattgaagagataagatgaatttggaaatttatactttacttcagtctccaggtattatggtatctattgcaatgacagcttgaacctgattcttgttcttcccttaccaccctcattctgccagtccccaaaaggaaagctattgataaaaatttaaatcttaaggttgaattgtctggctcctgtcggttaaaaatcagaccgaagcatggttttaacatagtcctttgacattagcatctttttagtgtcaagacgaagaaataggattgtttagtcataagtgaatttctccctgtgtcgtgagctatttccatccccagcttgctccccttctctttcctccagccttcctcatacccaccagtccttaacaaagcctgtatccactgttgtatttaagcaaatttcttaccctaactacagcctagggatttcaaaagaaagcatccattgtaaattaaaaaaaaaaaaacattgtgccagattttctacaaggtttattccatactgccttaaagtatgaacacagcccagctctgcagaaagtgattaatttcttgaaaacactaaggtcacactaattgacacgacctgtgtaattaagcaatctctgtttacacagcagaagcccagccactgtgaagctgagtttgcttgacagaatgtctttccatgtcaagagatcaacaacctttcttatgtcctcctcagtcacctacacaggcccctgattgctgttcagaggagacacgctcctgcgttgctatatgaagatcaggctggccggcaagcatacaaagtgagatggaggaaagcagcggcagtgaccactgcacagaccctgcttagtaggcaagagagggtgtcttcagtcagatgtgccaggactcaggttttcaataaaactggtaaaagccacattgacatgtaaggaggagaccagagtttttttgtgccagaaagacactctttcactcaccctcagaggcaacagagacataaaaatatttgaaaccagcctcccaattagtgtgctatgagaaaaatgctaaaaagtataggtcttactcataagcaatcttcaaccaatatcattatgacacacacctctgtagccaggacagctacagcaaagactaatcctccctgtcttggttcggtcctaagacttgggaaatttagtaggatttcttagcagactactctgagatgtcttcggggtgatttactcatgccccatctaggtgaggagctctcttgccttggagaattgaccaaaccctttacaggttaagtgaagttcaggttacctgctaaataatagcttgtttttctaaagtccctgcaagtaaaaattgatcaacactgtagctgtactctggaaaaatgttcatgtttcctcacttccacacaactctaccctctgcatgatgaactttgattgtgtgtcaatgttcttcatgcagatggcacctttaggctctgctaggacaaatatctcttttgaagacccctctcaggctttcctgggattccagcacatatttgtggggggtcattagggctctcagatgttacgagatctctttatagcctcactaaatatctgctcacagactatggacaatttttttttgttgttgttccaaaacatcagaaaatatctgagtcagactgcttggattataccactgccttaccatttagttgatgtgtgactttgggtaaattgcttaactgttctaaaatgtttcctcattttaaaaatgggaataatccacatttccatattcttaataagggtattttgaagataaacatgataactcatgtaaaatactttgcacaatgtctctcactaaagaagcaccaaataaatgttagctttatcatcatcatcgctaccaatatcgatagaagcacataaaggtaaacacatggacacatgcatttatacacgtgaacatggaacatgctgaatatagacacagttatcttcccagcatttaatgcagttaggaatgaaccaagacagagaacctaagaagcttggggtggaggcaaaacgaacaaacagaaaaacacctgaggatgacagtgagttcagtttggggctgactgagttgaagttcctggaaatatccagcagacatctggacagttagatctaaacctgggtgtcaggtctcagagattctgataccagagttctcagtgcataaatagtggttaagatgctgtgactggagaagatactggagagagcctataaaatggggaaagatctggacttcagaaggagacctggaaaaaaacaatatttacagaagacaaacaaacagcatcccttgtagggagttcagaatgagtgactgttgttatataattcaagaaaaaaaaatggattcaaaaagggtgtaatgtctgccagcatgaaataatacagagagaggtaggagtaaatagtcatgaaagagaaaaagactgaagaagaaaaaataaaaggttgggttagagagatttgaggttttgctttaactctcgaggcaattcatccatcctctaattacacaaatatccatgcacctgcatgcatgaaacccaatgttggttgtatgaaaataataaagaaatgtattaatgtacagggataaaaaataaaatgtgacagtgttcattctgccatgggttcctccatcctcttctaggcagcaaagagtgggtgatgggaacaaagcaggttaaacctgagacccaataaggaatttgtcattgttaataaaggaagacacggctcatccttaactcaaaaactgactctatggtggccaaggtagctgcccctattgatctattttaggacccatttgagaatcacaggcaagagcattgtcagtgtcagagttcagataaatcatatttatttgaaagacagtatggactttgtgctgggcagctctcacacttaatcaaagtgtgcaatttttgggacagtggcactgtcaccagtaagagcttgtcagcggttatcagatataggactaatcagtagttctcagtcaggggccattttgcctctcctctctccaccaggggacatttgataatgtctgcagacatttttgggtgtcatgattgggaggtagatgttctctactagcatctggagggtagaggccagtgacactgctaaacatcctacaatgcatgggggcaccccccatgattgaccctaaaaaggattatccagtctaaaatgttaactgtgcccaggttgagaaaccctagactgaactcatgatccatcttcagtttgtcacatggattttctccaaaggcttgcatttgtattttatcacttacaaattagctatacatgcaaaatattgctttctttcatatgtagtgatataagcagaagtgtcaattttcctccattttacagttgaggaaactgaagctccaaaggattataagactttccagatatctatgttgtgcctcctcatctcagcagcctttctactaaacaaagaataactattttgtttgcaaaatagaagctttgtagatgttctcaaaaataatagactaaattggtttctcatcttgtataacaggtatatttctataattcaaccttttcagacattttactagtaggttccacaaagaaaagagagcccctggaagttctacacggatgctcttttaggttcccagtgtcatcaaagtccatcccaaactctgctgccctaagaggtacagcagagttaatcctggtatacattaggcattagacatgtttattagacatacactgtttcacgcccagctatactttgctcctaactcaagctttggtcaaaagaaatataaggttcatgtcaagaccaaagcaagctacaaaacagtttattccaaaattcagcctcatgttgcaagaccctaagcaacacacacttagtagcaccacatgtgtggttttgccagcttaattgcaaagttgactcaaacataacacaaaaaatcctctatgggaatgagaacaccaagtttgaagtcagatgaccggaggaaacattttgcaagaaactagaaacctccccattcctggccaggcgcagtggctcacgcctgtaattccagcactttgggaggccgagacaagcagatcacaaggtcaggagatcaagaccatcctggctaacacagtgaaaccctgtctccactaaaaatacaaaaaaattagccgggcatggtggtgggtgcctgtagtcccagctactccagaggctgaggcaggagaatggcatgaacccgggaggcagagcttgcagtgagccaagattgtgccactgcactccagcctgggcaacagagcaagactccatctcaaaaaaaaaaaaaaaacgaaagaaaagaaaaaaagaaacatccccattcctgtgtgtcaagccaaaaggtggtgaagccaagatgattttagagaaatacctcagaatctcaggagagattacttttttctaccgcatttgttctttaataagactaataagtctcacctccttaaaagaaatcatcttggagactaagagatattgacatctccaatcaatgctcaagatcatctttcctttttcccatcagagaatgaaggtgcagctaaaatttttcaagattctctcagagatcatacatttcaatctacacttaaagctgactaaatatacttaagagcatactttaaacaccatgctgtttccttgatggaccatatgagcatacataaatggatcgttgctctgacagggaaactaacattgaccatacaaataacttagccattcggtggagagcagcacaagggtctaaaactttgcaactcaaagtgtgggcggtggccttggcatcatacaggagcttgttaggaatgcagaattccagtcccaccccagacctctattaacattttaataagatcctcaggggattttcagcacttttaagtcagagaagcaccacgtctagactcaacaaccttttctaaaatccaagtaccattttgtgtcttagaagtaaatgaatttgtttgtgagtcctcttcctttagtaaatgtataattaaggacatttctgaaacagaattgttatccatatcattttagagatgttatgcttcttaacagggccatttataataggcagctaccactaacaatttccaaaattggaagaggtgagcagagagaagcaaaggaagagaaagccattactgtaaagcagagcagttttaccagttgtactctttactgttttttgtttgtttgtttgtttttgttttgttttggtggggggtataggatcttactccgttatccaggctggagtgcagtggcatgacctcagctgcaacctccaactcccgggttcaagtgatcttcctaccttagcctcccgagtagctgggacaacaggcaaattcaccacatccagctaatttttgtatttttctgtagggttgaagttttaccatgttggccaggctggtcttgaactcttaaactcaaacaatctgcctaccttagcctcccaaagtgctgggattacaggcatgagccactgcgctcagcctctttactcttatttactggttttctacatacaaaattttagacaaaggattcatcatttctatgtactttacttaatctgtgggggtttaggcaagtgagtccactcaggcagccaaaactagactcaaagaacaccattgtttccaccagtgagcacaggtggtacagttcccactcttctctaatctaaacaactgctagattgcagatacctgggggaccaagggcctcagctgctcttcacctctgggaaaaaaagctacgtatcttctgcctaagacttttttatcctctcctgatattcatgccattattgagattcaagaaagataagtcagacccacctggaatctccgcatgtcacgtgggtttcccgcattctttaggcaattttggttacatttgaggaaaaatttcaagaagaacctgtgaagaaacaaatcatcatggttagcatttcggtttctgacacgggagggaaaaaagaggtaagtcacccctgggttgtgcattcgattctctttacatgttttctgaaatattcagcatggtgttagagccaatatttcatttgtggctttagcctttgttttgtttccacgctggaccttccttatgacacaaacactgttggcactgccaacagatctcacagaagaattaagccccaaggaagtattttcactcatacagagggaaagctttcatcataatttaagttaggttccaattggatataattgtctgagaattactcatggtccccaacgacaacatgcagtttaagccctataaactcacagatgatgaactggcaaatacatgctggatgaatacaaggatttggtaaccactttttatcttagcctctcaagtaaaatgttttaattagtactacccatgagaaataagtaaaattcacaaactaactaaactcctttgacttctcaaatacctcctgtttttttttttttttttttttttttttgttttttttttttttttgagacggagtctcgctctgtcgcccaggctggagtgcagtggcgggatctcggctcactgcaagctccgcctcccgggttcacgccattctcctgcctcagcctcccaagtagctgggactacaggcgcccgccactacgcccggctaattttttgtatttttagtagagacggggtttcaccgttttagccgggatggtctcgatctcctgacctcgtgatccgcccgcctcggcctcccaaagtgctgggattacaggcgtgagccaccgcgccaggccctcctgtttttcttaaactgtctgctgtagacaagagctagctgtgattgaataaagattttcctgcctcactgccaccttggtttctgaattggttctgtagtgagattcatgggttttacttgctaaggtgaccaaaggtcccaatttgccaagaaaaatcccagtttataccagctgtactggtgtatatattaatagtacctactttaactctcaaaaatgtcttggtatgggtgataaattatatggtcaccctataactttctgagttatttcttatgtaaccatcacagttgttaaagtctatcatggaaaagcagcagctactaaaagtgtcatattggggcattcatgtctaccacctgtaattaaaccttctacctgcccaggtttgggaaaagaagtatttccaaagatacctaagttttgcaatctcttttactactaggcctagatgtgatgtgcctgtggatttcaggccgaaatgtttcctaaaaatatcaaaatgcattaaaatgctggtcaactgaattcttgttgtaattcaattctcttcccctttcttccacttcaagtccacactggagtaaaatccccatctcaacacaaatagattatgaagaactatcaccctatgatgcctcagtctgaatttggctctgactgcaatgtctgtcaatcatgtaacactgggatcctctataacaacagcactgcacgaagacatacagagttcagccaatttctgaatatgaaactgagagaagtcccagatgaatccctctgctccttggtctcttagaatctgccaagatgggagtatgttgtgggaatcattctttagagacaaacaatggccttttcaaccaaaagagtaacatttaaaaatgcaaacatcgtcctaaaatgactgtttaacaccacacaacatttgactgcccatcaatgaaagcaggcctctaaataatcacttgccgctacttccagattctctccacagaagccaaagttgatcaacctttcgtccaagacaaatggcttacagaacaccactgaagcccagctgtgtgaaacaaaatctgattttgagctctccttttccggtaccaagacccacactgtccttgcacaggacaatcagccagtcattgactcttgcccactttcaatatgacagatttggtaaaggaaggggggttaagggagtggcccaaatcctaagtgcctttgcactgtcttgttggtctgagctcccagaaggcaagtgctgggtagccctgctgatcacacatggctttcagaaaccatttaatacagtggagctgactgttgtgatccttgaatcttgctagggttcaatcctatatccatagacactgaagacatgaaaactggctgctgctttcaagaacagtcagttagaagggcatatttcaaagctacttcaagccccaggagagggctgattatcactaaactgacaacaagagtgggtgtgatatggtgaaaggccacagccattagaaacacccagaataatgagattcatatcctgactctgacaggtactacctgtgtgactttggataaggagctgaacttctctgcaccacactttccttatctataaactggtgcaataacaggccttactgtatagggaaactgtgaaaattgcgataaggcagagtaacagatacatggtaggtatgctgatggtggcagtcatcataagaatggcttccgtgtattgggtgcttaccttgtgctcagttcactgctaagaacaaatctgttttctcatacaatcctcctaagtaacctctgctattaatcccattttatagatgagaaaactgagattcagagaagtgaaataacttgtccaaagctaggaagtgtgaatctagaactcaaattcagacagtgtagctccagagactgtactcttaaccaccatgatgtagtagttttagtaatgacagaagtagtgcagtaatgatgttaatactaattgtactattgatagcaatcgtactgtaacagcaattttgctaataagagtaaataagattaatcgaactactaagaataattattagtatcatgatttccacaacagcaacatgaacattatggaggtagacgtcattgccattctcccttaagagggccccctgcttgcttccccagggttggtaatatttgctgcccatgtgtgtttaagccatttgagcccagacaagacagccagattcaggttgtgctagaaggagctgtcagcacaccctctggcttcttcaagtcagacaactgctagccaccatgagggggtccatctggtgccaaaatgaattttgaaagacaggcaaacaggacaccagctatgccagggagaaacagaatcaagggagcagaggatcttctgcctcaaagatgagctggggcagggcgcctgtcagcagcccatcgttagcacaaaagctatgccgggcacacaccagatccctgttaccctaagctggcctgtcacttggcatgctggcagagtcccccgcctgccccctcaacagtggatcacttgctgaaattgaaagcttgaccatctgtcgtggggaagacacggccatcaactggtgcctgaggcctcacacaagcccttatgtggaaaagacgctctgaagggccagttcttttggggaaagccagccctaccccagagggagcctcagaaattctttcaaagttttcccctaagtaaaagccaagtgcctgaccctttcggattacagttccttaaaggaactgagaggagttagaaggaggagttaaaaatatccccactgagagacagacatggcacacgaatttgggggatgacttatcaggctaagtttataaggcctttgtaaaccgggggacatgtgcacgtctgctggcctacggagaagatctcagattccgagggggcttttaacaaagcagaggttattgtaactcaaaacctcacttttgtctaatgaattgctgcattttgtgaggcgggtgtgtttgataaagtgttgtcaggagaaaaagtgtggcagccttaccccaactgtgggaaactgacccacagcaggacaaagcccctattgaccctgtagagttccaaggagttccataaactccaggaaacagcctgaccaggatcaaactcctttttaactcaagccttttttttttttttttttgagggggaaggaaggaggtaacgagaaactcgacatctttctgttaactttcagtacaaataatatcatcttgtgttcatgtaatgcgttaattattcagagcacttatattcccaatatctcactaaatcctcacggaatttctataaattaggtgcaccaggaattatcaaagccatttgaaaggcaagaaaaacaaagacaacaaaattaagggatttatctacagtcaacaaccaatctcgtaaattgaccgaaaggactagtcatggtatgtgttttccatgaactctaggattttataagtgatcttaatcatcacttagtctaacctcctcattttgcctatgagaaaaattaggcatcagaagacatgacaatattcacatagttagtaatgaatatcagagctggaactataatccatatgtcctgatgtctagttatataattttcccaacataatattagcttctcaagccaatcctgtaagagctgaatgcctgcgctcttaaactgtttagtctactacctcaaatgggaaagtgacagtcataaaaccaaaaggtgacatcctattaaaagttttatttgggttcatcaatcaggccagtgtaggacattagcccatcacggaactaactgaacccaatacaaacatttgtagaacaaaattgcttgttcaatgacatacctgtatcaccttttaccaaccaacagatattagtatctagtttgagtagctttcatgtgaccagcacggtactcaagaccaaaaggcacttctggactcccccaaaaggaaaattaattcaattagtcagcaggatctgactcacctacataaggatataaaatttttaaaaaatcatccctgcatgcatagtgcccggcgtaagacctagaacccagtggtttttcagtaaatacttgctcaactaaatggagtctagggtctgcaagggatagaaataagggtgtttttacagtaaagacagcagtagaatatactgggcaagagcttgcattggagctaagagaagcctgagtgaatttcaacaattcctgaacctcagtggcctcattaaaacatgagaataatagtacctctctcctaggatcactgtgcagctttcaccgtaattttagctttactccttaattaattgggtgactttagataaattatttaacctctctgtgcctcaattttctcatctgtaagatgggaggaacatcggaacctactttaaagagttaagagaattaaatgagttaacatatgtggagtgttgaaatagtacctgccatagaggaagtgataattattttcttcatcatttatccctggcaactgctcactgcctagcactcagagatgttgagattttcagatacaaaaagtattcttcactctttaaatgttaaggtcaagaaaagaagcaaagacctatgtacccaatgagaactataggtttcattgaatgacctacaaaaagaaaaaaaaaaaaaagaagaagaaataaccaccaaagaaagataataatgactacagcagctttacccaaaggctaagacacataaaggaaaggggtagtgccttaaatcgtggagaactccagccagtcagaactgaagggcacacacagtaaaactgcccattaggcaacagcttgtacatcattaattattatgtaaagcattgcaatcaatctgggctgagcaggttgagtttttacctcccccaacccaaattctgaaaaatcacgtttggatttttgcagctgctctcataatgtccatgctagacaggaaatgcatcaaggcacacctaaactgagacacaaaacctacatttgcaatcttaaggctcctcgaaagttcctcttgacttatgcctgcagatggttatgtggcagatgatccttcccgcagatattcaggacacggagacttgctctggcccaatgcaggaaacagctgtgtggaaacaactgtgggttcccttctgtgtgaagttcaagctgctcccaccccacacacactggagggtaaacagcaaaatgcctcatgattaaaaggacctctttggaaaagttgtttccatagacggcaccatcacctttgctttgaaaaagaaatgcagaacctcctgcctccatgtccaagcctactgcccagaaatagccaaggaagtctttctaagagtctaaggattatctcccaaattgaaaatattgaaccaaaaagcacctatccctacccagcccacctgagctgccaggggctttatccgaaggtcatcactacctcctggtagccttcaaagacacagagctctgagaagaggtaaacaagagtctcaaggccctgaaaaatggatctcccttgcaacagagcaggccaaaacagtgagaaggagaaaactctattttcaatgtcaaagaaagcgttttggttcctagcacacagaagtagttgtagagtacagttcatccatgtgaaaatctgatacccataaggctgccaaaatcccaggatgccacaagggcaggctgaggaggctgaacccatgtaagggtaaaggttgctcactgccgggctgacttcctctccttttctgatattaacatgcattcctgagagagaccctctttgacttaagcaccaatcattctgtttgagaggtggggtgggcagaaaggggaggaataagatcctggagggaattctgcacagatgaagcaaattctctcctctctccctgcagtggagggtggaatggtaccgagttgtggcactatcttggggatcccagggggagagcatgtggctgcccctattcttggccactgatttcaagaagtttaccttttccactggccaaggtcctttagatcttgggcatttctggaaagtgttctcagcctgaagggatgaacatgatcaacctgaaaagcattcattacctcagagctcagagtatgcccttgagggaagggcatcattagtggcaagaatttaaaaaaacaaaatggttttgtcatagcacagcagccaatgaaagaatttaaaaatagttttaaggaaaaggacgcactccacgtaggtctcctcatactagaagtcaaatctgaaaggcaggaaaaagtcttgagacagtgaataggtagaggacaggacaactaaccagttgccaatggggaaagaaaaaattacaatttcttagaaatgacacagagaagggaggttagagcaagggggctgtagcttaacactgacttctggctatctggcccaacttactcccctagcaatgtctgactggaaatttaagagagaaagaattctaagttcatgtgtggtagagaagatgtttatcctcacggatgttcttttacacagattactcaaatgccaagtgtttcttgccaaaacatattaaggtgcaaactctggccctgggcgaatatttgaagtcatcctaatgatttgaaatgtggcagaaatgaggcagatcacaaaaccaagtgtccgtctgtccttcttggaactggggacagactgaggacacatttgttttaaactgtttccattacaaggaaccaaatttctactgggaatcatggccacagagttcctgcagaccaagggacaggttttgagcaaaggtatcaggacttgcacttctggattactggtgtaaatctttccccaggctgaaaaggatgcacaggcaggtggcaactttgcttcagtaacagcgacccaccccacaaagccaagcataaaaaatgaggcagaaggagcctcagctcctcaacttagcagttactacagcaaacacaagcactgcaccatgtgtaaggccgtgtcctgagtgctttgcatgtatcagtttactctgtacaacagtcctatgagattctacttcttttctcattttacagataatgctaccaagaggtaaggtaatttgcccaaggtttcccatctagtaacaagtggagctgagatttgaacataggcagtttgactccaaagcccacatccattaaactatattctttacatgttatatatatatcgtgggatcattgaccattctggttatattcttattatcatcaccagattcattcaaaattacaactgaagccagcataatcatttcactagaaatgccaacactttcactagattatagccaattataaattttaatattttttgagtttgctcccaaccactctcaccctatttgtgatccctcaaatgcattttaaccataatgaaagaccagtgggtgatctggtaacagaaccaacccaaatatggagaacagtggccaaaacaaaaccaatgtaatctgggtctcttgggaagtgtcaatgaacatcaccataaggattaaattatactatatgtaattatgatagtcaccagtcactacttttgtgtgtgtttcatgcagacagaaagccaggggttgaaaatgaaaggctgttaatatctccttgttcagtacatatgtgtttagcattttaaagcagattcatttagaatctcacgttagaatttcacttttcccttctaaggactcagagggtttcgatattaacttcccctgtggaggtgacagatgtcagagagagatcaagaagttcaagtccacagtaactgaggcatacagttctgcctggatgctcaacttatgattcaagacttcaaaaagtacaaatgttcgttgtcacacattcattcacttactcaaccaacagacctttccagagagtccaatatgtagtgatgcttctcattcaataccaattttactaagagcaccatgattttggttcaagtttttctccaaaagaaaagtaaaaaagaagacaactctttacattcaaattcccaggaaaacttttgactcttaggatgatagagtattcaagtaattgccaaggaagattgaatacttttaaaatattaatcagttgtggctgttctggcaggggctagatcagtgaatctttcaaagtccctaataatgccaataatatgctctcctactcttcacttttcagcattctttgctaagtcacaccaagctacatcctgtgccctgaacatgaaatctccttcctgccttcaccataggctgcctccctggatctgaaatgcctccctcactcccacaccatctcagcttcccatcatcccacttatccctccaggtgcggtataaatgtactgagctcatgaaaccttcccagatacccagagctagaattaatccctgccacctacactctgttacagcacttgtcacacttggtcttcactgcaaggcctgcagttgcttgtataatggtctgcccctgcaagacaccacggacttctgatagtgcctttccattcctgacagctccttgcacagctgtacatgcaaagcactgaatacacagctgacttaaactacctgcaaatattaatggcagttagctttgaattatagcacaaagattatttctttcttctatattttctgacttttctatgaataggcactactttaatgaaataacaaacaactgcattgtaaaacttcaagtgaatatcattcagcacagaacctagggatgttggccccattctacaaggaataaattaggaactaaagattacgagtggctttctcaaagtttctatgctctaagatttaccatttaactcaaatgtgaacagttaagagctatccatctcacactctgtaaaatgtacatcatttattagtttcatattgcataattcatacatgagtatcaactgggaaggctccacaccattggtgtccttaacttcctacttaatattttaaactttgatgttgagaaatttttatctccaagttaaacctgccattgttttcccatcattcaagtgtaacccaaaggaataaaaggccatataactaaagtctgtttagtttcttctccaaaattctacagaccattctgttgacttttgttgaaacccttagttaaaactcttaatgatttactatttcttcattcagcctattttcttaggttatctatttattcattcagtctgtccttattcaataagtatttactaagcacctactttgcaccaaacagaaggcatacaacagacaacccagtcccttcccttgtgaaagttcattgaagtacagttctcatgctgtcttcatcagaattacctcagaaacttgtcctggcagagagaaagtaggaactgtatgaaaatttctgtacgtactctttcctgtgggatgagtccacttggaccagaggggcatttgaagaattttgatgcacactaaagcttgagaattgatagctagttgattcttaaaattaataataccatactatgtgataagtgaaatgatggagctatataccagaaattgtgaattgcctgggcatctcatcatgtgcaattgaaattcagcataaaaacttaagtagggccaggtgtggtgactcacgcctgtaatctcagcactttgggaggccgaggcgtgtggattgcttgaggtcaagagtttgagaccagcctgaccaacatggtgaaaccctgtctccactaaaaatttaaaaattagccaggcatggtggcgggcacctgaaatcccagctattctggaggctgaggcaagagaatcacttgaacctgggaggcagaagttgcagtgagctgagatggtgccagcctgggtgacagagcgagactccatctcaaaaaaacaagtcaaaacactgctgagtagaaataaaaataaaatttccccacccatcctctcttatcccagcacaagctgcagggaaagaaaaaggttcctagccagacatgatggctcatgcccataatcccagcaatttgggaggcaggcggatcacctgaggtcaagagtttgagaccagcctggccaacatggtgaaacctcgtctctaccaaaaatacaaaaattagccaggcgtggtggtgcacacctgtaatttcagctactcaggagactgaggcaggagaatcacttgaacctaggaggtagaagttgcaatgagctgagactgggtgacagagtgagacgctgtcaagaaagggaagaaggaaagggaagggaaggggaatgggagggggagggggaggggaggggaaagggaagggaagaaagaaaaggaagaagggaaggagagggaaggggagaagggaaggagagaagggaaggggaggaaagaagaggggggagaagggaaggggaggggggagaaaggaggggaggggagaggggaggagagaggggagggaaaaagggaaggggagggaaaaagggaaggggaggggagaagggaagggaaggaaagggcagggaagaaaggaagggaaggaaagggaaggggaggggaggaagggaagggaagtagggaggagaagtaaagggaaggaaagggtagaagggaaggaaagaaaggaagggaagagaaaggaagggaagggaagaaaatggaaggtaagggaagagaaaggaagggaaggaaagggaaggagggaagggaagggaatagaaaggaagggacgggaagggaagaagggaaaaggagaagaggggaggtgaagggtgtggaggggtggggaggggaggcaggggggaggagaggggaagggaagggtaggggaggggcaggggaaggggaggggaaggcagggaagggtggggaggagggggagaagggagggaaggggaggggaagggtggagaggggaggggagggaaagggtggggaggggaggagaggggaggagaggggaggagaggggagggaggggagggaaggggttcttgtttgcgttagaaagctgatatttggaaactttatgcttcaaggaaaataaataaactcacttttcaaccaaaaaaaaaagtacatatagacaaaagggatcagctgaaaaagctattccccaaggtgtggggggtgggggacacagaatcttgctaaggatgaaaagtattttgaaactattttaaataatcattacccttttaatattcaccgcatctgtctgttcacttttcccatcataccctcccttgtcccagtctcagcatcttcatgtgttgcctgtcatcccccggcctcacacatcattggggataatgaatttaatttgagcaatggatttcattgaaaaaaaatctctgcatcccaacatgccacacaagctgagctcagataaaaacaagtgactccttaatttggatttaaacctcaggaccagtctacaaataaaaatgaccagcgagcatcatgcccacagagcactgacaataatctcctgtgctccaaattattctagtctatattatagacgatccaataagcctgtgtgttctagtccataaaaatataagaagaaatttatcattttgaaatcataatgcaaaatagagtctgacactttattaagcactatttctcatgatatcataaggatgctgatggaaaatgaaactaaagcagtatcagagacgaacaatgacagcatttagactttctgagggtgctttgtagctcacaggtcactcgcttgccctccccgcatgtcacttttgaacagcttcagtttaaacctgaaacactgaaaacataattctgaaaaaagctttcattttatcacaaaattggttgatcatttacaaaaaaatgctggaatgggataagaaatgatctaatccagatattcttaacctgcagtcagtgggtggtctacatggcatccgtgatcaccccaacattgtatgcaaacttttgtatacttgttttcctgtggaatgggtccagaggcttcagaggacaggagtctgaattgactgccagaatcctttttattctgttttgataacagtctgctattctcttttttagagaacaacttcgccctcactcaagagtctttacatttcagcagcataaactcattccacacttggaccaaagaggcacttgtgatttaggcctggccagtcagagtatcataacccccaactatatatctgctttagagactggcatgtgacccaagtcaagccaatcaggctctatctgagctagtctcaggatttttgtttgggcggctttaaaaaaagagatggaatttccatttatgagagttgaacccaaaaagatgtgcagctggggttgctggaaaattcaatacatttgagatgaatctataatagaatataatccattcatattccaccttgtagagatcactggaaaagtgagctttcataggtggggaggagagaaggtaagaagagcttacatcatacaatgccctccaagaaagataaggagaagtggagaaggaggtgtgctgagagggtggcaggagacgagacagtctcaaaaatgtaagagagagaatattcaatagagtgctggtaacttttaggctccacaacttcaatattcttaagtctatcacatgcacacgcgcacacacactcacatacacatacatttatgtatatattttttatttcacatacagaattgctattaactttcaaaatgatagaagcttttaaattcagagtctcaaatgcagaccctacagagcccaggaaggtcaatcaatgagtgaactaggctgcatgtaaaaccacagagagtactgggaattatcagaactcaagagtcaacgtcttgtcttcagggacagcttgactcttctccagccgactgactccacagggcaatatgggtacagtgttgtcagaccctcctatttgaagagaagctggaaatgcatattgttaagtgtgaaatttgccaatcttccaaaccacagaagggccagacaaaacaaatctggtagagggatgcagtttgcatctccggccctaaactgtaataaccaaagtggcagcaagtcatttgtctgcaagactagggcagggtcactttgtgcccattttaaaataaaaacaataacaaaacaaggacccctgtggctacactaaatgggactcctctcattaaaaaacaaacatagttcttgcttttgaagcaatggcatgttttgtttggttatttttaaggatcgcatcacttgaaattcagatgtagtcaagcttgattttctcccagacctttggcagctgacgggttgggtgaagggagaagttgggaaaagcatctggtcccagaagcaaaagtgaaggcagtgcatatttaccagcatgaggctgtccacagacagtgaatagagacacagggaaaacctccaatacccacctgttcacagctggatttcccagggcacttaatttaatcagaagcagtaacttttagtagcattttacaaccaattaaccatgcaggaaacaaaacaactgactcggtgccttcctccttgcttctaaagagactgtggcctcaaaagtcagcaatttggaactctctgtatgaaagaagacgccatcaaacccagcacaaacaagttttttcccttcctacatttaatgggaggacccttgaatctggccaggccttgttggcatgggaatcactcccattttcacataaagagctcccattttggtcagcacatgccaggcactgggcatttacacattcattctaatgaattcttaccaccaccccttaatgttagggcctactatattcccatctacagatgaatgtactgaggcgaggggaatcagtaaaagaaccccaggtcacatataagtgaaagaaccaggatctgggcccagaaaatattgttcataacagagagcaaaatcttagcatagaactcactgatttcccctgcagcgagttaaaagtaaaaccacgtgataagagccagcttctggtattaatgaggataaacttccttgtatcaaaaacaggtattcaaacttatgctaaattctataggcaataattttccactaaatcaataacaattttttaaaaacaggctataccttttaaactgtgcatcactttaaaaaatcatttctaacttttctttaactgatcctcacgaaaagtcttgaagtatatgacagggagtggataaagtcacttccatttgacagatgagtctactgaagctccaagaaatcaggtgacatggtcagggtcacccagctgattagtggcagcctctagttcccattcgtgagcaccccagccatgggggctacttttcacatccacagaatgccaagctcttccccaccctgggtcctggagggatttggccctagttctctcccacccttcaggtctctgagatgtcatctccccaggaatgtcttcctgtatcctacctcagtgatccccctctcattccccatcatcgtcatacccagatcctattacggtgcttggcatctggcagtcaaatatttgctaagtgaatgagtaagtaagtaaatgaacgcctgatgaattctcaactttctgaattttctaactcataacagtgactatgcatcaggactttctccccagcacctctggtcatctgtagcataacacatgaaaacaaatcctgccccagcaatacttaaggacccacctgctgaaacgagaccatggtgggacaccccctgccctgctccaaacacacgcacttgttcttcaatgtctttctcagttgactccaggctagattcttaagcatggcaggaagagccacacaaagtggaggatataaataaaaatgtcataaaacaatagtttattaaaacaaagtagagagtcttcaaatttaagaaaagaagaagctacaggcaggtatagcaggctacaacagagatccttaattcttctctgagttttcatccctgtctctggggttcttctgctgatggctaccagatgtcagagaggggcctctgagagaaacctgacacaatcccgcaccccaatttaagccaagaggtgtcgtgagagagcactgggtctgcttgaacctagtatgtgttccctctcaatgagtctacttccaaaaccattccctgaacgctgagagtgttttgagtgttatttttgatatggaaggctcttctcttacaaagataatgatgataaattgttctcaaagtgaacagcctgggaaaatatgggattttatgtatgtttccttgaattatggaagcaagtttgcctgcacactctagtggtgtggtgattcttagccaagatgactcagaataccaatttcctttgatgatggttgattcttttagaaggaaagattgctccaaagtagcctaactgaatactttaccaagtgctaggctttagaaaaataataatgagttaagcatagctaatgtttatactacatttagtacatttttttagtcctcacagcaaccctacgctcccccatccactcaccctgcctccattcctgtcccagggcaccaggtaagaaaccagctgaatcacagggagatttagtaacttgcctgccaacagatagctcatggcagatatagacaatatttgaacgcaaagtctcactagacagcttgtgctcataagaactgcaactgggctaagaatctgggttccctttaccactgtagggtacagcaatatgcctgcactggcagctaccatatttccctcagtccttagatactgcatggtaaaatctggcaacatgcctatctattttttaaaagcgagaaaaaacaaaacaaaacaaaacaaacctttcttctgcccttgaaacaatcacttccttcctttgtgatctggaacaaaactatctttgccatcttccgcctcctactctctgccacagagattatgttgatgtgaagaccaactgtgttggttagatctaaccctgttagatccttctgcattccctcagcaccccttctgcttggccaactcagtagttttgcaaatgctatggctctctcctggcaaactttctcttcacctctcccatcccttctcacctgaacaacacataatcccatccatcaaatatcacatgcactgggacactcccctggctgtcccccaaaatctctccaaactctctcctctgtgcttctgctacaattattatgttgcaaaatatcaagtttcatgtctctgttgcccctaaaaacaagttcctacccattcacaatgacataaatgtttgtaagattgaagtcccgaagaccaaatttcactcacattccaagtataatctttttggtgctgttaatcattggactagaatcctgcactgggctatttatactctttgaattgctcacatttcttccctcaagaactaagcaaaaaaaaagtaagtgtaagtgctttcgtgcctcaagtaagacagtccattcaccaagagtttcatgatggtgttgggtagcagttttccatactaaaaatggagacggggaaaaaatccatttaactttgatttcttgcttttttgctggaaagctttataagttgcttcttggtctcacctagtagaagggtcactgccttagctgggattgtgacaagcctctctagaattagagtactttattatcacattagtactggaaaaagtcacataattaacagaatttatcctcatttactctgcaaaatcactaatattcaatctctctgcctctgtttaattactttccttaacacaacttttttttccaagttgacccttcgtgggctcatctgcagaaatgtgttaaaactttttctccctctcctccatttaagtggctagactttattcatttgaataagcataaaaggtgcaccataaggtctgtcatagttcacacaatgcctttgaattagcagccgtgacggtgtcatgcttttgctggagatcctctgttcggagtaagtgatgacagccaccagaattactgttaattgtaatatgacactggcatttcaccggctgcatctagtggtaaacttgcattagttcaggttcctaagaaatttagaagctgagacatggcaattcttcaaagagaacagcagacccgcctgacacatgctgccttctcaggtactgcttcttcatacctgcttgctcaaaagaatggtaaacacacacacacatgcacagacacacttcaaaataaagccacctctggataacaatgtcatcattagataacaaatctggaaggcactggcttgctctgaagactgcattctcctcctttgaagcagcaaagtataaagtaaagaaaccaaggcttaagggacaaacatttagtagaagctgaataatcccatccatcaaatatcacatgcactgggacacttccctggctgtcccccaaaatctccccaaattctctcctctgtgcttctgctacaattattatgttgcaaaatatcaagtttcatatctctgttgcccctaaaaacaaggtcccctttttctgaaacatacatttttaaaacgtgcctctatatttcacatcaaggcagcctgctccagaagatgggggctcagaggaaaggaagaggggcttggcttgaacagatcttttggtgtggaagtagttggttcacttttcagggaaggtaaagccctcctaatgaggtcaggggtggggccgggtgagtgacagggagacagtgaacaaaatgggcagctgtcttggctccttagacagtgagctttaggagtagaggactcaggcagtctgcttctgcccgacatccatgggtggtctaaaagactttcaccgcaatcattgccagccaacaacatgtttatctaccaaaagaaaaatcagcccctctccattttccatacaagagacgcatctcaatgttaatgtgaaaaaagggccagtaagagttcttatctgccctccctttgagtcaagtgatatgcatttacattggtctttaactcaaattagaatcactttgtggacttcatatataatatggcccatgttcactggaaaatcagagctctctctgacctccaagctttagctcaaccattccttttgcctgtaatgcctttctctcccttctaaagaccccctatccttccaggtctggttaagattctccctctccccataagacttcccagattttcccattcggagttgatatcacttctccatacaactgaggtgtccaaagtctgtgagtgtctttcttacaattctgaggtcattttacactttgggtatctgtgcatgaatctgatggcttcatttggctgtgaacacctagaaggggtcaagagggttgaggctttgctgaacctcactgactacacttgggactatttctggctgaaactaattcacttgtacctccaaagctgcccctcacttaacctgtggtcaaacacttcatcattttggccccggaagttggccacttcccaccttcaagcctctgtgcatactgttccctctgtctggaaagctgtctattgcaaggtaatcgagcccactcctcaagccaactccaaatccaccttgatcacattggccagaacagcattatctaaattcccaaggcttttgttgatatctcatcggtcacttattaccttgtactttgcctatctgcatttacatttcatatctggccaaccagattttaaccgtctatgtgaagggaacgtattttatacaatcctgtttcctccacaatgtttagtagaatcttgtttatacatcaccgtttggtgaataaatgaacattagtctaatatttcactttgggatctccataaaaataagacaagtattgatggatacacttccacagtactgccaataaacttctagttccgcacctactaatgatgctatcaacatgattacaattattcttatttttaaagttaccattatttgagtgcttactatgtgcaaggtcatttgctaagcactttactaacatcatcttattgaatgctcacaacaaccctaagatagtaactactaaggtagacactatcaatagtccatctgcctgagatcacaaatctagtacttgcaagaccctggattcaaatccaggtatgactaaggccaatatctgtgttcttgttcacgacactatttgtagccacctgatcatgctttggaaggtattcacatatgtgtgaagaacgcctactcaccctggcttctgacataagaatgcagatctggggtataagtgaccccactcagagtgtagagacaagccaccaccatgtggacaggagccacctctcacgatttccactgagataggacttggctgccatcttggcatggttctcttcagtgccactgagcccttttcacttttagaaggacaagaaaaccctcactgcctgcttttctgagccaacgtggtcagcttgaattttaagaattgttgcttaaggtttggtaagacaaacaagtgacattttctgatggctcagactcttttgctccttctccccttcagtccaagcccatggcgcatcttgcgtctctgttgcatgtgtgtctcggcgcataaatcccttttgcctcagaactctgatatcgccatcatgacatccacctccagcaccctgcacaagggtgagcgtgggcctctaaccatcagctgtttcaccatgtcagtatcacagggagcaggacacacattccagagctgggtagattaacctccaagacgacactcagttttagctttagcctccctaaatcctcaacaaaagctttaacagccagaactgatttaggaccttaactgtaaatctcctctcttctcatgcactcactaaaggggtgatgagtaaaatcaactgggaccttttctggtcacttgtcccctgtgtcccctggaggattcaaggtgatagctaagaacccgcattatcaagaatcttactcaaaggcaggctaaaaaaaaataaaggaactggaaggtgaagagaaacattattaatggcgtctatcaaatgcggatttgtgaaaatatcattcatttataaaaatgaagccaacctagtagaatgttaaaaacagcagtaaccgaatgtacactcaatttttagagacttgctgatcagcaatggagccctgccatgagaacacatctccttttcactcaagcgaggatctgcaggggcattttcaaaagtaaataaatgtccacaaagaacaaaaaaagatcagtagagaattgagtctctcaagaacatccctgacaaaataaaccccatgtttatgtatgctccctccattggcctgagccagaaatgttccctgcaacttgaaaccaatggcacaggagttgagagaaatgtccggaattagcttagtcaaatgctgccttcaattaatgctcctctgctgcttaatgagatcccagggccaaagcagtttagtttgactttagcagttcccacttgttttggccatgatgcatcaccttgccttttctttggttatgtggcatcttacatagagacacctctttaaaattccaagtggcatattttgaaatagtgtctagatttttttcttataaaggttgatttattgtaaaaaaaaaaaaatgtttaaaatccaaaattcatagataaataaaagccacctgtatcccattttgtctcaatctcttcaagtacatacaaatttaataaccatatacagacactatatccttttttatgttatttcatatcttcaaaatattgttttactccataacatttcatcatatacagtagacattcaaatgatctcctaatgtttgattactttcaaatttttttgctatgataaataatcccttggtgaacattcttgtatgtaaaattttatctgaataaccaaggattgccttaaaataattaacaagaatttctgagtcaaaggtggcagattgctggagatggagggtaaaatagtttcatctgaaaaaaaaatgttggcaaaggtcaaggtaacttcagattcagccaaagtaggctgggaaaacttcaaaaagtggcccaatggtgtaaatggttttgataagttgggttccagggacatccaatgtttattaaaaaaaacaagaacacacaaacaaacaaaaactccagtgaagcaagcagcacatattgcatatccatgatccaacctgtcttcacctgccattctacaatgcattgaaacccatgacagtgtagtcaccatcttggactagaagtaactacaaatgaaggctatctcagagaagccccctacgtgccactatgcttgtcccactgtgcctgctacagggctgagaaaaggactcaactacagcaaagcaagtcaatattggatacagtcaggttttctacttggcccatgctaccaccaagataccatgtccaagagtagggtgagagaaagctcattttttaagcgatctctgcttaaagtctgaatgaagttatatcctccctgagaaactgcatcctttgcaaagtggacaccatattgtgaacttaggctttaaggaaaattcaaaacaagtgacctacaatatgattatcattttcttaaaattatacctggaaattgttcaacaagaacatctgctcaggaacagcagtccttcattagactcacattcttgaacgattgaattctacagaccctgactttgattttgaagactttttgttttcctgagaggtcagcctcaaatacaactgctagtgactcaaattatatgtgatctcttctcactgtcacatggcataaagtccaccatttacaatttggcaccaaaaacccagtcagctaaatctcttgtcccctatcctttatgttcctttatgctaaaggtttgtaaccttcatgcttatggtttggaactctaactcatttgatgtttcctaaactctctgagctctcttaagcctccccccatgtaagtcctcacccctgcccattcctggtctaaaaaatctcctatatttcaagaatgatcacaactcctacctctccctctaggaagccttcccaagttcctcccgacaggaatagaacatcccacctcagttttccaacggcacactcctccagaaccacatctgtcacattgctctatgactgccacttaccaatctccccggaatgagagagtaagatcctcgaagataacaaccatgtatgttcatctctgtatcctcagaacctgagatagagcttataaatatctgcttgattccggaacaacaaatgataaaatgctacctacgattaagaaataattgagaatccaaaataaagtaacaaagaccaagagcctgaagacactctagctgtaaaccacgtgtgtgtgtgcagagtatcatggcttattataaaaaaaaatatgctggaatgtttgcaaaaccaaattgtattaacaaaaaacatctgcagctttatactgtgtgaccataatcttgatttttttcataaaatgcagaatatcatttataacaataaatacaaactctataaagtctcttcaatataactcaaacctttttctttggtgtgctctaaacatattttacgtaaatgatgccaaagtctcatgaaaatatacagaaaccggaagctcaatggcagcagatgcagagactcctcacagagttactgagggggtaaatagaatctaactcaggggccaggtgtggtggctcatgcctataattccagcattttgggagactgaggcaggtggattacctgaggtcaggagtttgagaccagcctggccaacatggcggaagcccatctctactaaaaatacaaaaaattagctggttgtggtggtacacaccagctactagggaggctgaagcaggagaatcacttgaacccgggaggtggaggttgcagtgagccaagatcatgccactgcactccagcctgggtgacagagcaagactctgtctcaaaaaaaaaaaaaaaaaaaaaaaaaatctaactcaggggccaccttagatatgaagagagtactggcttttaaactaaccgagatctgacactggatttacttaaaatctcaaatagtcttgtctttcttacctttctgccaagccaaaggggcaagggaaactgctgtaaaaatgaggtgctcacagactacgagaatgaggaataaatattggagttgtctagagtagcttttcacccaaagaagggatccattccgcagtgtccctgacaaatggttgccccagtagttctatgcctgttctggttgctggagtggagaagataggagagcactctccctccaacgactgactttctagtggggaaaaaagacaaaaaacaagtgaaagactcacaagttaaaaaaagataatgtcagttaccgactccagctattagaaaagaatggatggcagatggaaagtgatggttcctagaaaggggagaagagaagatcttggaaattatgatatattggctgggacttgaagggcaagaaggagcccagccatgccaaaacccagaaaagcattccagttagtgcaaaggccagtgtggctgcagcacagtgagcgaggagggaggtgatgcgacggcagttccaggagaggcaggatcattctatctctaacagagagcagcccgtcactgggagatggtccttcccatatgagctggacagctctgccaggaggtgccctcttcctgagaactgaattcttccctcctatcatttaccttcagaaacttcagttttgagctcgggttcagatagcagcattacatctcctccttccctgagacaacccaaaaataatttaaatcagagaaaccggcccaccttctcttcccaggactcttttccaggataaacctattttagttatccaccccttcaagataggattcacaaacccttcccatcctgttcacccttttccaaatactctctgattagccaacacccctcctcaattatgccagaactgagcaagcctccaaaatgttagaggcagcacagcaggttggttatgacatgaacttggtttaaaaaggttccagtctgggccctaccacttatcagttgtgtgatcataaccaagtcacttaacctttctaagcctctgcctccttatctgtaaaatgagaactatagtatctaccttgaaggattattgtgagaaataagtaagaatatatatgaagttccaagggctgtggatggcatatagtaaatgctcagtaaggttaagctagtacaaatttgatgatgatgataatggtgataatgggatcacaatcatttccatcttgatctaaaatctgcatttgttcaaattcaagtttaagatatatttgttgtgccgtgttgtgttgtgtttgctgtagtagagtaggggaatagcagccatttacagttctactaaaacttttcccccagatcttttgcatataatacaatcactctaatctgatcacagtaacagagaaagatcaataaagaactaaaccataaaattgggtacatctaggctccaattactgcaggaatataaccatgtccgtatcacagagataatgctgcaaatacttaaagaatgtctgcagatcaccttcctggaggcaaaagaaaggtcttattcaccatcgttggagcaaatacgttagtcctcaataaatactagtaagagtggagaaaggaggaagtgagttagaggttgctctaggctaatggtatcacatttgatgatcaaactcacacaatgttagatctcaaggggacccaaatgaaacatattataggcatggaaatggaagctcagaaaggtgaaggcacttgcccaaggccacaaagctaacttgggtcagagctgggtctcttaatctcttcccagaggccatcctaggcaaaccagttgcagacctgagtccctctggacagggcctcttgatctccttcaaagccttcttgcagaaatgtcctctgagacaggagaaagtcaggtttccccatttccatggtttgtaaccctaactcatctgaactgagagatccttagggagtagaaagtcaaggctggcatctccaaagctgcataaatctctcacctaaggaacatcatcatttttctcttgtcacaacccttccagcctaatatttgacagctctgatcgggtactgtccaaacatttattaaaacattttaaatgatgaatatatccaattattactattaatgtagctaatactgactaatgagggggaaatgcaggagccagtgtcccgcaattcattacccctgccttgtcaacaattcaaagcccgaaacctaatcatccataccgggccctgttatatttcacacgtcacttttaataagtcactcagtgcctataaattaatgtaacatgtcggcgtttatgagtgcagctttgtcgccgttaacaaatgatgttctggcccactctacaacagctaggcagtgacgaatgatggaagatgatttctttccaaactataaactatacactggggactccagtaatatatgtatatatatgtatatgtatatatatatatatatatatatatatatatatatatatatatatatatatatatatatataaagccacatagtgcatatgtctaagcacatacagacataccacacaaactaacaaagcatgccaacatacacagaggcacaaacatggaataaatatgatgcataatttttcacaaagagctgtgcaatatcccctgtactttcttctctaaaaggttaaacatgcagcactaggaaccatgacagtcccataaaagtggtcaatgttaatttcaaatttgttgtaagttctgctctattgtgcctggccaggtttcaggatagcctgacatcccagctaataatggtgtcaatgaaaggagagggttcacattacgcctagaataccagtaattagaggaagggcctgagtttttatgacaaaattggtggttgttgggtgttgggttggaagaggttacttatttgcttctaaacagacctgaataatctatatcttcttctaagccatgatttcatatgtgaaaaaatcattagtatgtaatttgggtgtaactttacctccgtattttcatctaactcaaggttcaagatgggatacagtgtttctttaactggcgaccctttttttgtttctttgcccctgtcagaggcagctctggaactacagagacactttgggtctttgcacacctggattgaacaccatacacagcgacaaaactctaggggcaaagaaggcctgagatttccttgggaatcaatctgcatacaaggtcacagctctgtgggctgagttcttagggcagacaattctcacctgccttagtttgcgggaagaaaacacctctccatttattggagtgtaccaagacttccatatggttagatattttattgttaatattttctttctccctgtaatcctatcttagcttcagagctaattattacaatggacataaaaaggaacaacatttgaaaaactagatacttgaaaagtttgaagtggattttccagggttgctattatggctcctctttgatgagcattcgaccatttcagactctgccttcatttgttttttctacttgcctacaaaactcagaagatagcattaccatgtgactatacaaatcctacaaaagcttaattttttttttctctaaagactgtatatctacatctggaaattctttatgtagttctgacacaaggatttcgctcaaatatcagggacgggattcaaatcagagttccccaagaaacaaacaacataaaaaatggctcctattcattttttttttgccatattcttcattctgtcattgaattatcattaagaaataatagccttaggatttaaatgtctagacaaagattcctgttttataaacccagagtttatagagtttaattttgtgtgtatatggctgagagtttaattctttcaacttatgtgttagagatgttagagagctaaacatgctgcctaaaaaaaaatcactcaaaaatttaaaggaaattaagaagagagctccaaacatgtttttattacatgtctattaggaaagtacttgcattgcacttcatctggcagggaacatactgcccagttcagtcttttgggtttgtttgtttttttctgggatctgtgaatgtctagttcaaggactaacacccttcacgtcccctaatacattagagagaagttcacagtgaagaaagggcagtgcttttttgttatgtgaaaactgagcaacgtctgatgctcaagaaaatggcttcaaagtacggtctggagtcacacgtcacacagccacacatggtgtgcaacagtacagactagcagaccaataagtcaagtgattacatggtgcccctgtctctgggtgtttgcacaattttcatgcagtgaagatgctgaaaatgctgcatagtggtcaagggccatggcaatgctttgctggggacaaaagggtgggaatgtcataagcaaaacttgaaatgatttcaacatggttgatgttgaaagcattaacttttaacctactcttgaaaagattcaaaatgacttcatagaatcaactaacagcaatcgaaggaggtttcatgttctcttgacaaagccggaccaagaaagaaaagaaagatgatatgtacttttcctttggaatcatgaaatgtggcattcaactttttctccgtccaggactggtgttttctgcagtgtgtcacaggaaaaaggcacttggtttagggtgtgtacgtgtgtgtatgtgtgtaaaagtaaggcaaaaatggaagacaccagaactctggccgccgtatggaagaaaatgcagaatgctgtctgctctggttgctctataaagatatcaacccaggaggagacagctgaaaagtgcttttcccagcagagagggcttcacaaggcgcagtgagatccccctgggaatagaacaatttgcataacaatgtgctgttgcttatccgggaggacccaaaggatctggataccctgagagaatacaccacacttttcagtccagcccactagagagaaaggcattgccattcagtctgtggggtcacaggagggaatacccgcccccgaccttttaacatcatttcattgcatgaaatccttgagaccctcctatttcctcttctccaaacattctgttttcctatattagtagtgttctcttttttttccctaattggcccagatcctaataaacacacacacacacacacacacacacacacacacacacacgttttgttgtttgttttgttttgttttgatcttttgggacctacccaaatccaaggtctccccatccccttttcacttcactctgccttttcatccaggccagtgacttggaatcatgcatgacatattcactacttgatcttgtgaacactggaaagactgtctttattctttcatgaagataattggagagtctattctctgtgctctaggggatacctattttgtttgcctttcttttgaatgagaaagaggcatgtctgagggtgatatttattcctgctgttttgttttggggaccaggtagggaggctgttgaagaaagccaagaaaacccagagaaggcaaaactctaattccacaatatgccaaatactcataaagagcaagatttcatgctccaaagctgccactgtgtatcaacaagcagtgcacttcatgccaaaacaaagttttttttccaaagcacattggcaaggactagatttagagagcccacaacagaagtgtgcatgccctccacttcaaccaaaggcaaaatagcatttggccatgttattaaaaatacactgttcataattgaggtgatgtgaacattctgctcccctcctccagaaaggactgggcatttctggagttccaccattactagatgtcataatttaggacaagaaaataaagttagtaataggaagcaataaaatttcatttagcatctgctatagactgtggatgacattaggcattttcaaatatcatcaccatctgaagattaagaaatctggccaggtgcagtggctcaagcttgtattaccagcactttaggaggtcaaggcaggaagatccctggagctcaggagttcaagagcagcctgggcaacatggcaaaaccccatctctacaaaaaattagctgggcactgtggtactcacccatagtcccagctattcaggaggctaaggtaagaaaatcacctgagcccaagaggtcaaggcttcagtgagccatgattgcaccactgtactccagcctgggcaacagagtgagaccctgtctcaaaaagaaaaagaaagaaaaaagaatgagaaatctgaggcttgcccactagcccacaaccacatagcaaggtctgaaacctgaaccaacatctggttcacctaatgccctggctctttgtacttgtttatatttaacatagagtggacagggcatcagaggactctgcaagatcatgaggagaatatttgaaggaatatttagtctgatagagagaagtcttgatgaaacaagatagctgtttccaaatatttgaactatttactctttgtacgaagcagcaaacttacaattaaaaagtctataggacagactgggaccaaagcctgaaaattcagtcaagaaggaacactctaatacgacagaaggaaaaaaatactctctaatagtgaaggggctgccttacaagatgaattccctatcacagcacacattctagaaaagaccaggcactacttggaagaaatatcagataagtgaggtgctcatctagctgctactactttcccttcaagccttagggtctaagaccagcataagcttggagaggttcaacttctgacatgcagattgctgcagaagacaaattaagacattaaaaccaaatgccaggtagttagaaaaaacaaagttctgcatgagaacaaatctgcatgaccatcccctcctgacttaaaaaataataattaaataaagttctagacacatttgggctcccttggaaaaaaatgccatacaattgcattaacacaactgttgctattaggaatatttacctaataataataatatgtagaacaatcaaaatagggaggaaatagccagaaagtcattcttgcagatggtcacatgtctagggaggcagaaataagaaatgtttaacaagcagtcttctttaagttatgacaaatgatgctctgactttataaaaccccctggccaaggatctgaagtccatccccataggtggaaacaggaatgatagaatcataaaatgttacaatggagaacctctaattcagtcatgtctttccacagatggggagatagaagctcagatagcttagtggatttgctcaatgacgcacagttcattcattgcagagttggggccacaaccttcctcagacctagccttacgatccaggatctcttcctacagcaatgcaccaaattcatttttctagaattgaactaaaaacaaaacaaaacaaaaacccagacagcaccagcttggaacagtcaggtccaatgggatcaaagcctaaaagaaggcaggtagttaccacagcaggtgcagagcacttggtggaattgcagccatggcttttctaagaatatggaaagtcagtggaaagaattttacaaaacatacttcacaacctaattctgttgccaaaacagacactaataagtagtcaggagagatgcagtcatcccaaccccatgatggtcttaagcttccctctgcctttagactggactttcctatctacccaagtagaaaacttttggtcttttcttttctttttttttttttgagatggagcctcattgtgtcacccaggctggagcccagcggcatgatctcagctcactgcaacctctgcctcctgggttccatcgattctcttgtctcagactcccaagtagctggaactacaggtatgcaccactatgcccagctaatttgtgtatttttagtagagacagggttttatcatgttgtccaggctggtctcgaactcctgaccccgcgaactgatccaccagccttggcatcctgaagggctgggattacaggcgtgagccactgcacccggccctgtttttggtcttttctgattttggtgatagaatggaaggaaatgagaatgcaagacattcatatctgaattttaattttaaaacctgcttagcacacaattcactcttgtcaagtgaactgtcgaaagctcctaagaactacataatttattcctgggccaccacccagtgtacaaacataggcatttactctgtgggatacactggtagatgaaacaatgatcttatttcatcttcaatcatgcttcacttttcttttctgtgtgtacatttttggaggaactattagttaatcagagccctgctacataccattaattcagttcaatacaatgggtatgtgctaagctgttacaatatgccaggcactgtccctgggtgtagaccagaaatctcccagagcacattccctttgaataacaaaacaagctaatattttggctttatcaaaagccatacctttgtccagggctcttcagtcaagaatgacactaatttttttttttttttttttttttttttttactgctaatcaacattacaagatccacaatggcttaaaacaacctgaaaaccttcattcattaatgatagtcaatttctccctcaactctgacttactatagtggaaatgggactcctgtgccattagaaatgattttcatcaatacaagtgaaccttcaattagaaaagccgactgaccagaaccctagttagtggggattttactgtctaaagacaaagataagtgaattgcccaaaagtgcacgtctttacccccactagcatcttagattctacatcctctttttatgcatcactcaacccttccattccctttgactctatagaatacacagctctctagagtgattcgccacattttggcattgccacagtgttccctgaacttcaatcactcataacagcaccttcagagtttttgccatttttacctataataatattcacttaatattttatgtatactgactcatttccttttatccctaataaacttatttttgaatgacactttccattcctactatgaatgaaaacccatactacttatctgagataaaagaaagcaacataattaaaagtgaatgtaaacaaaattttaaaaatttactaaattttggctagatactgttgcctaccacagggtactcattgaaaaccaagatgaagcaaatgtgagggaggtgttaaagacagattcccaccaaacaaggactttggcctcatcaggaaaactaaaagaaattttaaataagatgatttccttatcacctaattcagtgctatttaaagacacctacaggtaccacttaaaagcatccagcagtatgtaggtatacagtgagaagtaccaccaccagcagtatgcagatcaacagtgagaagctgcgagttggctaatataggtatgggaaagctcacatcacacacataagggaacacaacctgtatgatggaaagaaggctagagagaaaatattgatcagcctaaagagaggagatggaggattgtttgttagtgatttgtatagagttggaagttcctaggccagaggaaaattcatgagtttccactggtagaggagaaaactagaatatatcagcagattatgagctgccatgaatttttctgtttttcctctttaaacatggatactgataatgaaataccagaaaagtacactctgtggtgaatctggcttttgatatttattaacattaaatggacttttgcaactaaataacaccaaaaaaagagagaggagatacaactatagtatgttcctatagcatgttcctaccctcaaataaatatcaagaatataatctatgtggaagaaagatcaagttggcagaaaagggaaaggagaattaggaaagcaaaataaataggtgcagagaaactgtcacacaagtgaattgagactcagtatttaattagggacagcaagcttgcaaggctcttggtaaatgtctaccgaaaccaaccacgtgttggttaacactgagacatacaaactgatcaatagtacaaaacaaaagggctcaggtatgcatgtaaagtcatacatcatttcaataaattacgctgtgtgtagacaggttttttttagaacgatcattctgagatcaagagctaaatcatctcagccacatcttgatttctgcaagactcggcaggaattatgaggcttaacagcattctgacaattagcatattataaatacaaaaatgatatattaaagggagaggaggaaaaaaaaggccagtgttttacacctacagtaatataattccactacttaatgcaaagtaacaggcctcagagtgtttgggatcctcttgtatggtgttatcttctctatcagtaaatgagactatgtgaacagtacaacctataaataattcaaggcctgagatggcaattatagaaccatgcacaactagcatgaatattttatgaaggctaaaacagctctcagaatgaatcatggagagatgaacacacacaagcacacacacacacatacacacacacacacacacacacacacacacaccaggcagttttggccaaattgtatttccaagacaaggcctctctttgatctctagaacacctttattttatggaaacagtgatgatagttacatatttttcttttcttgaatttatttcctaaaatccaaacagaggaatgaaggtatgaatttgtcaatagggtagaggagcttgaaaccgaggaagaaggacaaacaatttttaacctgaacttctgcagataattccaagtgatttttttaacctttccaaatggactctacaaaaagtaccaagttccaatgtatcaaaattgaaactgaaaccagtgtcacttcatgactcaagcaagagcacttcctatccgaaaacttccctcatatacataagcttttatttctaattagtccttgaggaatacctgtaatccctgctttcactacattcataagacaaaacaaatattactgagccataagcctgagcaaacaagctactatatttaaaagtagcagcccagatgtcatactctattaggaaatgagcaatgcctaagttctgagctgtttctgtaaccaaaggatgtgcacagctgaaaaaaatgaaattatatgaattcacgtcttgatttccctgtgcaatgtacttgtgctatttgaataagagttaatattcatttgaattttacagagattagcattcatcatttttacctgcctcctatttacatatacccagatgatatccatgtggttacacaaaacaccattgttttcctaaagtcaattttagcataattcactttcttaattacaacctaaaactgtaaagacttttcccagtccctccacagaagaatcttaaatttatgacccttttggtatgaatatgtgtgcttttcacttcattacaacaacaagaatggaactttaggactctaggatcttagcacaggaaggaaccttagatatcttctgatccaactgcttcattttgtggatgcgaaaagtttagaggccaaaaaactgttccatggcatattcggtatcacatgactagttgaaacactacggccaataatataaaatataataatattagcaggaacaaaaatcagtaacaacctcaagtatttacagtgagcttgcaataaagcaggcactgtactttgcaggcactgtctcctttagcctcccaatacctctaataggtagtattattattgtctccatttaaggatacgaaaactgaggcttagagagattcatgtatctctaccctcaatcccacgaccccttttccctctagtgtactcttcaggaagttacatcagaattctctatttgagtcttggctagaagaaactttcattacatggaccagttattactggagacttcctagatgggagacacactgatgttttcggtctcactgagcctgctgctttgtgagacctccgagggcatagagagaaaaggaagctcctacaacctgtactgcaagaacttcaggaaaaacaacatctttccataaaaagtttcacgttgccctattattcagtttaagaagttcagagccactgttccatgggcctgccttttgtgttcaatttggaggcatgaaaatacctttagaatttgtaaatctcaaggcaaccgagtgaaacgccacctaccgcagcagctggagggcaggccagtgttatgctttgatagccccctttcgattgtattaatacaaaggaaattaaaaaatagcatgattctctccctttcttctgctcatgcccagctttggattttcataataggagggtaacatttagaggtcttttttacattcgtgcactaacctggtacaaatagaagtaagctgtttgctgttttcttttaggtgctccaaaatatgcatgactttagaccacaaagtcagagaaataccctgttttattgtaaaagtgtaaagaactgagcaagtgaactggcttttggcatgtattttcttgaagcctctatctccaccaactccttttcctactgcacccagattcacttcagttttcccacagttccaagcccacagttccaagcccaactctgagaaggtgctgagaagaggaaatccagtaactgaataacagccactctctggactcttgcccctattctttttgtatcctctagggagctacagtgtcacttactaggtgcatgcccctgaatgggttaatcttttcttttccttatttcgacagccatgtttaccttttgaaaaggcgagcagaggcacagtatggcactggagtgctaactgctaacacatgggctatgctacatctcggcaaaaatttctctcatacttgtaccagcgtcccagccaagatcaacaccatgagtttgattttcttcatcatgaattgacagcttatttatctccatggaagaactttctaagccctttaggcacccaggcaacttagaaggcattcagctgactgttcaaaaatattattgcttcatcaaaaatagagactaaattatttcattcctgttaggctgttctctttctagagagacattttagtgaccctgagttatgataatagtttataaccaaatactacaaacgcacacacacacacacactttccaattggtattatattttgaaaacctttttagacctaatgttatgctgacagtactaagttttgtgaggatgcacaatttccatggcttccttttccaataatggttgggaagcctcattagaataattaggaacgaagtcatttccggtcgccatatattgctctggaaataatagcttccagtgcctgcaaaaccagcaaggaatagaatgcatatgccaactcctgagtcacaatggaaaataacataactccatgttgctgtatggaacctaaaccaactgcaactctgtcaggtgctcacgtccaaagaaaacttgtcactgctcacgggagaagtttaaatcaatttgcaagcagaagacaacccagaaaacactaactaattgattatgcaaatgcagaatccaaaaagtattttccctagtaataaatcacctatgactttgcaacgaacagcaatgagaatattgacctgctttggagtgaggacagatctgtatatataactatcagcaggaaaaaaatgtatatgagcatgagaaagtggcatgggaagagagagaggaaagagaaagctttactggttagattggagggacttgtgaccacagagcctcccaaatcaaagctagtgcccatttctctaaaagtatctcttcaattaaggcactggtttctggtgttatgacttccacataacagtaacaagaggaaatatttactgaatccttattgtgggccaggtgccctgctaaatgctatgtctcatttaatctcattatctcatttaacccccacaacaacactatgatgtgggtatatactagtactgccttcatttttcaacaaggaaactgacactcagacgagtaatttgagcaatttccccaagatcacacatttctacttctagccagccttttttttttttttcctgagacagagtcttgctctgtcacccaggctggagtgcagtggaatgatctcagctcactgcaacctccgcctcccgggttcaagtgagtctctttcctcagcctcctgagtagctgggattacagggatgtgccacggtgctcagctaatttttttatttttagtagagatggagtttcaccatgttggccagggtggtttcaaactcccgacctcaagtgttccgcctgccttagcctcccaaagtgcttgctgggagtacagctgtgagccactatgcctggcctagccagcctaaatttgtttacacagtcctaaagcccaataaacagaaaaaaagaatagattctcttcattccaaatttgcaaccaaaactcccaggattttttttctcctttggtctagtctacatccctattattcactctgctgattcctgccatccactctgccttattatcatcctctatgccccatctgttttctgaatgttttgtttgtaaacgtctggcataggatggttggttcagtacagtatgtaactgggcacatatatgtgatcaatgatcacaatggtgaacatagaaactggaggcatcttatatgtcttcaatgtggcaacatatgattctaccatacacagtgtttgcaagcacatacgctcaaggaagagagtacatgcgtcaagatgggtttggcaaagaggctgtcctgagaaagaggaaagttcaagtggaaacactcttgggtgtttctacctgaaagataatgaatgtgagaaaagaaaggcacagagcaaatattacagaacctcacaggaagaagttatatagaaaagagcattgtgtggaaggcaatgctgagaagaataaaatcatgttgaaaagttgtaggcattgatagacatttgggatggttccaagtctttgctattgtgaatagtgccgcaataaacatatgtgtgcatgtcagcacaccaacatggcacatgtatacatatgtaagaaatctgcacattgtgcacatgtaccctagaacttaaagtataataataataataaaaagaaaagttgtaggcaatttgagtttattagaggagaaaagaaacggacaggagggcaccccagccctggagtagccccgattttgaatctgtgtagtgaatattaatcgctcctatggttgaaatacttgagagcagagattgggccacacgcctttctgtgtctgtctctctctctcccgaaccaggctttctggaacatcagggcaggaagggtgtttagagatcgcctggtacaatcacctcattttacacacacagagatggaagtgcagatgggttaaaggactagccccaaatcacacaactaattaatggcaagaagcccagccagcacaagaaaacaggctattgactttttgccttgtgcacttcgcaaatcgccccacggcctcttttgggaggctcttgataaacactcacaaagcgctgtcaaactctgggtgctctgagaaagggaggatgagaagatcccacaagtttcccacactcagccccccgtctcatgcagatactccatcatgcttcctccaccatccgtgacttgctcacaagggttataaacttgataacctgagaaaccgcagctttagaaaaatggataaagataccatgagagagctcaacattaatgacttttaaataagggtcagttggaaatgcggaagaaagaaaatttcgaaaaatttattctcaatctggccataaagattattaggtaagatgcacactgtcttatatacacgctggtacattcccacactcctctgcccagcacggcactaaacatatgtacatatttgttcgatagaatccttcaaagtcctctcccttagagtcatttgcagatatttctcaaacatgatgcagatcaaaatgcaatatacaaagtcaggtaatgtccccagcatcaaattaaaatagctaaccggccaacagatggcagctgaagcaaatcgcttgccgatttaaataagaacggtgttcggttcagttgtgcacatttttctagacagaagttgactgctaaatgaaatcaacttcagagcccagttgtttgtagtgtgaaggggaaattacaaaaaacaaaaatgccttctttgttcctggaacccggggtgattcacaagcacggacatcccctggtcttctgattttaaatcactaaggtggaaatgtcattcacccaggaggttattgattaaaataaagagcaggaatgttttctgcatgaacctcacttctgctggcaatgttacatcacttacagactgcaaagaagaagaagaggggaaaaaaaaacacagtaaagagaggaaggttcagaacagtcacagactgggaataaataacacaaagaaactctggggcctgaggacagaagcagaggttggcattattttacattagaaacacttcgtattcaaaacggtaattgatagcagagaagtgttgggggaaagagccactcgcgttcaggcaggctgccctgccaatcaaactcaacctttctttgaatgaataaaagcttcattgccctattatgctgatacagtcagacaggactaaagtagcctgtttgtcaagtttatgtgaactgccccaagctacttagattctgacgcttaaataatcccctcaaaatcacccgtgattctggatacagttctcttttttagcaacgcagtgtaaattttaccctggacttgcctgcccctggctacagatgggcaagagggggccatacctcctcctctgtgttagtacaaggagggcatttggctgtcttttgtttacgatctgctgcggtgctgaagtgctctgcacacaggtctgtatgtgctgcgggctgtctgaagcctgcagacattcaccagattctatattcccagctctatgggaagtcagcatagagaagtctccacatcacctctcttgtcatcagggatatgggctaaatagcaccaaaccttgcttgcaaccaagtgatcaatgaaaactgaagagcctgggggatgtttgcttccttggtcccaatccttgtctgcttccagcagcaaatcagtgatttgggctcagggaggactggaaggttacactgcaccccaaccagcaatgcagggattctcaggagtgacttcaggccctgggggcaggaggggctcagaagagctaaaaatgaatctgtcccccacctcccttcacagggctatgtgtctttgacttccctagttgcttctgcttaaaaatacatgtgacgaaactgctttgtatttgcaaagaaggagttgtgggtaacaatgaacatgcaattgggctggaaatagatttatcaggcttcaaggattattgtttgctgagagatggtacacacattactatttcacagttcagctatgacattattaacctactgtgcaaggattttattgccagattggtccatttatcaaaaataagagaaactcaaaaccccataaggaagttaacatttcaagcaggcttggctttcacttaacaccattaatctatctatttacacaagagcaagaaatgttcatttagtaacgtctctccatttggtataaaagcagcaagtcggtactggatgcaagcatgcgaatgtcatgctcattgtcacaggaaaaatgagtgttttctccttaaaatgagttggcatccccagagcctgccacgtattctgggctgcaatatgctagatgccaggtactcaaccagcaaagggataatccaagtcctggaacatttacagacccaagctagaaagataggtgttggagaaaggtatacagaaattaggagactttcctaattattttgtgacaatacaagataaaaatatgcaaagtttctcgaaggaaaaataactgtgtccaaccttatcacaacaatgagtccttaaaataaaaaaggataggaaagtaatggtcaacaactcagtaattccaagatgcaagtgatttgggactggaaagatggtagtcttttaacatatcttctccaataggaggtttcgatagcacagggatattcatggagcaatacatgttgctgtgttacacaccatcgagcacctcgcactgcaggtgcaccccaagacggtgcagagccccgctgttcatgtgtgaatctgcatgactgtgttaggaatttatttatctgtgggtaaagacacaggccttgaaagaaagaaaaagggggtgaatcattccatttctatttgttaacctctcttgtgtttcttccttcattcctcttgttttactatttctttatggaagaggagacaatccccaagcccataaaatgcctgcagccattttgatcctatcagtcttttttcttcaaaatatgtatgtaatgttaaaaaaaaaagtgaagggaagctgtcaccagagagaggtacattcatttttgaaatgtgtgtatctgtgtctgtgtgtatatacatgtatgcatagatacaaatgtttgtgtatatacacacataatacacataaaacatgaatgtccctttttctggcgacagcttttcttcactttacaggaacatatatatacatacatacatgtgtatatatatacacacacatacatgcatgtatatatatatatacacatacatacatgtatatatatacatacatacatgtgtgtatatatatacatacatacgtatatatatatatacacatacacatatcagtataaagaaacgcatacccaggtgatgcagagagttaataacacattcagcatgccccaccgtgcactccctactaaaaggcactgtgctcgcttgagtgctaagtgctccagagatggtagccttgaatcagcaccaggaactatgctgaggatattacaaacattaccatctccaagtctcacaatcctatgagagtagttagccccgttttacaagtagggaagttaaggctttggcaggttacgcagcttactcaattcacagctgataagccactgagcctgggttccaccagatgccaaagcctgtgtgtctccttccctactgttcaaagcattttactctggcactgtgtgaagaaccaaggaagatacgaagataaaaaagcggtccttgccctggaggagctcacagtctattataagagccatatatactactaacaaggcagaaactaacaaacctcccagcacagcaaaaagttaggaagcacatagcaaactcagcactgccttgggaaccgagatgtcttcagggaagctgcgcactccaacacacacagcaacttttctctagtatgaacctgttacagcaggtacacaaacaccctgcaccctgtaaagtttctggcacaatactattatttgctaacatttttctatcctgacagcttaagtcactgttgtcatattttcagagacttattttggttcaaagaacagaatagctgctgtgacactaaatcaagtgtcatccatttcaatttgatcagaatcatcttagcaaaatacagtaagtgaggcatagtggaataaatgaggaggtgaaagtcagagagatctcggtttattcctgactctaacaagtacttgattataccctcttttgtagatgagaaatatgaatctagggagttctgtgaacactttaatacacctctcaaattcttttaatctcacttttctcatctgtaaaatgaaaataatacattcaataagcatctatttagcactaattacttgccaagcaccatgctcactgctgaagacataaaaatgaaaaaaggtaggcaaggtagccctcaggacaggggaaagttgaagagacagctggaatgctgtgtgagagtgcttttaggtggaacacagggcacaacaggaaggtgcaagagacacacccgactcagcctttgggggtatgtcagaaaaatcatcatgacagagtttaatcctgagtgcaattctgaaacagcagcaagaacaatactgatcatcattattatactactaatattaaattaattgcttactctatgatagaaaatatcttacataatttatgtctcttcatccatttgtgcttattgacaggaaaagtaggtagtattatccataatttaaaatgaggaattgagacacagagaaattaaaatttacccaaagtcacccagctactgagagggagatccaggattcaaatgcaggtggcctaactctacattcatacccagagcttctgtgctatttgtctcacaaatggagagaaggggtgctccaggcagcagatgcagcatgtgcaaaagcacacctgcctgaggttaaaggcccactcctgcaactgcagggagctcagtgtggtaggaggccaggtctatgactgtttggggatgcagaggaaggagacataagcccaggctgaccactgaagacacaggcaatttgcttatgcatctaaagttcatccagatgacaatgggaagacatggaaaagtttcagccagaagatgatgttttagaagcagccctctggctgtcacgtggaagacaaattaaaacggagccacataaaaggaaaggggaacagtgagaagacagtcacagttgtcagagtggaaaataaagaggacacgagaaagagaagtggacgcaggcaagaaatgttaagtcagtaatgcggtcaggagttaatgacagactaaataagggtgacacccttgctttgggctgatggagctgcctgggtggtggtactattggttcagtgatattcagaggatcagttaatcatgcacacattgcaggggtattacaaggagcagaagcaacccacacaatcatcatcatatcatcagagtttattgagcacctgctatgggccaggcactccactaccactttgtccacctctgctcatcaaatcctcaacaatgactctgcaggaaagatactggctccattacagatatggaaacaaggtccacaatgtctgggcaagtcatttaaatgtcatcctaccaagtgtcagaattaggactcaaacctgggtctgccaagcaccgaaggctatgtcaaccattattctctgccatgatgttctctgttgttttcagttttctcttcctagcatagaaaaatgtcagaaaatatgtgatcaaatgtagcaggtatattctgcaaagtacctgttgaaattgcttctctgcctctgccctccctacaacttcccccaagtctcactccaagtacagtttgaaggaggttgttctaaggcaggaggaggaaaggagcctggccttgctggcagtgctgggtgtgaatgggaaggtgtgccactccctttgcccaactcttctgtcctaatccttagaggaatccatcaattcctaccttccagattatctacaaggatacagctattgtctatgcagcctgttagaagcaaagtcataattcaaggcatgcctgtcatcaaaatgttgcattggaaaagctgtgtggaccagtggctaaaccacaagttttacaaacccaacagacgctccttgcattggcaaatcaaaagctggtctgaagccagatgctcagtgtcttccagcaatcctcatcaataactgacacattccatgctatttctgaagtataacattccaagttagatagataggcatttgctctgcactggtgttttcgagtccaaaggattcacaaatacattctttagattaaagcatttctgtacagatttgggggtaaaagagggttttcaccgcatggaactccaatcccaaaccctctgtctatcttaaactaatataaagtaagtcatgtttctgtttctctttcaaagatttacttctagccagatatttacataaggtaatgctgcctacatactaggagattaacaacatgtacagccagtttgagaaaatgcatacttattttaaattcaaaacacagatgggatgattattttctttacaaaaggagacttaggctgggcatggtggctcatgcctgtaatcccagcacttagggaggccaaggcaggcagaccacctgaggtcaggagttcgagaccagcttggccaacacggtctctactacaaatacaaaaactagttgggtgtggcggcgggcacgtgtaatcccagctactcaggaagctgaggcaggagaattgcttgaacccaggaggtggaggttgcaatgagccgagatcgtgccattgcactccagcctgggcaacaagagagaaactccatctcaaaaaaaaagagagactttatattaacagaagaggacaccacagatgtagaaacctagattcttcaaaggccccagtttcaaatattcagtcttttttgggcacaccaattggcaaaaacaaattggtacttaacatttcttttcaatgactcagcaaatgaatggcttctgttctgttgtcgtaacttttttagacatataggaccatatgtctctattttcattcgaaaaatatggccaataaaacctaacaggtacagagacatctgctgaattataacagccaagccgaagatacatcttttccttgtcaataacttagaaattctttgatcctaaaaataaaccacaaagtttaccatcaaccaccctagattttaaaaattggcttcaatgtatacgtcctttcttcagaaacagccattgtagaaaacaactgtaatgttgttgcaaaattcttgggcctagaattagtgagcttcacgctaaggctcatctctgagatgtcctgtttctcagaagcagttttaactaaatttcatatttaataaatattaataatacatactattaaataaaatgtatacattttgccagacaattcttaagaaaagcatatgggcaaggtaccattgtgaatgacaaccttcacggtcaggttccacctgcatcctcaacaagcttctctgtgattggaagcgtcttttatactcctctatttattttcactttaacccagtattctagaagtgatttctactccattttctattgcccagtaagattcacttcagtgggagactgggttatgaaaaaatatatttaaagcattcatgtttatgattcaaagagtggggggaaaagccttaccttgagctctgaaaagtttgccaacacatttccagggtttaaggtgaagaatgatttctgttttgcctcaatatgaattgcaaaattcaaatgattaacctcaccatggggctctctgtttccagggcaaacaggagaaaggactgtttctctgcttaaacctctaaatcagtctgcttggagtaaagctggcaggtgagggctcggcagaagtcacatccttttctcatcaaaaccttacaaattatttatttgattaggaaagagacgccacaaaaggcaacatatattgacagttaccaccactaagttctttttccgtttttcctagttggtgaagaaatgaaagagcctcttaaaattcactcctcattttttattcgtgtgtgtgtgtgtgcgtgcgtgtgtgtgtgtttgttgtgtgtatattgtggaatcaatgtctgacttaatatcaaaataccagaaagaatactgactatggctagcatgtattatggctaataaaatgtaactgggccaaattgttctcagagaaagttgtgtacattcattcctaagaggcaagaatgtgaacctagtatagagtcataaaagtaataaatctacatagctacagaaagctttcacagccaatgtgctaaatttgttcagtgagttgtcaagaaaacattttctatgactatatcttttcaatttaaaataaatacctccaccagatcccagtaaaaattgacaaattatattaaagaccatggaactggtactgatacattttgaatagaggagaagtctgcagtgggaaaaacaataaccaaaaaggtttaatttgtgtctcgatatgaatttactccttcatatctccactactgccctatcatccctcccataatgcaattctcctccagcctctgccactccaggaacactcaccaccatctccatctattaacctagggttctcttcctccttcttcctcttcatcttcccaccagattttcctcctgctatcttccctgtcatagatgtgtcctctcccaatcaacacaagcagaattttcttccctttacttctcccaccaatatgttgaataattctcttcctttcctgctcccatcccatccatgtatttaggtattaagttcccactgattactttagggttttttccccacatatgttccccactgagaaagacttgtaacacttgtaacactaccaaaactaccctgatttcccacaacttcaaactccaccatttagaaagtggccaggattctataatgctaatttaaacacctaatactgtatgcctggcctatggtaagcattcaacaagtacttgtggaataaaccacatctaaatcaatagatggggatggcaagtggtgaggatggggagacagtacttgcaagtgggatatggcaagaaggaccctggaaaattctgctgaggacagtatttagccagcttttcagttggagcagctaaaggatccactttgtcattctacttaggtttcttgaggttaaaattttaaaaataaatttgtacaagtcctagcaattcctctactgcttaatgttatatacaggaaaaattaaggaaaaaaacctcaatgatggcaaagctgagcagaaagcttgagaataagtacatctaagttatttatgatgctgagctacgagaatgggattctagcctctgttatccctaattcattagtgaaactggacaactaaaggtttctagaatctagagcagaaaagcttcacaaattatttgctcagatgttccattttacagattagacccagagggattaagggaatatgtgtgaagtcatggaatgagctaccagcagagtcaaagccaacatctaggtcttctctactcctcttctgcagttggtcctccttatctatggggtttcacatccacagattcaaccaaccacaaatcaaagatattcaaacaataaacaatgatacgaaaataaaataaatgtttaaaaatacagtatggcaacaattcacatagcatttacattgatttgggtattttaagtaatatagagattaaagtatacgggagaatatgcctaggttatatgcaaatattatgacattttatataaaggatttgagcatctgcagattttgttatccaagggggcatgctggatccaatcccccacagatacggaaggacaactataataatatcctcctgtctaatcccctaggttgttgtgagaatgcgtaaaatgaaaatatatatgctagatataaaaaaattgtgcaaagctaaaactgtcacacagggatattttaagagttttttccctaaatgttacacttacttaattttttaaaaatgtttaattcctgctgtctggccactaggcctttattcaatgtggtaattatgctttcctacaaagaatgtcaaagatgatccgcatttgcttattcatttaacagcccttatcctcatatatttaattccaaaacaaatagccaccagccacttctacatgcctctcagaaccatgcaaacttctcaacgagctccattaatcttttaattttcttttctaaagacacagacctttttcctgtctgaaccatgggactcctatagcattatcttacatacctcagtcatttctttctcattgttacaaatggagacaagaactgagagcagcattagagtaatttcctccaggttactgtatattcaatacttctatttatacttttcattttgtctgctgcctttgtttttggtccttccccgaagcccccgccaccctgctgctaagcctggtatcaaatatacaagagttttatatactgaagttgagatgatgtcattttccctttacttgggaatggatcacttttgaaagtgtaggttttctatttaacattttaaaataaaactcaatcagctttgatggtattagttctacctccttttagccaagtcctcaggaaatgctttactgcatcctgggctagtgtctaccttattatggaaactatttgttttcttccccttgcctgaaacatcaaagataaataaaacaacttgactgttgagcataagacagattttctgtccactcaggaagttaatccacaagtgaaactggtatgttactctgtcttccacaaaagaatcacaggttatcctgaagtgaggaggtattgaagttcacgatttcccacggtacataatttagttttgtgtgtgtttgtttgttttagtttgagcacaacaatgctttctgatttgagaggttggcatttttaaaaccctatgtctctctcttgccactgccttcttttggcttcaagacatcatttctgtatgtagccaacttctgcagttagaaaactaagtgcagtggtctctgagcaacgaaaattgatttcagtgggaactgtgtccctgtaactgtaggaagaagctcatccttctcttatggtaacaaaatcctcttccctttttattgatatatatgtgtatttttcccctaatgcccacttccctgcaagcaaaaaataaatctctccagcatctctcccctgttatttcctttggattcgaagtagacccagtgctaaagtctggccatttccagagccatcactttcccaggtctcaactttgggctaatctttatttctctggtaattttccttcttagagccagctagtgtatatgcatatatatgtgtgtgtgtgtatgtctatgtgtatatatgtgtgtaaattgtaaattacataggtatgtttacgcatacgtatgtgtgtgctgtagacacacacaatatttagccatttcttggctcagttaagtctccttggcaaggttttgaatgttcaactctctcttactctatagttttccagttcctatgaactagaaatttcttttggtatttcagtttttattcttctggtctcactgacaaacaaatgatgcaaagctcaatattgtctttatttttaaaaaatatttatttatttatttatttttgccaatgagttaccattcacctaagagctccccttgttctatatgcacagtcaacatagcctttatggatttcatccacaattgctgtgattgtgtaacataccagggaatactatcttccaaagatatttcccttcattttattcctatatgcacacacacacacatacacatacacacacatatttatagtccttcctaagtttaatattctattcaacaatattttactcttccaccgttatatacaggttaagcatccctaatccaaaaatctgaggccaggcacagtggcttatgcctgtaatcccatcactttaggaggctgaggcaggcggatcacttgagatcaggagtttgagaccagcctaaccaacatggtgaaactccatctctactaaaaatacaaaaactagccggttgtggtggtgcacacctgtaaccccagctactcgggaagctgagggaggagaattgcttgaacccgggaggcggaggcttcagggagccaagattgtgctactgcattccatcctggatgacgaaacaaaaaaaaccaaagatctcaaatccaaaatgctccaaaatatgagcttaagtgccaacatgacacaagtggaaaattccactcctggcctcatgcgatggggtcgcagtcaaaacttcgtttcatgcacaaaattatctaatatattgtataaaattgcctttaggctataagtttaagacatatatacataaaatatattttgaacttagacatgggtacaatccccatgatatctttgatgcataaacaagctcttaaaattctccatcctgagcagacctcatgatatgacttttcctggtaagacattttacaaaaaaagaaagaagtggtgcactcaatttctattcttattttttattatttttaatttcaagccataatgattttgctcactcagcacctactcgaagcgccccttttactttgattttttttctaacccttactttatacataaggttattcctttggcttcatttctgctagcctgacacgtttcttctttgctgatcttttctaaacagtttatgtcccacaatatttatccttctccctcacacaccattcatttccattactcactctctgatttggctatacccatcatttctgaaatagagaatgcctgaacttctttgaaaatccacatgtcaaaatgtaataaaaatgttttcattgttacattgttttaagagaaatgaatggcttgctcaaccatcagttccaaatttatattcaattttgggaatatatattattaagccttttttctcttcccctggttataaaatactcaacttgactctgtagtcttgcatggctgggattaggagttaaggcattccttataaatcagtgtaatcttcacaacaggacattgctgtatcgagaattcctctctgtattgtgcattttcaattatgttacatgtttctacttagtaagccagcttaattctacgctatgtcacaatattagaacatgtccaggttagaaaaaggggcaatcttacttctcttgtaagttgtttagcctttggcacttataaatccccccaaaacacaggggaaatcccttttccttgcttttaatatgtctttagatttattacatgaagaatctgctcacttaatcctttgctgaggccaaggctcgtcagtcttctaataaaggttccacgaagagaaaggaagaaaacaaaatcacaaaataggtgttcaagggatgcttcaaacttaaaacacatttccaagtatattctccacaagacagacaagaagaggcaggagactttaagttactctgcataaatccagccccatttatcttcagctttctttctagacagtccagtcagggcaagcaagcagggaagaggctgaagggctcttcggggaccaaattacagtttcaaaatggttcttgtgttccaggtgtaggacaatgttatctgagaaatcttacaaagatttggtgttctttaaagagctctgttaaaacatttaaaatgatcaaagattacatcattaaaaaaggagggaagtgaggttgagaagctttatttaaaatatgttttaagcagttctggcccaaatactaaaactcctgcaaatgaatgaaggaaaaaaaggtcactaaaataaaaaattaacatatcctttaaaatgtcacttccaagttcccagcaaacatggcagagtccacagagtattgattgcatcatgaaataatcattaaatttctctatgcatttctgataccaaaatttaataatgggacaatattattctttgaatcaaatctattttggatcttttttcaagcttgagttagggaagaggccattgaattttttttctttggttcttaaaaatcctctctatgcacaaacatgagaaaataaaaaatagaaggcagataaataaaaagtaaaatcttttaatgcctaaatatgtctttatccttttcaggtttatttttctcccccttttttactcatactcctgaaactaccctgggttaagttccatcaagtggcagattagtttccatgatgctaaaaaggtcccaattacttgcggcatgtagagtgacccatccttcaaaactcaaaccagatatcacctcctcgttgttttacaggcaagattagttgctctttcaacatcacagagaagagcaggaagtgtggcagaagaaatataggaacttggccatttactgtgtcacctggacaggtaatccaacgtccctgtgtttccatttccttatctgtaaaatgggactcatgcttgccctgctgatttcaatgggcttttacaacaatcagatgggccagtgcacagaaaagctttataaagtatcaattcgcccacatctctaagccaacagtcccttatctggtttcctttaagaagccaggtatgtttcagaatgcagaaccctttagattttagaaagttaatgttacatatactatatatactgtatattatgtaacaacccatcagtgaaatatataaatatgaacattaaataggacaaagattataatgaatgccaaaatcaatttcagtctataagaatcttgtccaaatttatttaccattgtccaaatttatttaccagctgaggagaacagatgatcattttcccttgtaggactatgaacatcaataataagtcagatgccaggtaggaaatgttggacaccagcactattcattgagcattcattatgcacagagtactcagtacagcactttgaaaaagaataaaaacgcagtaaaaaaataacatttagccaggttcaacagcagatggattgcttgagcctaggaatttgaagccagcctggcaacatagcgaggccctgtctcaaaataaaattgtaacgataatatttgtttggctattctataataaaaatcgtgatgaaaataaagttaatactaatatcagtggacatttacagagtacttactatacgtcctaagcattctacatgtattatctcatttaatggtcacaataatcgatgccaaatattatgcataatctacagacaagaggctgggccagaaagaaggaaagtcatctgccctgcccaggtcagtgactaaagacaatgctatcattctactgggacaccatcaataaaccaaatacttcctgagaggagaatggtaagcaattcagatcaggaggagtgacctggccaaaggagattctgaagcctggtagcctgaactacctaaccagtgatcccttgaggcagaagtggaaactgctcccagcctgtaaacatatctgaagcttgttttccaaccagctgctgaaatgcaactcaacttccaagttctaaaaataaaactcctgagatcagccaaatcatacttttggaactattgacatatacaaacatttcttctcctgaaatgcattcttgattcagcacaaagagagaggcaaagaagaggagtggttaaaagatggaaaggaaaggaattcccaattactgtatacaacagataacaaggaagagaaaaattaaaggcaaagtcaggttgaacaaggaaaggttctttagctacaaagtcaataaaagaaagaaataataatatggattgttaacccttcacagaaggcaagtttcaaatcactttcaatcaaaataaaatattccttaatcacttgaggataaagagctttcaaggaatacggtaccattcgatgtggagaacggatcacagaatttccatttaattatccactgttgaataagatttgctatattgatgggaagttgagttttttttcctcaactattacctattaaattgtaatctccagagggcacaagctttgcccatttcttttcttgtatctcctttatacacgtttctgaaagattaaacactcaataaatggttcattcaataatagtaatcgctaccatttctgaagacctgtaatgtactacatgctgactgtttttcataattctctaatttaatcttgttttaggggaatattattacccacaacttcctgatgaaaaaaatcaaagcttaagtaacttgctcaagaccacacagctaagtggcaaaggctgggactcaaattgtatgatttcaaagttcttgtttctctgatgttgtacatatgtgttgtgcatatttacacacataggataaagtcacgtgggtggttgctttattctccaggatctcaccatcttctttcattactccattaaaattgtctctgtaggccaaatgactccaatagctctttaaaacctcttgtaaaataaatacccaaagaatttccacttttgatatttcatttctctccttggaagatcagaaaaaaaaactggttgcccctacccctgcccacccacctatcctatcccagtggcacaaacagagtttcagagatgtgcccagttcttatagctaaatagtaatggaggtagaatttgggtcccttgatttcagcccaagacacaccgaacacagaggcattttgacagccagttcatatttgttaagggtctattagacccttagtattactgcagggcaactgaaatcattcttgctctcattctattataaagacatatatgaacgtgtatgttcatgcagcactattcacaataacaaagacatggaatcaacccaaatgcccatcagtgatagactggataaagaaaatgtggtacatacacaccatggaatactatgcagctataaaaagaaagagatcatgtcctttgcgggacatggatggagctggaggccattatccttagcaaactaacacaaaacagaaaaccaaatactgcatgttctcacttacaagtggaagctaaatgatgagaacacatggacacatagagggaaacaacacacactagggccttctagagggtggagggttggaggagggagaggatgaggaaaaataactaatgggtactaggcttaatacctggatgatgaaataatctgtacaacaaacccccatgacacacgtttacctatataacaaacctgcacatcctgcacatgtggccctgaacttaaacgttaaaaaaaaaaatcattcttgctctcatctagttgaaagggacagttaacatgcatatgtgactaagaaatgaactgtgcaagttgatgatactaattaaccacaagcaacagaatttcatagaagccaccatccaatggcaaaaagagccacaagacttagcttcaagttcaagttgtgccactgcccccacagctgttttggtgaagtcactttttcttccttttataagatgattagtttggaaatggagaattatgtcttgtctccaacagtgaagagtggtgtgagctttgacagtggaaaatggggatattaatactacctccactggactgctgtgaggaggaaatgagacaatgcacaaagggtactgggcgaggcatctagagggctcaacaaatgctggccatcactatttgccattgaaagatcattgctgattctaaaactgtgtaaaagggaatcttttgttggagttttgttccccagaagaccctaatctcttgctatttaagaaccatgacttttaagtttaccctttgtctttaaaacattttttttaaatatcaaaagcagcactgttattatagtatatatacttagctactgaagaccagagacatctatcttgggtctgaatagcccctggtcttttttgatatctccaggtgctctccttttaccaatatttgcattggcaactgttccacatcattactaatcatttgacatcagacttaagaatttctgacgctgacagaaaagttcttctccctcactatcctttctcagaaattactcattgtagtcaaatgtgcccaagtccctgaagcatatgtaataaaccaccaaccagaatcggaagttctatccaccttcaaacatttgctctaaccttagaatgggatctttctttttatttttgcaatgcaacttttatttttccaaactacccagtaccagaggtttttctaactgggacatttgttagcctgagaaatatagaaaacaattgttgggtataaattcacatcacattttcatttccttcacttctgctattttcaaaacctcagactttccactggtagtactgcactcagtgtggctgtcatccacgcactaagcgggggattatcttttttgtctctcaggaacctcgcttttttattgcagatgcaactctaataggcagaagttgccacacaatccaacagtgaagatttaggaaggatccacgttacagggcagtgaaagactgcctgaggtggtggtcctaccagccctgcaaaaagaaatgtgggaacgaagcttaaaacagccctccctccctacagtgacaacacaacctgcttacaaagagcagcgataacaaggtttcagcccaagatgccccagtcattcctctaatgaatgcagaggaactatcagcagcccaagactgtagacacacagtatactgttccccatattgttgaatacaagatgcgtaagttattcaataatgtatctgaataattacgtgaaaatgaaaattacatattaaactattccaacaggtgccattttaaaataaaacagtttctgccttgcatatgcctagaaaatattgcaattacttgtgagttaaagcacgtacactagtacaaaaatataccaccactggcactgaaaacaggccatggctaaaaccatcctagatgtctaatgatttagcataaaacatatgtgatagtgtaagagataatcctactatgtttacatcttgcttgtgtaagtctgtcagtgggcaatcacgaagcagaaaggcattcccgaatggtgggaatcacaggaagcagtaatctcatctggaatttaatagtctttttgtgtgtgtggttttgatcattttccttttatgagtgccgtgtgcacagactcttgattgtttctgcaatggaaaaagaagaggatgtccctctgaatcccaatgatctgctttggccaaaatcagacaccaaagctgttaacgggaagaacacttgcaatataggaaatcctataatgtaacgaccaatgcaattggttagaaactcttaatacactcccaagttgacagaagatggcagctcccactgacaactacacagccaagcctcttcatccattctatttagaccgaaggaaaatgaagagatattgaatggaatattctaaaagttctgggtggtcagagccatgtgttttaggatggccatttccatgagaaaggtgcggttttgtgggcaaactttttaaccctcttctcttcctaccaccccctacatcacacaattaagaaccgtgggtgggagaagatggattgctcatcgccctcccactctgtggccctcttttggatggcatcatcgaacccagatgacaagctgggaggcaagaggcttccagcagcagcatctggccctctggcagatggtcaggccctcgggttcccggcttgggctccctccagatgtgtctcatgcttgtcctgtgtgtgagcttcctcctaccgctgcaggaaatttttcacgtgaagacattttgaaccagaagaattggcacgttcttatctaagaagatgttcttgtgtttttccctctggggttatattttacaaagatgcctggatccaagaggcatatgtgaatgtatcttcaaggccatctccctggagacctgggcggtgggagaggggagtggagggtgcaaaacaaattatactgtgtctccactcctctatcactttttactactttttccttcctaatgaaatcaaattttgattaacactaaaggtagctcagaagagggaaaaatgataaaagaactgtcatcggagatggaggagggctctttctctctaggcagttctgatttggtaacgacatgggcatgaggcccggaaattgatagcatttgtacaactctgtttttttcaacaaggcagctaccacctgtttcccactgacccctaactacttccttgacttgctccctagtcactgcctcagcagggaggatcccctgaagcagagaactaagacagctattcccaaattttgatgctaataacaatgatcataaaaatatcaactgcaacagcaactgccatttattgggcaccaggcgttacactaggtactttacaagcctcagttaatgtaatccttaccgcattccaaataagtctacccattctacagaagaggaaagtaaagtggaaataagtaaggtcccgcagatagtattaataattagacttgaaacgtggtctctcttatcccaaagcctaagagatctcttcattagtcaattggagaacagcaaatcctagaatctttactctacaaaaaaccttagagattatccaaagcaaccttacatattactcaagaatgtccctcagattctgtttatgctcttcttttgataatgaactcactgccctcaaggcagtcagtctactcctggactattgagccagaagtatcttcattagccagagttaaaatcatcttccttgttaacttctaccacatggatgttattcttgctctttggaataacatagaacaattctttctctctctcatacatcttatcagacatttgaacctactttctccattgggttgacagtaggataaataccattagttctctgtaattgtcctcatgttcaccaagcaccgctaaagcttgctgtctgaaaaattgccttaattatttatttaattttcctattatttgtctgccttctctgggcttgaagtccatgacagcagggatagtgtttgtcttgttcttggctacatcctcagctgccactcaatgggtagtcaacaataaatgaatgaatatatctgtgccttctggttcattcattccctcattcaatcatttttttcattcttcattcaacatccaacactatgtgagcactattttgcaacagcaaaagtatttggcgataagttcagttagtcaacaagcattttccataataataattatagctaacatttattaagagcttaccaagaaatatttggggtatatgctaggcatatgttagttatatgaagtaggtattcttttaaccccctttttagagatatgaaaagggaggtatagagaatgcagtaacttcccccggtttacacagagagtgagtagtgaagagaagactcaaaaccaagttttcggcctggtgtggtggctcacgcctgtaataccagcactttgggaagccaaggcaggtggatcacttgaggccaggggttcgagaccagcctgaccaacatggtacaaccctgtctctactaaaaatacaaaaattagctgggtttggtggcatgcacctgtagtctcagctactcaggaggctgaggcaggagaatcacttgaaccaggggggcggaggttgcagtgagccaagattgcaacactgcactccagcctgggcacgacagagcaagactccatctcaaaaaacaaaaaaacaaaacagaagttttctgatgctcctaacttgacagtatactgcttcccatctactgagagtaagaagtgcttgtttatgtatttttttactgctgtcgagaaggagaggaaattcttaggaagctaataacaatgtctcccatgaggctgtagagacacaaccacacaatgcaatcaaaactccaccctcaaaataattacctatcaattactgagcaagagtattgatgaaactccatgcccaagtcacaagctgacttgattcatggcatgatcaaagtacgattaggcccaaaagcctgcttctttttcttttttttttttttcttctagaaataggatcttgctctgtgtcccaggctgcaatgcagttgcagtggtgcaatcatagctcactgcagccttgaactcagggatcaagcaatcttcctgcctcagcctcccaagtatctaggactacaggcatgcaccaccacacctgaataattttattattattattattattattatcattattattattattattagagacaaggtctctctatgttgcccaagctggtccaaactcctggtctcaagggatcctcccatatcagcctctcaaagtgctgagattacaggtgtgagccacagagcccagcccaaaaggcttctcgtatggggacaacagatttcagcatggtggccaaggacacaaagctgtggatagaaaagagcaggcaagggttctaactgggggtgtccaatccaagcccagagacaggaaaggttctttgacaggtgcggttagagactttgctgggtagagccaaaggacggctctggggaaagtggagaagggaaagctggaaagttaagaacaacatctagcaggcacaaaagattttccttaaagtagatcttgtaaactaaaataactaagaccttcagttcacgaaactttggaggacaaattagcactgccattaggttgagactccagtataaagggggaaaaattctgcaaggctttggctgtcaatgaggggagagctcttcagcgaagaagcctgtcgcattggattgtgattataatccacaaagctccccttccccgggtcagctcattcatttataaataagaagattactcactgcctacatgcataaacagctttctgcatcattcttggggtattttccataaatgttttctgcatgcccctttttttctttttctcttcaaatgctcaccgtgtctgggtcaggaacgtgcccttatcagccaacttcaattaatagttccaaatcaggtcagcaatggcccctctcttctctctggcttctcctaagggaagtcccttgattaggggttacagaaggcaccagcagtggggtgccctcatgctctgtcctcctgtcaagagcctggcagacaatgggcaggtcttaggctgttaacttctgtttggaaggtagatttctttatctgctatgttctttttcacttaaaaaaaaaacgcagtctgctaatccagccattggtggtggctgattaattttcaaagtgaattcagttttagccacttctacaaatagacactttattgagttgaagagtcaagaagggattgctatttaattgtatttgatccaaagacaatcagtggctttactatctcacctctctgtattctctaattatgagcaatattccttctccttgtgttgacagagcactttacaattttccacactcttctgcttatattcctgaggtaatccttccccaccccgtgaggtaaagtgggcaggtactatcatgtccacttgatacaaggagaagtagaggctcagagtaaaagacccggtaatctagggggtggagggtacaaaacacttgatccagcaagaagtagaggctcagggtaaaagacaagaaggagtggggagctgcaaaaccaaacccaaggccctgactccaattcacattacttcctgtggtgccacaccaccaaagcaaggggaaggaatgcttgagtggtgcctcagagctcacagagccaatctgagttcaaattctgcctgtgccttctggagcctcaatttccacatctataaaacagagaagaaatagtacctactcacagtgcctgcttgagagggggacctgaagatccaatgagttgatgcacctggagcttaggacagatcccagcagacagcaagttcccagccacgtgtgctgccacctttgcctctgcctcaggactaaatgccattcattacagcctacttgttttcttgtgttgcaagcccaaaacttcaaagcacaattcacaaactctaagcccatgacctttgttttatttgggatacagagcctttctggttttattgtcagcatttactaattgggagcattcactgaaacatcaagatatcccacattttgtgaaaataaaacatccagcaatactaggtccacattcctgcatagcagctattagttgggaaccgaaattagaaaggaactgaatttgacttttttcgaaaggtaatatccatttatgggcccatttctaaaggcccactgagtctacctttacccctctctccctacagaaccgccttcctcttatggtaaagctgggacctggtatattggtgacttcccctttatacaaggcacatgctcgccggtctgccccagtccccaccactccctaatacatttctcaaatctcacctcctcggttcatttatattactgcctgctcaggtggcatttcaatttgttattctccagcattaagacaacaatgtgccctactacaagaagtgtgttgtaacatcttctagagccagctgaatgactttaaagaaggcacttgctggcactgtgaattctcatattattcacatctcacagcattctgtttatcatcccagcttctcacaggcaaatctgcacccagggaagaaatacattcagcacattttgctagcagaaaactttaactggaataagctcaagcgaaatgaggattatagagttaggctaagagtgatagctttaactttctgcaaaaacctcccccatttgcacctattcacataaacattgctgccgtgtaactcccaaccatcctcaaaatgtattttgttacttggtaatcaaatttgcttatgccataaaatgccctagctcctatgtgaatgtattttttttaagccggaattgaggaatattgaccattattgggaaattaaagggccttgcactctcttgatcatgagatgagtttattaaagaggcagtttgttctcaagtctggacagtggcattttggcattgcgatagcactggatgaggattaagtcatttctcagctttccttggcagagtcttttattatttacagtatttacttcagggaaatcttggcgtgtgtcatatttatcttactgaaaaatgggcccataaatgcatattacctttcgaacaaagccaaatgttttggtactaatttggttcatgaagtatgtaattcagttcctttgcacaggagcaacatttgtcttctgcttttattaaactaccataaaccattttttcttgctcattattgaaatatgcatcaccgaagctggggcaaaggagatttaatgactaaagttctaaaggcaacccagtgacaccactctgttctgctgcttgccaccagaaaaattaagaaaataggggacctgtaaggaaagccttgccctggccccacttagtgggtagcaggagggatacaagggaatggaggagggagcaaaataaagcagtcatttgtatgagattatttccatgaaacacatgccttcgttaacaggagttatttataaatagctgctcatttatttttcatttcaatcacgtatgcttttagtctctttgaggtcagcagcagagaaatgttgccaccaatatacctaggtcccagctttaccatgaggggaaggtggttcgatagggaaagagggataaaggtagactcaatatatcacacacctcccctcaaagcttctctctttgccagtatgagtgttgtcttgtgttcattctctacaagaatgttgtaagtgacagtttcactatcccacctataacagatcacttgcttggaagtaggctgcctgtctttccttaccctggcaatgcagaaaaaaaaaaaaaaaaaagcaaagagactccaggtaaaatgaatgagacatttcggaaccaatcatacatacaaaaaaagcatcctttttccaggcaaaccattctatacaaaaacaactcaaaattcagtttaatgagatgtaacaacaaaaaggtgctgtcacttacctgaacatgctcagtgtttattatgtgtggagaaggaacaggcaggtgcaggggaggaggaggaatagcttacacacgtctcatactcaccacgaagcagaggctgtgctctgtacttggtcttactgaattttgacaccacctctgtgaggcaggtactattattattcccattttacacatgatgataatggaaaaagatgacagagatattgagtaacttgcccaacctcacagagccaggaaggagtagagtctgggtttataccacagaacaatttgctctttggttctattgcatttagctcttgattgaattctatcttgaaatgtttactagcgcactgtgaaaaattcaaagaaatggaggagacacagtccctgctctcacatcctttattgttgaccagggagataagatgtacatatatgatgctgactaatttcaaatagaagttgagttcacttttgtcccacataactctgtaacctccttacgaagaggggttcatttactcagaaaatattgatgagcacctatgtgcccagatagtctaggactgggggacatcctggggttggaactcagttctaaaaccaggaaagtccccaggcaaatcagggaagttggtcagactaaaagtaattatggctagatactgggagtatgatagtttctgaaacagacatcatctctgccttcacgcagcagtcactctaatggggacccagacagaaaaacagtggagcgaaggtgacaaggagggaagtattgtgcacagcaataccacatactcacagggtggcattagtatggtgttcttagctctaaaaagccaccaaaacaaataaaatcagaaacaaagttttttcaaataattgaaaacctacatttatggatgaggtggaaaaaagataaggccaaaattacacccatggcttgcaaatctgagaaaataggtgtgtatcttagcatattgctagatacccaattaacatctagggtaattctataacacattaactcatcactgagatgccccatataaaaccacgttaagctggaaaagcaaaactttcagtttgggatgttaatatgttaccaaaaccttcctattctcatgggtgtcctggtcccatgaaatgaattcctgagttatcagtttcatttgttattttaaatgaataagaacagaatcagttctcctctttcactactatcaccacccaaaacatgtatctttgaagcaattattacattacagtagcaattaatgtcaacaatataaaaaaaaaacaaatgctcaaaggtgtaaccaaccaaaaccagcacaatcattccctgcattagtgttctctcttttgttctcagcgcatttatcaagtatgcagtagcttctagaaatcacttcaatgaaaactgctcccgacaccactacaatgagttaagtaatcgagaaattagaagctgtgttgacttttcagaagtgtaactaatagctgtagaaaaaggagtccaaaaaaaattaaccaaatgagatgctaatcttctccccaacaccccaccaccgagttttggcagacaaaaattactgagctggagtttggcaactgatgagcaaggcataaatcctgaaaagacttgtcagtcgaaagaaactttgtggctcctctcactatatcctcatctttacttaaaatacacagtacctgctgtgcttgacaattatttcccaaactgttggggagggtgtacacacccatacatgcattttttatctttgtgcacaaactaaatatctttgtataccttgtccacatcatctctatgtatgtctacatagatttgcacatatctttgttcacaaaaggtattgccacagataaattaacttaacatgatatcttggctgaggggtgtcaataagttgttataatttttgtttgtgctaacaaatccctaggtaaaccctcatctttttcctttcccatcttagcaagctcctttgcaagcaaggctcccattaactccaatcaagctttttttccaggccccttaaattaaccactctaggttttagaataaggaaacagcctcgtcacaatgcatcatgtattctgatcaagtgtgtattgttacttccaccctgacagttcccaacctcattttaaatatggccaagaggcctcaagaaatgtagatttataatggaggagatgcgtttgcacctccaaacacaaattatgttaattgggtgttccaactggagccaggaagaggtggcgtgattattctctggaaacctcggtgattggcagccaactcatactgagaaccaggacgggttggctctttggagccatgcagagcacatgccttcctccccttgaataaaggctgctccacactctacctgtccagccgggctgtggtcaagctgctccgcttgccatgcatcaatgccactttgttcagaccgactggctctcaacagtgcccctcctgccgtctgtattatttaaaggagatttatggttgggtgtcttgtgttgtgaaacacaagctgtgacccccgggctgggaagccagcagggaaaaacattaatataacggcacatgggaaaatgaaactcatgggcagcagaaaaaaaaaaaagaaaacagaaagaaaaagaaagaaagaacagaaatgtgagatgtgaaatgcacgaaggtgttacaaactgcactgagtgtttgcattccttctctggtggaacggcaacatatactcaggttaggatggtggtgctggtggtttttgttggtttgtctgtttggattttggtgggggttttttggagaggggttctgtttggctggtttggtttggtttggtttagaagacacagaaacaaatgccaaacaataagggcttatgtttaaaaataacccatgttaactagaggaccaagaaccctggtcgcatattaaagaggaccagataattgtgtcaccattaggatcatttgaagttatacatacttaattaaggggaatcaaaactcatgctgccaggcatgactgatcattggttggctcaggaagaatttacccctcttctaacagaacactctccaagacaggggcactggccattatgagagttcttacagttacagatcaggtcaagaaggaggggaggccgggtgcggtggctgacacctgtaatcccagcactttgggaggccgaggcgggaggatcacaaggtcaggagatcgagaccatcctggccaacatagtaaaaccctgtctctactaaacatacaaaaattagctggacgtggtggcacaggcctttaatcccagctattcaggaggctgaggcaggagaatcactcgaaccagggaggcagaggttgaaccagggaagcagaggttgcagtgagccgagattgcaccactgcactccagcctggtgacagaacgagactctgtctataaaaaaaaaaaaaaaaaaaaaaaaaaaaaatgcaggggaaagaacagagctggaactagaagagcagattttagcatttttaatacaatcagatgtattatttcctaatttcccaactgcatacatttgaaatgaagagacattgtcatcctcattgagctatggaatttgtctgacatttttgttactgactccaatgctagccaaaaatgatttatttgtcctctggtcctcagtgtcccaatctgtaaaatggaaactcactgttcctatcagaaacagggtggccacccaccaagctgtggttcttccaaggatgaaaaagatggtaccagaatcaaattattaaaatgcccttctcacaaaagcataactttctgttaatatttcccttagagaaaggcacattcaatttccattaatggtacttagaaattcgtggaagtaaaccagcatatggatatgctgaagaaggtgggtcaccattaaatcctaaacacacctctatctttgaaaatgtttcagagaactgtgagattcaattactttggtgaaattagatcctatactaaagaaccagtatgttgaatctctgtagcaaagatgatttttttaaactacatattttatgtagatgtgattttctttgctcaataaaaaattaattgatgtatgccctcagactaatctcagaaatacctagtaattttttccccaatctttaagtatttctcagaacaaataggttttatggtttatggaaaaacctggagattgtgagccctgtcttctccagatgtacacaataattggtgcaggatcttggaaagtattaggacaccccttaaacaaaggctggctgaagcctgttgcagtgattcaataggaaattataaagtccagtttgtggccccaaagggaaacactgctgtccttgagtagtccacaaaactctatttccaattagcacctgctgattcagtgtttcacattcacaagaaaaataaatcccctatattttaaagcagtgtgtgtatgccttgcaggggagcaaggcagtcaggggagagtaccgagagcccagcagagagaatttccttccccatgtaccatagtctcctttctatctcttcagtcatggaacacacttctgaaattgcagcagctactagaaaacttccctcaacgagtcgcctatctgaacagggaacctctgcaaatctccttcctttcatgaaatcgctgaatactaaaactaaatgtaacacccattttgtacaaaatgcttagaccttcttcagcgtactctttcaacattcaaggcttgctcatttacctctgtgagctttatgactaactcagtatcactaactacagctgtcagccctcagaggtcagagacatgactgtttacttctatcactaaccagcctggctggttacagctagctacactagctacaaagagacaattaacaaaaaatgtctcatgaggatagaggggtttttttttagttttgttttgtttttaatcatctatcatcctcagggtggagaggggaagaaatgaagacccatttttcttttccatctcatctaaagccaagctataatccattaccactgcaaacagacaacagggcattttctgctacgacagcatacagtaggaacaaatcataacataataatcatcatctcttaaaagccttactcaccccatttcaccttgccctggaatgggattccttgagtaggagagtatacccaccactcctgttatgatccttggctagaaccactgtgagctgagaatctcagcacccactccacatgccctacttggcagctaaaatgtaactattaagtcacactaacattagattagatgatgctgtcatcccattgttatccaatttattcttctctgacatggtatgaagtggttctgcatcaataatgattcataaatacagccatacctgatctctatcaccatttccatgtgctttcacagacaagaaactgctctctcttccatttctccaagttcatttctttagtgggtgagtaatgacagtttcacctccagagtctatttaactataaagaacattcacagaatgacctagatatttggttgataagcacctgctattgactcagggctcatctaagtagtgtgggctgcacatgtcttaggagagtaagggcccttcctcatggatcctcctggtggacacaaagattcccatttctgcacaaacattgcaaatttcacatagccattagtttcacctacggatcccagggacttacccaccaaagttcaagttccagaatgtagtggatgcttagaattcctataatccagagctttgcccaatttaaaatggagtgatatgcataggtgcagtcttgaactactttctaattacttcttgtgcaagcctcttaattcctaagagtactgtatcttggagagcacttaacatacggtgtacccgtcccttctaaatttgctggatcataaaaatcacctgagaatatttaagaatacagattctcaagcctcaccccaggcctactgaactagaatcccttggtacaagggcctggagatgtgtattttaactactctcaggcgattctgacgaacaggagaatttggaaaacagatgggtctcagaggatcttcacaacaactccatgaagaagatagggcaaatgttagctccactttgcagatataataaatggggctcagagaggttagttccctccactatgcctaattccacctcattagctctgtgccatgttttatacatcacttgtattcctgtccttcctactctctatcagcctcaagaaaaaaaaagatgtagcacatgaaaaaggttctagtagttattcttgcaggtagtatagatgctgaccgcaaaggcaattcctgagatattgtcctcaacatttccagaggatgcctgcctatccaggaccaccttctattcctggcatcacttttggtgcacattctgatataatcaacatccattcaagagggcctttttctgcagaggaattcatcaccagaaatactgcacatgaggatataatatacaaaatatctgtacaatacagcttcttaagcaattatcctgtaccgctgggtcacattatgcaacttaatatttcccataacaaaaatagagttctgggatttttaaaatgcgtatgttgttaagttttactttaatcatttgtggcattcttttatattactttactattgcatgtcaaagtaatcagtgaaattaaattttttaaaacttgcattgaaaattaactcacatcagaaataggattaagaccagggcttcatggttctaaagctgaactaagtggaggaaaagacgttccacagggggacatttcacttgacttaacacacgtcagtgggcttgaatgatttctgagaattttccatcagtgttttcagaaatagcctttggtggtctgctttctcgatcctagtgattccagcagaaatggctgtaccccaaaaaggagaaagctgggtactgcatgctcccactgagatttggggagaggttgtgtaaacaactgaagcattaactggactctgcaccagttgtgatttatgtattgcttgggaggagggagggcagtggaaagggccctcggtatgggtttggcaaggcagggagcaggccctccatctctgcctctcggacacctaccaaggatacagtgcctattcagaattcgagttcgtggaggcttttcaatcaataacatatggccatgagagcgcgagtattataccaacagactgaaataaatatgctccgcaaataaaatatctgtacgtaaaacaacaaaggctttagtttaactgcagaaaatgaaaaacaagtctacttgaaaccaggttaaatgagcaaccagttattcagtgtgagtttttggagatgaatgagctggcagatgctttcttcagatcattaagaccagatatcaataatttctgaggagtagaggcaaaagtcatcagaaacaacctgatgtggtggggccacaccctgtctttctccacttggcctggtgtagggagagctgggacacaccagctgtttaaaaagccaagtggctcctaccacaccagcttgttaaccttcatcttacatgcattttttttcctcccagattcatgatctcagattaggtaggtggtgggggcagtgctaaatataccttcctgttacccgagacctggatcagggaaggtgcttattaatatcatggagatatgatttttaatgatctctgaaaacagcctatatgggtgtgaataatggcactgtctcattgcatgcgtggtttgtgcttttgtctcagacaggttcatttttcactggaggggaaaggttcatgccgcacgaggggggtaaccagttgatgttacaaggctgactattaggccccttgctgttccacatgtcacagggaaggactccagccggcaaccttaatgcctacttcagcatcttgaagaaattaatgaacacagcttctatggcaaaacatttcaatcaacccttaccagctgtgcctacatttaagaaaaagaaaaggagggggggaaatgcccaggtttatcaaaaaagtttcttcgaaagatcaaccacggttttggctgtgtgtggggcggtaggaggtggggaaaggaaaggcagaaggaataaaggtagaaggatgccagtaccgagtgccaaaagatgtgctctggccccggtgtttgttgaacaaattaagcacgttctggtttttcacctgctgaagtagcagcagtgcatatggcctagaagttaaaaataaggaaatatgcatacattaccatacttaatggacgaccctctccatttaatatgcaaatttcctgaaatattactgaatgccgtctgttctaaatgaataaatttgaattgcaattagaataatcctttataattaatgaaaactgtcaattttagttcataagtaatttgattaacaggatgatgggacacttatcaagttcactggactgctaggctatgagaaaactgacagtgaaaatggggcgggccaggcactcaggctctaccggagtattatcctaaattattgataacacaagctaatgaacttcagaaagtgaactctgggggcctcatttaaagggacagcctcggagggcgatgggcagccaccgggatgatgatctttccaaaagccttctttgctggtacttttggattgtaggaaaataaatgtttagaaatgccagggcaaaggaaaacattggctcaaaacacaaatttaccatttccagctgttgctggaacaaaaggaaacaatagtcagaggataaatgtaagaagaaacaatgcaaaaacatgtggaaagaagttgctggtaatgcatcacagaagtaggacatggccacagcagcggggccatctccgcttcccttctttgtctctcccttcagacagatcatgaacaagaacttttaactagcattaattggacatttatgtaaagcaatcggggtggggggaattccgtggagacacacaagcaactcttagttatggcacaaacagtaaggagatctgtggcccttaaagaaacagatgcctgttgccttttcacggagggagacaaggaggcagagaagggggttagtgctacaagagaattctggcactcttggttgttgtcgttaatgaagatgaagacatagtaagtaaaaacaagaaaagaagttataaaataagcttgctttatcttttctagaaacggatgacaaaactcaatgcaacaatgccaggcatatcaaaaggggtccacattcaaggctttcacactttctggcaggtgagaaagtttattaagaaccttcacgtgtgggagtctctcaagagcaaaggtctggttttactgattcgcaatgtcctgacagatcttgccttttcatgccttcaacacctgtagctcctgacaagtgtaggtgacctcctgaccgacaaaggggggtccaaatttggctgatgttggctgagtagactgcagtcaggtcatacatagttctttacttcttcttaatcctcctgaacctactgagaagtgcctttatgccaaggatggaaattatctgtccaaagacttcttgtccttgaaaccttagtcaggattcatgtggcaggacaagtgaccctgtcatggatatctcaagatcattaagtaatgatctttcaagattaatattagtcataagaatgcagcattacagaggcacacaatgggcacttctgggaaaatggcagagtcttagcaatctcctttccatctctacgggccacctatatactacttatctcattggatttgatagaacaagataaaatcatcatgtaaaaatagcatgtacaatttactaagatattattctatatgccaaacattgtacaaagttctttaagtcatgaaatacttaaggtggccctggaagtatatattagatccatttagtaggtgaataaactaaggctcagaaagattaagtacctagtccaagcaatcacatccaggaagtggcagagatgggatttgaacccaggtctctctatctctgaagccaaagctgttaacctaatatgtactctgggctgacttccatgttataactgtgtgcttcaatgctggccaaatttaatcatgctatagtttccctcacttttcaattacattttttatttccttactctggaccaccatgactgctagaattgtctgcgtgcattgtccaagccagctcagcgggtatacatttggagccattgtctccccttccatgcaataagcaggtcataaacattgtctttccttctgcaatgtgtgccgcaagcaagacttcagcatcctctgcctcccacaacgtgtctcttgaaaaccatttatttagagctcagttttcgaaatataccaaggacagggtaaggctctttcctggcactcttcactagtgtcctgccttgccactgtcctaactagccaacttcagccctgggagatctataataaaaactgttagctctttgacactcaataaaagaaacaaacaagaaaccaatgatgttcttagttattaagctgcctattatacctaaataaaatcaagcagctggtggccctatgtctctacaaaattaatattgaaagctgtctttgaaccatttagatccttcgtacatactctccaagcctccagttccctcattctttccagcaatacaagcaattcttgtcctccttactcctttcatttgcttataacactcggaggatttctttgtttttccctataacctacccccatctgtaaacctccaaagtaataacaacacagacctacctggataccagctccactgaatggagcaggaggtctttagagaccatccggcttgatgtttctcaagggtcatgtgcaaaccactgattttaggtatacacacttgttagtggttatgtatttatcttcatgtgtgttaggaaagaaaaaccgtaagtggcacatcaaacttttaattttagagagcattgcttagctcaaaacctaagtgaatatttagctaagaaacagtgaatagacttcttctattataaagacaaatatggagtaaatattccaggtggtactcatctatagcaaaagtcacagcgagtctgtgaatgacgggacatccagaaaaactgatctagcccaaactccctctttttcctcaagggatgcactgaaggtcagggaagttaaataagtttcctgaggccatgcagcaaagaggaaaggctggagctagaactcagatatcccatgaggtcatctttcctgtcacagggacccaggccttcatcgtgggtccctttgggaagaaagggggatgtgtactctaggaacactgcccagaacactgaggccattgaagacagaagagagagagaaggcaagtggcagggctccctaggcctcactctccttcagccagggcagcttttcttgggagaggttttatttgcaggctttctctatttcatttgaaagaagaattttatggcgattttgtttaaagaattccactgatactagcaatgattaaaaagccctcaaactactggaaactctttcagtcttcttgtattttgcaaccttgcttatggtgaaggaagttggtctccatcagcatcatctagcttctcccaaaacatggcttaagggccatttatactagcatctcctgggttggggaggagggttctgttaaaaggcagaatcctcaggctcacccaactttatagaaacagactcttgacatcaactctaatgaggtgcacttttaactagtttcttaggtgatttctctgtgagctaaggcttgagaactgatactggggaagaatggattaccattagtgttacgagacagagaattagtaagagataaagagattgagactaagacagaaagactgagaaactgagatttaataatttactgatccctcagtggaacactgtgtgtatagttaagccactttatgataaggttatctgagggctcatgtaactaaacccacctctcacccatctctctccactccccacacttacccttactttacattggttcatctctggagagaatggactaacactgaagttattatttatttaccaaatactcagagcagcatcctgtgtgctgggcaaggcataccaaaattagggcaagttactgtccaataggaagctccgttctggtacaaagtcagcccatgcattcagaaatgcatgcttgctttcttgaaatttaggttaagggagggcttatatatagaaattagctgctgacagagtttgaatgggctttcaactaaggcattcattatccatgaagccaacccttccaatattccatggcctagagttctttgcaaatggctgttaaaaatcacatttggtgaaagaacagaattttctccttggtaattcagctctgaactcactccatctgtttagcacttgttgggcctgcgaggatgtgcagacactctccagtgctgacatgggtggccacctcccaaagagcaagaaacaaacctgctttcatcagctgctggcatttatgagggtcttaggatgaaattaagattttttttttttttgaaatggaagtttggaataataacaaccttgtagggggaacatggtactcatgttgcttgggtaacatgtggtctaagtagccagaggagaaaatccccggagagggttatctcatagataacaccaatcatatctgagaggccagtgagaacaatcttgatgcctgcaatattttaatctataacatgggatgtcaccaaataatgtgctggaaaacaacagagaaacataaagacaccaaatgaaaaagcagatctcccttcaactttgagaatgagaagttacaaatcatcaatgtctagcaaagacatattccaacaacggtgctcatttttttgaataaataaacaccagggaactagcctgggaaacctgaaacagaaccacatcttctctcaactaaaggcttattaacagcatatgtggggacaaaggataggaatattctgagggcaaggagagtaaagttgcatttattgatcaaactcctaccaaatgccaagcaccatatgcatcgattatctcatttaatcctctcaaaaaacacgacggtacatattattatcccaatttacagataggaatctgaagtttatcaagattaagcaactttccaactgaacagggctttaaagacaggactctaatttctaagctgtgtttttctgctatatgcattgcccatagccccacaaaaggacagaaagaaaaatctagaggaaaaaaatcagatctctgaaaactgtctataaattccccacaataaaaataacaataaccatgatatcctagcacctctttaggtatatgtgtacataacttgcaacatatatatatgagaaattacaaatcatcaatatttagaaagatgtattccaaaaaaggtgctcattatatacatatgtgtgtgtgtgtgtgtatgtgtgtgtgtatacacacatatgcttaatgtaatcttcttaacaatcctatcaggtatcatgattgaggtgaggatgctgaagctgagttagggacatgctcaggtttacacagcaactaaataaccaaactgagatccaaacccagatttgtctggtccccaaacccctggacttcctatcatattgttctaccttttccatccctttcaactggatgtgaaggtgaaccagaatctgaaacttcagctctaaagaggctgaaaagaatatgtcgttccctgccctccaatacctctgctttgtacctactggacacatggcaggccttggtggccagtgtccacagtaaaagttagtgacttgaaaggcatgtgcagcaggcaatgccaagggaacttttctttcttctttttttttttaaagaaacacagtcttgctctgttgcccagcctggagtgcagtggtgcaatcatagctcactgcagcctgcaactcctgggctcaaatgatcctcccttctcagcctcccaagtagctgggattataggcatgagccactgcacttggctccatttttttttaacaggaactcttgtgagtcaatcacacctcatagatatgcttgccccttttccttttagtgcaggctctggcaccagcgtgactccctgaaacccacttggtggaagggatgacagcactggagaggatgccatgaatatggaagtccctgtgttttaatttgcctaaaaatctgcatgttgttaaaacaaatgtagaaattagccatatgggaacctagcttgggtacatatcttcatctgtcaccacatttgggggtggaaatagtacaggatcatttgcagtgcttagacttgtagagagggagaaaagtccacttggaagcaagctaatgctgcacacgtttatgcgtttgacctcacaatatggtaactaatgatggttctgcaaatagacttaggaaaatagatgaatgattacagagggaagaacccagcaagggtgatgagcttcgtttcgcctatgttagcccttaatccttaacaggacagccagcacaaattctatacagcttgcctaaatagatgaaatctacaccttattctgaattcaaatcttagacccagtgcatataatacactgccttaatagctttccaaactctcatttggcctcagttatacaaccagctgacactgaaaataattaatgccctttaggactcgcatctgctcctatggttccaagtcaaggtttttaattgggctattttggcatttggagacaatggcaaggtgaaataacctttctttaatatttttgaggtcagcagatagtcctgccaaaggtcatccttcaggttcacaaatgagtcatttgtatcacctaatgcaatctgtgactcgcaaattgcactgggctgtgttagcgtgcattaattagtccatgtgatgaatactgaattcatcattaccagccggagcttgtagagatgtaccaatacttgttttggcggtttgtggttgcttatttttactttgcactccacttccaaccctggtctgagatcttcaacaccgcaagcccaataattggcacagcaaagttaaccctctcccttatgacatggccagaacctggggaaagattccctggcacaaacatattgcaaagcacgaagcaaccacagttgctctatctttggtttattgaacctgtaaaactcagcatcaaaagatgattcccttttgcctcacgatccatagcattcctaatcttctaaaagagagagagagacagagacagacagcgaaaactcctgtttcaaacaccttgctcagagcagtgctcttagttgtgctgggttctctcagctgcttggcagctactgcctataatgaaggcattattaatttcagtttcaggggatagaaaatcaggatgtggacactgtatggctataccatctgtgccgttgacatatattgattcataccttcttcccatctgtccttgacattgtgcagtaacagaggtcacagtcttctctttcctagaattctccccaaaagcaactttctacccagtatcctctcagtgatttgatttggttgctattgtgcacttctaaggaagctggtggcagagtgtctgcatctgtcatcccccaggtaagtccctttgacccaacataacaataaccgaccacatcaaaagggtgtaggaaaacaatagttcttccactttgctggaagacagagtcagcaaggggcagacatttaaaatagatcttccatttctccagaattttgtggataacaaagagaattaatgcatcactctagaaattagcacattcattttatacagaaaggtacagtagccaattaaattacacacagcagatctaagggttggaaaagtagatttacggaaagttaagaagctgaaaaacagcaggtgggtatgtcttgctctacattatggacactaagagaaaaattaagtctccagttactgggatatatgtgtgtcttatgtttaatgtgcattttttgaaaaaagaactgttcaggttattgtcacttcagaattgagaaagcctgagccagatttcagagggattttatttcaaggactatcatttattttattttactcttttttctaaccactctctgtccaggtggaatgagacacacaaataactgaattcacaatggactttttgagaattcaagtggccacttgtatctgcaaagtaagaagtaagtggctaattgcagccgaaatgaatggctgagcctacaattagccaattaggtggtctattagcaggaggggcgatttgaacgcagaaagcccctccgtggagcccgaaggccttggggctttccagcaaaacccaggaagagcgttagcctcttcatcaaagcaaagctagactgctcagaatcagagaactgtcagtttattcctaaagctctaaaattctccaggtccaggtgataagtaacacccttccaatgggggtaaaatttttttaaagattttaacagctgcctgaaaagcttccttttcaaagtatatccccaaccttactttatccataaaaatcatctcctcctctctctccttctcttaaaattacagattaaaacttatctggcattctcatcccatatttaatgatgaaaatgaatccatctttcagttattccttagagaaaatattgccactttcaaaatattttaagaaattttgccttattatggagggtgggtctcagatcgctccatcaattttattacaaaacaggaaatttagttttgttgaagccatgtagctctgctgagcttctgcaatatcgggcaaagaatgaaagtgctgggtggcgggaggtgggatttgaaaaaagccacgttataccaaagggatatactattagtttccttaagtctgctctagaggaaatagcttaaatcaagaaactggacaagccacgcctcttctgggtctcaaattgtacccatgtgtaaaaccagtgcccagcccatttcactgtaaggtccctttcagatccaagtctcaatgattctgaatcaacaaatctcaaatttcgtgaactagtgatggaccagtcaaaaggaagattcaaaagcaattacctctgagctcaaaagccaaacctgggcattgtttactgcctctttcttttagccttttttgggtacagcaacattttaatggtcttacttgaaactacattcacacagagttgtactgttttaatcactagttttaagcccttgagaccttctccgcagctcagatgtgttattcacaaaacattgtcccttgtgagaatgacaagacaaagtttttagtcatctaactttttatcccctagcattccactcctgggttcaccctggggctcaggcagcccatctacatcagctctgccccatgatgggtaaacaatttgccgagaaggcaaattacgtggtgggctgttgttccatttcacctgcagtctttctgccttttcgctgtgaaagctcactaccttcctcatgccagatgctgcagagtggaaggaggttttccacgcaattccctcatgtctctgtaacatgcaggtcctttcagtgtgttgcaaaagccacatcgtaaggtcctggcagaacacaaatccctggatgccactggacaaagaaaatctccttcatttgttcaacatagacatagatgcagagggcaaatccttctctccccacaccagccacagctgagtgaggcagcatcataggtctgtttcctacacctttctccatgtggcattcagaatgatcttttaaaaatgataaactgggccgggtgcggtggttcacgcctataatcccagcagtttggaaggccgaggcgggcggatcacgaggtcacgagatcgagaccatactggctaacacggtgaaaccccgtctctactaaaaatacaaaaaaattagccgggcgtggtggcgggcgcctgtagtcccagctactccggaggctgaggcaggagaatggcgtgaacccaggaggcgcagcttgtggtgagccgagatcgcgccactgcactccagcctgggcaacagagcgagactctgtctcaaaaaaaaaaaaaaaaaaaaaaaagataaactgaatcacgtgcccatccttcctttctgtagtttagcctcccctctaaatggtttttgctgcttttagaaggaaatccaatctctagcatggccccactcctgcctactcctctacagccatctcttgccactgtgtgcagctttctttctgttcctcaaataaactaaactcaccccaatctcagggcctttgcacatgctgttcccactgcctgaaatagttctcctcacacccaaaatcaatgcattcaccagctgggtcgcctttctggaaagggaatctctcactgcccaatctaaagtaatccctatcggtggccatgaatcacctctttatgaaatcaacctgctttattttcctcacagcacatatcacttttatcttattgtctagctccctgctaggatgcaagagctatcagaataggggccttgtctgcctgttcacctctttattgccaggaataaagcaaacacagagtgaatatacaataaatatttgttaagtaaatgaatggtgcataactggatagataaatggaagatttcctggcctcccttgtggccatgtgactaattctgaccaatggatgcatggagaagtgataagtgtaacttcctcaaagatctccaaagggaaagggctccctcttcttctctccttcctccttccactggccaccatgtgcaggtaaaggctgaagctccagcaactctctctgatggttaggtgaccttgggaattgtagccatgcacaacagaagaaaatagaaaccagggccccaacatcacagagccacaccccacactgcaccatctccagatttcctaaacaggaaaacaaacaaataagcaagcttctgttacttaagctactgttatttggtaggagtgtggtgggtggagatgagtgggaattaattacaacctaacttaattctaattaatatatcaactgtttttaaactgagaaggtcatgctcttggaagagaatcagtgtgctaatacataagaacagaaacagtccacaatattattcccactacccatgtgtccaggaacaaagtttggtgggctctaaaaagaaaatgaatcaaaatggtacaagaggaatttctttcaatagcttcaaagttggaggtttacttcaagacaaaattataaaagcaaatagtgcctgcttaatacattttatttatacttccaccattgaaatgtgcctttaatataagggttatatttctaaacccccaaaaatcctttccataactattattctataaaaataataaagcctaactcttcatatctatgtgtatttcaacaagtataccaagcaccctagctcatttctatttaggtctacttataagcaaatgatagcgcatttgttatatcttaataaatgcatcccctgtgatgtcaaaatttaatattaacttttgcatattgattctgaaggtaacaataagaaacaatgacatcaccatacacattaggattattagatgtcaaaatgttccaacccagtatattattagaaataactatcttattggccgggcgcagtggatcacgcctgtaatcccagcactttgggaggccaaagtgggtggatcacaaggtcaggagttcaagaccagcctggccagtatggtgaaaccccgtctctactaaaaatacaaaaattagccaggcatggtggcacacacctgtaatcccagctacttgggaggctgaggcagaagaatcgcttgaacccaggaggcagaggtggcagtgagccaagattgagccactgcactccagcctgggtgacaaagacagagagactacatttcaaaaaaaaaaaaaagaaaagaaaaaagaaaaagaaagaaagaactatcttatttaaattattggtccacagcaatgaaaatgcccaggatttattgtacaaataatagccctcttaataagttgtctatacagactttagtaatgtattaattgcaaccgaatcaatacaaccacaaataaaggacgttattatttacaaagcaacgagccagtggaaaagcaagccttccttgttgatgcaatgaatgccaagaaataaaagtaatccaggcctcttgaccctacctgccttcacccataactcaaggcaaatttaaggtggcttcaccccatctatgcaatgtggatctgaggtgagaagatgcataaaaagatttgcagcggtattactgtggacaaattacttctttgatgttcatttccatcaactataagtagggataacactagttcttatctgtagaaatatcgtgagcattgaatgtgataactttgcagaatggcgaatagtaagcactcattacatgccagttaccatcataatcatcatcgatgttgtcatcatttttctccgtgctctttccttaactagatcttctatcatgaatgcaagaggtgtcctgagttttgtttcagttcatgaaccactgctttgttcttcttcttgtgtcccggagccccaaacagtgcctgaaattcagtgctttcctcatatctatgagcagagcttgggctggcaagtaatgctatatataccagcaagtacacagcttatcattttccaagttagcaccattattcattctaataatacaggaattaaagtggcttcaaaaaagaaaggcctttttcacatcaatgccagcaggcacagcccatatcatgctaaatgccattctgggtacttcccagaaaatattggcagccaagttcccagaggccgtctgcacccaatagataagatgaggcaaagaaaactgtactggaagagatcaatgaccttgctggcttgtgtttggctatcaattatctttgctatcacttactatgttccaggcactgttctgaacactttacacagattctctcatttaatctttgtaacaaatcatatgaagaagccatcattagtacaccctctttacagttgaggaagctcaggatgagggtgtttaaacagattgcctaaaatcaaacacagctagaaatctgcagatctaggcttcacacccaggcagcctgcctaaaacctatttctcacaacaccactctataatgttctaaaaagttgctttaaccatttaaacatttatggatcctactatctccagccagaggcctctgaggacaacttggagagaaaccatatgatggttaattatgatctcagggtgtcagatacataagggttcaaatccctcccaggcctgcctctactagcctgatctctctttgactcatttttctcatctgtgaaatggggatgacaataggacctgctccataggcttgtaaagatcaaatgatatgttagagtaaaatgcttagcacagtgccgggcacatagtaagtgttcaataaataaatatgttcattcattgttctcccctttttcagaaatatattatcaaaaaaacagaaataggagccctgttacttatcacattcagctttaaaaagcacccctctgcccacatctggatgataaaatgtgattcttatgaaaaaaaataattttttggcaccatgctccctatctgcaattacatcaaaatcacattaattgagctataacactgtcaggcttagcagctggaaagcacatccatacattctaaagagaaggccattaattcagctctctacagcgcagcaatgaaattgggatgtccattcttcagtgtgatttactgtctttcaagccgcttaagtgggaacctctacaaaaagatttaagttaagtgactcttgtgctgctctgaagctcatttattattgaattaagttttcatttcgtttaaagggaataaagaaatatagttttatttgaaacaaggtaaaacatttaaaagaaatcagctattatgatccaggaagccagtttatatatctgcaaatgatctcactctgcttatgctctgctgaaaagccaaatttaaactcataaatattgctaatatgcatataatttgagacttttgcatgacagctcacccttactttttgtgttttatcattcctctcttttaaaaatttttaaatctttttttaaaaatcaagacagttagacactgggctagagaagaaaccaggcagaaataaacatccattttcgaaaagtctagattttctttatgacatgaagggaaaagtaggagggagagacagaggcagagagatacatgttataggttatcagtgtgtggcagaaaaatcaaagtatggcagacatataatattaaaagatttagagcgtcctggtccacagatgaatcgcgtgtggcaagcaaacagagagtaattctctactagtagagtatgtacaacttcagtgcctaaattatcagcctttgtatcaggcatcaggcgacaaagcttctttagaattagtgaccctgtctgtccacagtacagataaaagaaatggtatatttctacataatgtttcctcttctaagcctcatgcaaaacagccaagagtaatattccctatacgaagaagtccctaaagaactaagtacttctgaacaaactatatttttaaaaagtctgctaggacccctataatggtgtcatttacactccagtcacatgtgtctacagcacaagacccttcataattaggtatatacactataccagctcactgcctaattagcaaattatgttgaaaatagcatcctgctaattaacagttattatggcatttctgaagctgaggctttaattatcaccaacctaatgcttgtgtacagagaaaaaaagcccctcccctttttaaatgatcaataagtgcaaaagattattataaggcaaatctgctgacagctgattaatttgtttgatgcaaagttgctgcgtgtttcagattattttatgggagttgcaggaaaaaggtacataattcggtttcattagcaacctctgcgatttatcactagaaaatgcaccccctacaccttttttgttgtttgttcaattccctctgtgtttttgcctgtaccagcatcaaagtcaagagcaggaagttttaattaagtgacactaatgaggtcgttgaaaatgatacttcagcaattcagcgtgctgttaaatgtgtttattctataatgtcatcaaaggtgattgttttccctcgtaatagataaaattcattaccataagcattgtacttttgagtgttagaaatacgaaatgcaagttagtcaggtgtatctgttacttttttttttcctttggctgccaattcaaattactggacctaaaacaaaacttgagcaaaaaaggctcgagctgttttctagtttttttgtttttttttttgtttgtttttttttggttgttaagtctcccatgtttagtaattaacagaccccgccagagaggaacagaacaaaaatgagcatgcaaatgactaatcaaggaaagctggaatcaacaagatatgggtaaaaagatgctcctctgagcctggccatcatgcggcaggttctgcgcctctgatcacactgagctgcccaccttcccatgccctggaggtaaagctatgtagtcctaccctggtagcataggctgtgccactacacaattcagcatttgacttgaacaagaatgggatactttggatacttttttctttaaaatggttccagtctcccaaacacaagtatggttgtatgatgcattttaggaatttatttatcacactgtgaatttccacactgccttcttcataagaattcaaaatgcttgttcacatttctaaggcatctaatggggggcaagtattaaaatgcctccattttacagataaggtaaactgagcaaagtaatttatcccaggtcagaggcaaagcaagtataagccctgttccaatctcaccaagtcataccacctctgcaattcaaaatggtctcctttaattttctcaggttacccaaaaaaaaaaacacattttcatatcttgcacaaactaaaaagctctacagtgtttctatggcagcctgtttctttgcaaatgggggtccagtgttagacatctacatttttaatctttcatttttataagcaatgctttgctgaacatctctgattttcttacgatggaaatgatgatgctgtgcacagcaaactcttcatcaaagcagcaggtccagtcccatatctcacctgctttagccaacagtaattatttcccactaagctgcccatttctagtttactttttttaaatgccaaagaaaagccattctgacccatcacattttataacttaaagcggtcactatttttcctatagcggtgttgctgattcagagtaagctcaacatactccacacttatttactgactacccagccacagatcaggaaaaagcaggtgttcgggggattttgtcaatacacttaactactgtgaatgaaaaatgaaaattgttttccttcctcatggtattcatgttttgggctggtttgatcctagagcaaggggttgaattagatgacctcgtggagttttttagaacactctcaaagactgtctccatcaaaatttttagtcagttccctgaaacatctcaggaaatgcaaacatcagtatcatggagcaaatcaaactttgacttaatttgtcatttttaaactagttagctgcagaggtacctcaaaatgctctaatattatataaacagtcacttgctttttattggagggttcagcataggaaagaaattagaaatggctcagaagttctaacaaggtggtaaacattccaaatccctatctaatgtgcattaatgccagatgagaatatatagagagaggcataggggcagctaatactctaggaggctgtgaaatgttgacacatcctcctagaaataggagatactcatctacaaattaatggaaggatgtttctagaagaaccagatgcctttaccaattttcatttattgtctggaatttaaacttctgcttctcttcacagttttttttgtttgccaccttacctttagcaaccagccatatgctctttaataaaatggcaaagatgtcaagtaatgatagcactcagcaccagtatggatacagtggatgggcactctcacccgtgggaggggagggagcacacattggcacagcctctctgggaagcactttggtattgcatcaagaatttgaaaacattcatatcctttgagcctgtaattgcacttctaggaatctatcataaggaaatcagggatgcttatcaaagcattatttataaaaatgaaaaaattaaaaacttaaatgtctaacaattgcagattggttagataaatgatgatatatccacatgatacaatattatacagtcattaaaaaacatgtgttctcagaatgcatattaataaaaatagcaacaaggagagggctaaagatgtaacatcaggtataacacatatgtcctcatattcataaatttcaatgcatctatttatgtaagcaataaaataaaagagtagaaaacagatacctaagcgtgaacagtggttattgagggaagataaagtgaaaggcaattttaatgtttatctttatactttgtaaaaagtattcattttaaatatgaaaattataaaataattcaataatatgtcttttttagaatatacccagatgttattagaagttttatattatggtataatttatatcattacataatttataacataatcagtccaaacacacatacttcctctatgaacttcataactatttagccacattcaagcccagagattactgaaatgctggaactgctattatgagacttttagtagggcactcccagaacactcctttaaaagtatctctgtacatcaaacccataatagttacctcagtttgtataaagttgcctgtagattcacatgagacaagagtgtaacatttggagcccagatcatttcttagcatggtccaagatcctcatgggtagatattttccttgaaggatttatttactcactttacagagtgatagacaccctggtctctgatccctcagaacttctgaagccacttttcctttcactgggcttaggataattgtagccaaggctcagttcatttactcttttgtttttttaatttttttcttcctaatcagtgagaaactgtcaatacatacatacggggtatcacttaaattttgaaaactaaaaattcaaagcaaactgggagaaatattttgacatgtaaactttttcccagagactgtttttcaaaaaaaaaaaatgtttgaaattgctttttgctaaaggaagcggggatagttcagctgcaggtagaaaacttaccactataggcaaccatcattcttatgaaggataacataattacaactaaaatgaagacaccgaaagaggtgcacaaaacaagccatcttgtcagctggagatgaggggatcaataaattgtatgcttaacattttcccaatcaaattcttaatacaacaggatttatgtgggctttggagatgctcagaaaaataatatagatttttccctactggagagtaaataaaattcaactactcattaaagggttcactgattgtttgtttgaatcttttcaaagctatgaggaggaagaaagacagctgagaacagagagaccaggacttgcatctttgtcctgttgcttagtaattctgccacttcaggcaagtgacttaacctctctgagccaatggtcactcaccttatttctcaaagggtgtgtaaaagctaagtaacctaacacagagctggagaaatagtaggcattcaatataggtttctttttcactttaaagtaagcatacaaaaacaaataaattagatctgctcacaccccaaaacaaaagaacccaaatgaataaattgaaagcacagatctttcagtaaacacagcacctcctctgctttgcacttccacaaaggacagtctgcgttgatgtcacaatgctttaatgactcttttttgtattttgctcttttattgaattacacaaaaacgaaacttgccctcattcagtatctatcgtactattgaaaatagaatctcaaaaccatgatatggagccacaggcagatttcaccatgcccattacacacaggcaaatgagaatggtgtgtgtgtgttgggtgtaggagtgtgtatgtggtatgattaccaggttaaagggatgacacagactctcctgaatgacttatgggagccgaatctcactttagaaccatgtgtcatttatatgcatattagttccttccttcattcattcattcaacaacctctgcaatgccagtgtagtacagtgcacttcatacacatacacatacacacatacacactcgtacaagagcaatcccaccatcgccatgctgaattgtctccttaaagttatctggaagactgcatgccataccactctgtagagatatgaggggaggtcatttgaaagagagagaaatggaagcttccagagtgaaagatcttgggactgacctttttcttcctctttctccagctctcaagttcaaaggtttttcgtagttcaaataactcactcaaaattcaactctcagacagaccttgcaatgggcagtgttgaatatttggaaagagtacagagtctggcactgtagaacttataatcagtccaaacatttttcctctgttaatttcataactatttgagttagaattcccacaagttatttagtcaaataacttcaatgtccttagtaggttgttatgaagatcaaaggagacaacatatgtaaaacgtttagcacagtgcctggcacatagtattcactaaatgtccttcccagaagaagcagtaagtaaaaattatagcctgaccctgagctaaattctttatgtatatgattgcactcattgcaagtctacaaggcagacattatcattatccccattttacagaaaaggaaacagacttgttgagtttaatttgcccaagattcaacaaaaatgtgttagagccagggtgcaacccaggcaggctggctccagagcctaagatgtaactgactacactacattttttaatctattagattaaaatacatttaagaaaaattggcactagtgtttattcttgggaaatggtggacccagtttttgtttggcctcaatggaggtgctcgggcaggcaagtgtccttcatccagctccccgcccctcatcctattcccctgcccaagagaagatgagaacaaggcgtttgccagaggcatcttggaggcagcagccagtcagaggctgtgttccgagggcacagttaaggtgaactcagagagcacagtccagaggcaccaaggagctgaggacacattccggagacgcaaatgtgctgctgcagcacagccaccccgcttgcccagcaagcctctggggagccatgggcacaggtgctgctgtcccactcccagattagcataagtgaactggggcaggccagctggtagaacaccctatatccactgctgcagactcactgcatgtgcacgcgtgcacacacagatacatacaaatgattagaaaacatatgcagaagaaaaactagacccatctcccaaaaaaggcatttatcaaaaggatagcacatagaaaaagacaaactaacatgattattttcttccctttagtgactctgtttaagatgatcacaattcccatcactataatgagccatttcttggctggagcacatttatacaactctcacccaaaaaagtgcaaaatgtatctgaagtagggaccatgtattcatttaaacaaattcatgacaaacacccactctgtgctgggtatatgccagaaaaagccaatatatatgattccaaaaatctgccaagaacccagaggtttttcaaataagtagatgattcatatttcatttttattcagctatctttgcactgggtggccattgtctgagacagatccctctgctcctcaatagcccaagatagactggttgaattatgtgatgctactggattagaaaatattttttaaaaaaggagaggcttggttttccatcctctttccaaagcaaccaatgaaatgataaataaatatatgtgcatgttccctaggtgtctgacaacacaaaatgccttgctacctccatttttgcttttttgccaagaccagcaaaggggaggtgacatgggataacacatgaaaatggtctttgattagctaccttgtgaaccatatttcctgcctcagtttcccatctcagctgatcatgaatggatgacccacatatatatagcagagagcacaggagaacagacactgcaggcaaagggtctcagttcaaactcagctgccacctgccacctctgtgacttcaggttcaggtttgttactttgtatcctagagacgtggtttcctccttcctatgtaaaggtaataatagtacctaaagttgtaaagactaaatgacatacacatacaaagtgcttagcacattgcctggcacatatgagtgcaccatactaacatcagcatgtggatggcacacggtaggcttcgtaggcttacccagataaatcggtgtcccttcccacatttgcaagctcacaatccacaacaagaatgagaatctattgcaagtcactcctatttcatagtcatgcagttttccagcacatttccactccagcatctgtctacagctatgcactggcttcctcctctggatgggaaactccttgagggcaagaattttgccctgtaaccttaatcttgttgatcttccacttcccccagtatgagccatagtatcacgaacagagtaggcacgagataaatgtttgctggatgggtaaatgaataaaatggagaataggaagtaccaccaaagcaagccctgcaaaagtactgtggctagtcataggaaggagggattgtttttatctgcttataccaaagtagaggttaggggagatcaaagagagggtcatggaggagggcaaccgaaagcttggcttggagaataggctgtacttagtgcgactgactggggagggtcatttcagtctctcggtggcctaaattcatgcttcctctgccctcaatagtacaatgaagtacaggtgcatgaatatcagaagactgggtgggggtacttttccttgcattcaaactcatttttttctgaagtgtccagagtccttatcacagggagttcacatcagctccgtctttcaaagagatttttattttccacccaacctggtttagcatcattgagaaggtcttccatataaaatattaataaataatatagttaggaagcctcggattcattctgggcccttcagtacccctgaaagaaataggcaaattggacagaaatcaaagaagggaagccacgaggattaaagagaacagcagcaggagctacttataagggttcccgcagcaccagccaggaataagcaaagctcagggatgacaaaaagaaccgaggatcaaatactctccctgagcaagggtgtaggcacaccgatgaagggaaagaattgctcagggtcacgcaaaggggtagagcagagcggaatgggatgtaattacagaaaggaaaacttgggctgaatatcagggcaaccttcttaagagcgggctctattcgagtgcggaatggcttcccaagggaggcagtggaagccccatcgcttgaggtgcataaagccactggacaaagagctgagaaagagagtgtgaggaataatctgcctgggcagggggtgggacaggtgacctcacggggccgcacggctccacacttcaatgacacgtcaagatgtatttcatcaggcacccactggcgagagcctgaagcattgtcccccacacccaccccttggccattgtgctttctcaataaaccactcaagaaatattcccattcacttcaagagctcctccatggctcctggctgccagtcagagccatgagaataatgtctcgtcgtggacctggcatgttcacactataaggcaaaatgtacctttctttgaaggaggaattttcactccggctcaagtgccttggtctttgctcctggaatcttgatatttttgttttggttttgttcttgttttgtttgagacccttttcaattcaaaagaaactcattatccttactgccagatcctgaataaccaacataaaattgcgatactttaacatagcctctgaattaatcaatcacctcctttttgctcccaggggagagtccagcatttctgacatgaaccctagtgccttccaggccctgacccaggacagcctgtgcagcttcacctttcacccccctcctcccctcctctgctccagcattataagctatttagggttttccaaacaagctatgttcccttctcctccgggaattgtcccagctgttccctctgtcccaaacactctcatgctcttcccatctttattactgtcttagttggctggggctgccataacaaaataccatagactgtgtggctgataaacaaaggaaatgtatttctcacagttctgaaggctgagaagtccaagatgagggtgctgcagattcaatatctgctgagggctctcttcccagtctgcagagggctgccttcttgctgcaacctcacatggcacaaagaacgagagagagagcgctctcctctcttttcctcttcttatgaagacggtaatgccatcatggcaggggagggctataccttcctaactttctctaaacctaattacctcccaaaaacctcacctcctaataatatcacatcgggggttggagctttgaaataatgaatattggaaagacacaaactttcagtctataacatttcaaagctcaaagctcttctttttttaggacctacccttaaatgttagcttagggcccctccaagagacatctatgacatcctggatttaagtatggaatcactgaacataacgtgtgcttactggtccaactttcccaccagtctccaggagagcaagagctgtgtccatattattttctgctgtaatttcaagacctggcacacatgtgcttttatgcatctaaataaatcaagaggagcagcacattaaatggagcccgtgggcacttggtgctactcattggcctcacatgtacctcagggcttattatgtgcgggacaagggctgagtcttctgaaaaacacaaagataaactagaaactaaccctcaaggacttatagcctagacagagaaaagatgcacatagaaataacctgtgctccaaagtacaaagctgaaagtgccagaagacatggacacatgctatggaaattcagaggcaagatgagtacttccagctgccttagagggagctggaaagcctcctagaagaggctggtagtcaacgtgaagatgatgaccagaaaatgggtataccagatcagcagaccagaataagcaagggcaagaaaatggaaaatctccagcacacctggctcaaacctggatttaattgaaatttagttaaaagggaagctatttggtatcttgaatgtcaagtttgggtttattatgcacacaggggaatgacataatcagactttgctctgtggtatgatttggtggaatgtggacatctgcactacaattgtaggaaaatctttagtctgccactttttaagcactcaatcagcgaatatcagtagtcatggaggattaaccgtgtctgctttccgggcgggggtgggggaggctgcgaggtagctcctacctcagaaatcatctaacaaaatgtcatcatggaaatctgtccttcttggacccacagagcccaggatcccacagaggcgcacaactaccaagctaacaaacaccatggattatgaagtctgaatattccaatttggaattctgaaacagaatacacttataccctctcaaggaatacacttataccctcttaccactctcctcattaaaggcttcacccaggggctttcctgctctctttctaactgcagcacccagtacttacttacctggcgggtagctgtagtgccttgcctcgccctggtgcattctgggagagttttcttgttctcacttcaatttagcagaatcaccagctgcagcctttgctagtaagagaaccacaaagcaactagccaaggagctgggtgtgatggatcctgcaaactgcttcacctggaagaggactgaacaacttggagattgtgtgcaggacggtttctcagtccacacacctgctgaaaccaaagggcaggatttgcccaagaattggaggtcccacatcagatcgcgacgagtccagggagtagtaataactgtgacaacctctactactgtgtccagaactgtggtatcctaggccacttaaatacatcctcttttctaatgttctgaaggtgaagtgattcgtctgatgggaaggatcagtaaacaaaagcttaaagaggtaaaataacttccccaaggccagacagctggcaagtggtgaagctgggatttgaacctaggtttgtctgactctagagcccaggatcttaagcattttgctgtgctatttggctgctgtagttcttggaacgttcttggaacattctcagggagacatcaaagacaggaagttcatacaggccaccttatccagccttttacaaggagagaagataaaacaggctctttccacacaattagccttctgactgcacccccttcaccccaccgccccccccccccccccgcaggtcaaatggaggatggactccaatggaaagtgaatccccaacagaggacacttcctggtggactatctctggaataaaaccactccagatgaaaggatggcctgtatatgaattgaaaccaattatgattataatcattatctgtgtaacatttgggtaggagacagctcctgacagctttttgtgagaagttatgtctgtctgacagagcagactttaattgaaaatgtcaaccaccttgaagatcattagggcaaagctcttagcctcaagaaaagacaaaactgaaaacaatcatctgttgctgactaccaccagctgtattggggtggacagaaaaaagatgaacatatggcacgtggggcttttctgtaaaccattcacgcacctcaggtttgctgtgagtgaaagagacactcattccagacacacacatttgaggaagaatgataatgtgaggggttagacccaaacaatgcagactggagacgttgaatcaggaacacgtacaaatacagcaaacctctcaagcataaattcttgtagcaagaacccagcttttcagaggcaaaggaaccaatacaatggaaccatctatagtcagagcctaataacactgcaagtttcgaaggaagatattcgttcatcctgtctctgtcctcctcctaaacacactctataggggcacacgcacacacactcatgcacacatttatcatcaggatttccactgaattatccaaacttaactgcttcttccaaggatccaaagatccttgatcctagattttaagatctagatgctagaacccaagatcttaaccattttgttatgctatttggttgctatatatcttggaacaaagccttggtatagtgggggtgtgatagcacctgcaaactgcctcacctgtgtgcaggatgctttctcagtccacacccctgctgaaaccaaagggcaggatttgcccaaggattaggggtcccacatcagatggtgatgagtccaaggagtagtaataactgcaacaacctctactactgtatccagaactgtggtatcctaggccacttaaatacatcctcttttctaatgctctgaaggtgaagtgattcgtcggatgggaaggatcagtaaacaaaagccttggtatagttgtgaatagtttcccagctgatatgtctttagtagttttctgaggaaacaaaaggcatgtgactattagagaaagatgcattttataaatatgcaatattcttttcactacaaacactgaaaatgagaaagaaagcagtgggtaaaaattcagatattaatacatatatcatttaggggatttctctgacaaactgtgctatataaaataaaatatatacacagtacttatttttaatacttttatctcattgtgaagcagtgtcctaagatatcatcacatttagcattgtgtccctgtatatatgaaacccctatctggtaatatacaaagaacatcaaatataatatcattaactaactgtcaagagccctagctctgaaatcagaccacctgcattcaatcctagttctatcactgactcatcatgtaaccttgggcaagttacttcagctattttagctttacaaagtttatttataaattggggataataatagtagctggaaccccataggaaaaaaacatttagcacagtgtttgacacgtggtaagccctcaacaaatgagagtccttattaatattgtatgttgttttgcttcactggacattagaattgggtaagtgggactggattactagttatcatgaattccaaatagagactttaatttcaaatacaaggaaatagggatccagtgaaggtttttgaaggaggaatggtctactaaagtggtctttaagaaagttccagcccgtggggtttaatacactgtaaggagaaatgctggaatagagtggccatctagaaaggctctacaatgacccagggttggcgccatacatctccagaagagaatagtagaaatggcaaaagcaaggcaagtgttgttgcaagaatgtggtcgaaggaggaggagggggaagaagggaggggagaggagagaaagagaaaagatagtagaagagggagggggaaggaggggagaggagagaaagagaaaagatagtagaagagggagggggaaggagggaaggaggaagagaggaagggaggaagggaggaaaggaggaagggagggaggggggaaggaatgaagggagggaagtgggagggagggagggagggagggaaagaaagagaaaagactgtttcaggtgactagaaagactgatcatgagtcacaaatgaatccagggcagtcatctgacgaattgaatcttctgtctttcaggaggtcacattaatgcaaacagaggccagaatgacacataggctagtcatcattctaactagacagtctttagggaatctttagggctaacttccagagtctaaaagtgtactgataaccattcattcacttcatttagcaagtgtttattggatacacacacacacacacacacacacacacattccggaggcactgtgccaggctctgaggacacaagagagaaaaaagcagtgctcctttggatcttaaaatctagcaaggtgaaaggctatataataattacagaaagaagtaattaattccagttgtgatatatattatacgtggcatccataactggatccaaatctccccagaaaagcttctaaacagaacaggtctctcttgacatatgcatacaagacctctaacataacttccagaatcattctgggttctagaatcagggaggcaagctgagcagattttacctaagagtgtggcagtgcctcttctaagcagaagtctgaattcctgggaaaactgtgaaccatctctgaaatctcaactgaaatgggaaacagaatagtggggagggcagggggcgccagggaccctgaaatgggaaagaaggcattgaaatattctatgcagcacaactgctccatgtttgggtcaatcaagtgacttataatcatttctctcataatctatagaaaataagattatgcaaaatcagcagttggaaatgccagaccctcttgtgcagggaaagctttatcatcacactgatttccactgagcccggactgcgccttcctagacttcccatcaaagcactccaagcagccacaagcaattgatttgtgtaagcaggagagacaaaacttatttgaaattcatcagttattctttacttttttattattatactttaagttctgggatacatgtgcagaacatgcaggtttgttacataggtatacatgtgccatggtggtttgctgcacccatcaacccgtcatctacattagtttctcctaatgccatccctccccttgtcctccacccccctacaggccccagcatgtgatgttcccctccctgtgcccatatattctcattgttcaactcccaagtatgagtgagaacatgcagtgtttgcttttttgttcctgtgttagtttgctgagaatgatggtttccagctttatccatatccctgcaaaggacatgaactcattcttttttatggccacatagtattccatggtgtatatgtgccacgttttctttatccagtctatcattgatgggcatttggattggttccaaatctttgctattgtgaatagtgcttcaataaacatacgtgtgcatgtgtctttatagtagaatgatttatgatcctttgggtatacacccagtaacgggattgctgggtcaaattgtatttctggttctagatccttgaggaatcaccacactatcttccacagtggttgaactaatttacattcccaccaacagtgtaaaagtgttcctatttctccacatcctctccaccatctgttgtttcctgacttttgaatgatcaccattctaactggcgtgagatgggatctcattgtggttttgatttgcatttctctaatgaccagcgatgatgagcttttattcatatgtttgttggccacataaaagtcttctttagaaaaatgactgttcatttccttcacccactttttgatggggttgttggtttttttctcttgtaaatttgtttaagttccatgtagattctggatattagccctttgtcagatggatagattgcaaaaattttctcccattctgtaggttgcctgttcactctgataatagtttattttgctgtgcagaagctctttagtttaattagatcccatttgtcaatgttggcttttgttgcaattgcctttagtattttagtcatgaagtctttgcccatgcctatgtcctaaatggtattgcctagattttcttctagggtttttatggttttaggttttaggtttaaatctttaatccatcttgagttaatttttgtataagatgtaaggaaggggtccagtttcagttttctgcatacagctggacagttttcccaacgccatttattaaataggggattctttccccattacttgtttttgtcaggtttgtcaaagatcagatggttgtagatgtgtggtgttatttctgaggcctctgttctgttccattggtctatatatctgttttggtactggtaccatgaaattccgagttgaaaattctttaagaatgttgaatattggcccccactctcttctggcttgtagggtttctgcagagagatctgctgttagtctgatgggcttccctttgtgggtaacccaacctttctctctggctgtccttaacattttttccttcatttcaaccttggtgaatctgacaattatgtgtcttggggctgctcttctcaaggagtatctttgtggtgttctctgtatttcctgaattagaatgttggcctgccttgctaggttgggtaagttctcctggatgatatcctgtatgatattctggatgatttccaacttggttccattctccccatcactttcaggtacaccaatcagacatagatttggtcttttcacatagtctcatatttcttggaggctttgttcattccttttcattcttttttctctaatcttgtcttcatgctttatttcattaagttgatcttcaatctctgatatcctttcttccacttgatcaatttggctattgatacttctgtatgtttcgggaagttctcgtgctgtgtttttcagctccatcaggtcatttatgttcttctctaaactggttattctagttagcaatttctctaaccttttatcaaggttcttagcttccttgcattgggttagaacatgctcctttagctcaaaggagtttgttattacccaccttctgaagcctacttctgtcaattcgtcaaactaattctccatcctgttttgttcccttgctggcgagcagttgtgatcctttggaggagaagaggcatcccggtttttggcattttcagcctttttcactggtttttcctcatcttcatggatttatatacctttggtctttgctattggtgaccttcagatggagtttttgcttggtcgtccttctttttgatgttgatactattgctttctgtttgttagttttccttctaacagtcaggcccctcttctgcaggtctgctggagtttgctgggggtccactccagaccctgtttgcctaggtatcaccagcggaggctgcagaacagccaagactgctgcctgttccttcctctggaagcttcatcccagaggggcacccaccaaatgccagccagagctctcctgtatgacgtgtctgtcgaccactgctgggaggtgtctctccatcaggaggcatgggggtcagggacccacttaaggagtcagtctgtcccttattagaactccaatactgtgctgggagatctgctgctctcttcagagccagcaggcaggagcgtttaagtctgctgaagctgcacccacagctgccccttcaccaaggtgctctgtcccagggagatggaagttttatctataagcccctgactggggctgctgcctttctttcagaggtgccctgcccagagaggaggaatctagagagacggtctggctacagcggctctgtggcactgcagtgagctccccctagctggaacttcccagtggctttgttaacactgtgaggggaaaaacatctactcaagcctctgtaatggcaaatgcccctccccccaccaacctcaagcatcccaggttgacttcagactgctgtgctggcagcaagaatttcaggccagtggatcttagcttgctgggctccatgggggtgggatccactgagcaaaaccacttggctccctggcttcagcctcctttccaggggagtgagcggttctgtctcactggcattccaggcgccaccagggtatggaaaaaaaaaaaactcctgcagctagctcggtgtctacccaaagggccgcccagttttgtgcttgaaacccagggccattgtggtattggcaaccgggagaatctcctggtctgtgggttgtgaagagcatgggcaaagcatagtatctgggccagatagcaccatccctcacagcagggtccctcacggcttcccttggctaggggagggagtttcctgactgcttgtgctttccaggtgaggcagcgccccgtcctgcttctgctcgccctccctgggctgcacccactgtctaaccaatcccaatgagatgaactgggaatctcagttggaaatgcagaaatcacctgccttctgcattggtctcactgggagctgcagacaggagctgttcctattcggccatcttgcctgggaacttccttaaggttttctctaatctatgccatgacaatctataactctagattcaggaggaacacagagggatagcagccaacagaaatcgtaaaggagaagtaatcatgtctgagcaaagctaaatacgaaagtaaagagttgggatgaaaatcatttacctcctgtgtagaaatggaggttgaaggagaacaggagaaatgtggagcccccttttaaaagttccctccctaaatcgctgaagcatccttactccattaacaaccagcttttgcttttaaagcactagttctcttggtatttacctccagcactgcaacagaaaaaaatttcagcatatactgaagaacttgtaatgatcttttaagacatgaatcccccattcctagagggtgagtgtgcttcctaagaactattctggaagcaaaattgacagactgtcacaggaacagagagattccagtttttcctgcatcggggtggagggtacgggtgggtgtgtcaaaacatcactacattctcccaggttggagccctcattccgttctttgctggggggagatctgggttcttctcacacacatgcttgtctctgtgatgtaggggaggcccgagggcaggccaatggcagctgctgcccagccaaaggagaggaagctagtttactacaggatataaatagagtgacagagcccctcacagagggatgtacactggaatgtttaaaaaaaaaaaccactgtagcaggggcattattcaagcatactgtataagggccaaaattgcttaaaatggctttcaaaaacataagtctgagattgctccttgggtgtgttatttttatctattccactgggattaagcatggcctagaatcccagcttgaaaggggagagccaaatttgcactacctgctatctctctgtatcatcaggactcatcttcagaaatctggacgtggacaccactgacacaaaggaagcacaattaaagcctgagaagaggccggtctgcgctctcccagagccaaatgaaccctcccttgctttctccagtctccagccctgctcagcgaccctgcctttgactgacatgtggcattctcgtcttcatggacagagaagccgagctctcgatggttatcgacattagaaaatgtcatgtctgaatacgcttcagccggaccttcctcccctacttcattccctgcctcccgcccctcagtttattttaattatacaatgaaaactctcaagtatggaatggctgcctgctgtatcacacaagcccttaattgtactctggagttggatcatggcattttatcaccctgcaatggtaaaaggcacatttgcaacaggagtaggtcatggaatattttctggaaatgccaatggatttcaaggcccttccttttttatactagacatttgtgatttttgtctgtgcatataggagaatagtaatttatatccccttttataccttttcctgttctccttacaattctatataattccccaacttattctttacattgatgaatattaatgacttgatccataatcacttgtctcttatcaatccacaaaagcatttgagcagatttaattttcgaattatcatagtttccacatcgtgatggcatacccatttatcattcttctagttcctttaaaacgttttcattatgggcaaggtgcagtggctcacatctgtaatcccaagcactttgggaggtaaagatgggaggattgcttgaggccaggagtttgagaccagcctgggcaacacagtgagacccccatctctacaaaaacaactttttaaactttttaaaattaaaaactaaaaagaaaatattttcttcaggaaaaagaacagatcacaatagacaaactatgttcaggctttttccaaaagaggccacttcaacaagtaagataatttcctagaagataaaaaggtgacccacacccaatctagacatggctggccaatgtggtactttggtttagatgtctatatctgcctctttcaacaaatacaggctttcccattgtatctattcaataaatgttcaccaagtaaatcttctcagtcatgaacttcaaatgtgcgctaagccatacacaccctacccatatttatccaagaattcccctgctctagttgtctcatgttagatattcattccctaattcacactaggataacaaattctctcctggtaaccaccgctccctagctcaatccatacttccaggaagaactgtgttcacacagtttataagtcatgctcccacagcagtatttgtcacttgacaggttcacgttgtatcacttttaagcaattcccagtggtgtacagtggtgcctgttcacagatgtttccctaatattgctaagtaacatcaaaagtttcaggctggcttccacacaggcagtgggctaaggagacatggattacccatgctcttctatttcctggcccaaaggtctccaattaacactgatgaaattggcttctcttggcactcctgcctacttcccttagatgttattcacttcaggacttgggcagaaacaaggttttatgtaacaacatcattcattaatcctaagtgaatgtacccaagaaaaggtgctcaaggtaggctaaagtcctagagtcagtagccgatgaagaatagtaacctgttcttcacactgccatttatttcacaacaaaacttcagtccaggcagagcttccactatagcagtccaaagctttccattgactactgctagagtccagcccacacaggaccagaaagaagtggatttgtgtgagaaatgctccgcccagtgtctagcacagaagaggggcttaataaaacaaattctgagatctaaaaaagaaatacaagaagtcttacgagtaaaattggccccgttctgaggaccatgcagaaagccaaagaagtacttcctcagtggcctgggagacaaccttctttatctctgacattttactctggaaaaggaaaaggctataaatgagtggcgggaaccatctgaaatctcatcatgactataccaccagcatgtggagagtgtatttggtggagtttgtccaaaagtcatccttccctgttcactctaacccatagtcactcctacctcaaatctctattccaaagtaggaaacttccaggcaggtgaggtattcaaatgaaaaatgcaagcccgggctacttagctctggccaattgttgccatgtgggatggctggcagcccatgttggtagaccttctgacttttcaagagaagatggaaagtcagatttctatataaatctcccaatttttcaatattaactccaacttagaatgaaaaaagttcaagccaagtaaaatgcatctgactctgggttggtctgaacgcatggtttgccactttgcaatccctgaactctctaattcatgtggcactaaatcatacattacttttgcattatttcacttttcactttgcaagctgtgacttccaaattgactataaacacttttgaccctgacacacttttggctgggtgggcctgtgatgccatgcgtttactaaacagtggctctattatatattgccatgttgaacaatggctacaggcagatgtagcatttcccaaatgagagaaggcaatggcaaaagagggaacttggcgtcaacttgagtgaatgcccctccttctctactccattctttttttcctggcaggtgcacgttcacaatggtgatttctcatttaattgctaagtatttccacagcacagtaaaatccatcatgaaccagacacggagtatgctaattccccaatctctgataatgcacagattcaatggggtcttcttcccgccaatgtgcattcataaatgccattaatagtaatggcagtcaaatgcaaaatatgactaagtaggccctagtgcatgaaatatattctcaaccacaaggacaagctgccacacagctcactgccttgtactaaattaggggctggtgattctctgattgggaccaagagggtgataatgacaaataaaaagaaaaaaagccagtcctcttctctgcttatccactacgaagagtatccctgacttacaggtcagagacaatgaggagctttcaggcttggaaacagagacaggacacagaaagatgcaaactcgctgtcttgcagggaattagtgaaacacagctaagccagttcaacactgtgccctttagtcatcccacccactaaaagacactgttaaaaacccgccagcttttattagcagaaacaaatgaagtcgactaccgagcactcaggagtttttcatcctgaaagtccaggatggctttggcataataaaggtcatatctcctaaccacggtaatgttcacagagcaacctgagctccaggcagggccaggccggcctctcagtattccccctgtagaaggtgttgccgattaaactatcacatttcaaagagctccttacagtaaataggaaagaaaggaaaaaagagatccagggccttttgttagtcaaaaagctagggaaaggcgataattaacccatttttgtagagaaatcatttggacaaaagtcaagggatttaccaccctgtcaattgttaagtctagataaggacattatattccacggcacaaagggtgactgagatggtgaatggaaagtaggccactactactactttacctcgcatctgaaaaaggactttttttttgtcctcctggtacagtgatggactaaagaatcttctcccccttgcactaaaaacataacttcagagcctggtttttgcattttgttaaatattcaaaggtattgtgcaattagcatgtcattaatgaataattaattacagctaaagcagccctcagatttttgcagctaaattatttaaacagcaaatataacaatacaatgcaatgctctcatttggtgttttgttattgcattatttgaagggaacagcaatattacttttcattagttgcaagaattatgtgcaacaaaagctgttttcattttttttcttacctaaaagttgcttcgtgtgccctaaaagggaaaattaattcaattcagattagatttcctaagaattaattagctgcaaatatctgaaaactgcggctagggacataaggcttaggtatctgaacttaaaagaaaaaagtaagcctatttaaacctgtcctttaaaacaacttctgcaccaaagtaccttttttttagatatttggttaccacttttaaaagaggaaacttgtttaaaaatccttttttttttttaagcaagtgagcattacaaagctccccctagtaaacagtcaagagttaaatagaaagtaatttgttgctacttgcagacatacatcactagtaagacatgagtttatatttataagctgcacatctgggatcagttgacttatccatctgctaactacaccagtaaacagtatgtctgggaccgtcaaacccttgcatccatcacaaattcctgctttaattgtgtgtttacgtggcaaacctctgcttaagtatatttgaagactgttttaagcagttgtaattgctcctttcttcttcatattaactttaacacattttatttaccattatgacaggccgcgattttgcaagcctcatagatagataaatgccagagatcatcatgctacccaggaaaaggcagcagagggacagaaaccggagctgtaacctgtccagtccggagagtttgggcctctttcacaaaatccaatgacttgagtcacaagttcaaatctcagtaaggccagtttaatcctccactgtcttgaactcagaaagttgacaatcatacactttctttttgagaaaggagcagaagagagggaagggaagatttagggggaagaggcaaatcacagtttggaaagataaaatggtgccaggagttttccatctttttccttaattaatctgctgtgtaggagaggtgcatgaaagcttgagagatttgtaagggtagagatttttcaagccagtggcagagggctggaagttctcaggagccccagaatcaaagaggagtatagcctgtgacttgacttaatttttaaccctggttttataattgagtttcataagcaagctgaaaacacaggctcagaaatgaatgaattcagaagaaataaaaggctaccttccataattaggggaaaaatatgcaccattctctgcacaaaagcggggattttactgtatttttcccaatctgcctttcacatttatatgaatagcaagatgtcagatttcacacaatgttgttaaaccttttctcaggtttagggaactgaaagtcgtatgtgcctgtgtaatattgtgctgatgcaaatagttaaacttttctacacgattaaccatcattttctcagagtattctgttcacagctttcttccagtttcctgatacatgttgagatctatgcccgtgcggctgatggggtggcgtggaggttgtaaactgaagacccaccgcgaagctaaagagtcactctgacgcaatctagttaaatgacagtatggcagtaggccgtttacccaggccaaggaagctgtggcttgtcaaagacattaaaatccaaatgtgccagcaacggtgccaaatgtactctaggccttgcaaacacataatccagacaaactgaattaaattgcaaccagtttataattaatttgcttttgaaagttgtgccatgagaataaatgtgccaacaattatttgcaatgaattgttcttagggtgcccccaacttaataatgcctctgtaagcaagagagggtttggtattggttacttgtattggcattggcttctaacctaatgagggggtacggagaatttagagacagattccaggaaccttaacctttctgtcaacctaatggagtctgttaccaatgcggtcagtagcgtggccctgtggcctccctgacctcagatgccagcctcactctgcccaagatgctaagattagaaacatatttatctcgctgaggcactgcctttctggacaccattttgtaagcacaaatattcacgggaaaggtaaaaacagtaagagactaaggcactaatgcttcatgtgaattcatttctcataccatttttctctaggacttacggagccaagcaaagtgtgagccctgagtacatatgaacaaaaaactaaaataatgtaaaaagaagaaataatcctgaaacttaacatggagtgttatgtgccaagcattttttttccccaccaatcctcaggggaaaaaaattacagagaagtaattgggccgggcgcagtggctcacgcctgtaatcccagcactttgggaggccgaggagggcggatcacgaggtcaggagttcaagaccagcctggccaacatggtgaaaccccatctctactaaaaatacaaaaatcagccgggagtggtggcgggcacctgtaatcccagctacttgggagtctgaggcaagagaatcgcttgaatccgggaggcaggggttgtagtgagccgagattgcaccactgcactccagaatgggcaacaagagcgaaactccatctaaaaaaaaaagagagagagagagaagtaattgcagagtagatgtatattagaggcctcaggacttagagctaaaaaacagcagacgcaggattcaaactgagggctaactcagcagcctgggacctccaccttctgcttttcatatcaacaatggccatatctcactgctcctctctttccagagcacaggggccagagtgagacctggaatgtgactgacttttagaccagagctggacatcaaaatgaattccatcccattcttaattgtcactttggaagactgcttgagagcatttgcagctcttcttggaaatccaggcagaatgttttgagttcatctcaatatagtagttcccttacagggacgcatcatttctgatctaaaatgatctttaatcgactgatgttttacaccagcctcgttatcaaattactgctggctgtttccgaaactcagatcaaccctcaaagagtagaagtgtgctaccattgaggggagtcacaagaagatgctgcaggttcagccagcagctgaaaggaagagtagcaaagagttgcttagcaatggcttaccaaaggaggagtacctgcaggccattgctttgtttatgcaacaaatacttatttcttacagttgttacttatttgttacaagctcctgcttgaatatgccagatactgcattaattaaataaatataaatgtgtgtgtgtgtgtgtgtgtgtgtgtgtgtgtgtgtgtgtgtgtgtgtctttcagatttagaaatttgcccaaggtcacaaagctaataaatggcaaaggcaagatttgaacccatgtcaaactccagcaacacactccagtccacagtcttgtagtaccaaggaggcttctactttggagcgacacggtgtgtcacaggcttttcagatcaagttctatgctgcagtttcctttcactgagatgcagcctaatggtctctgaatgtttttcaccaggaggagaatgagagctgagagtaactttccctgaaaggacatttgtaaccattaaaagaaagagaactcaaaaagaagttcaagagggttttcaaaactggacttttaactggaagcttaattgcaggatgtaccttagaatgcacgcacacatagacacacacacacacacgcacacacacacacgcacgcacactttcagatattccttctaaaatagctcttgacaatttgtttcaaatcatgaaatcacgaccttaaggtcttccaagttatcttcaaccatccaaacaattaattctttgagaaagacatacttactaaaagaaaaaagaagttgaaaatattgaaaatattatagaaaggttccaatggaattaaccagaagagaaggttctagatgttaagcatgtactaccactcccactacctctgccaccaacacttcttttttttttttttttttttttgagatggagtctcgctctgtcgcccaggctggagtgcagtggcgcgatctgggctcactgcaaactccacctcccgggttcacaccattctcctgcctcagcctccggagtagctgggactacaggcgcctgccaccacgcccagctaattttttgtatttttagtagagaccgggtttcaccgtgttagccaagatggtctcgatctcctgaccctgtgatccacctgtctaggcctcccaaagtgctgggattacaggcgtgagccacacttctaatgaaaaatgctagcagctcccaattactaagaactctgtgccaagctctctgctgagtgctttctatacattataccattcactcttcacaagcgccctgtgagatagacattattatccccattttacagatgagaaaactgaggcttcataaatttaaacattacttgaacagccaataaaattatagatatttaccagacttttctgtaaggtattattaatacaatggtaagcactgtcatggatgcaagaaaatactggaatttaaatgacaaagattaagtcacataagaaatgaaaattgatgaggcaggtctaagcaggaagtcccaagagggcaggaaccaaatctgttttgttgcaaattaggtctggcataatatctggcctataggagatgctgaatcaacagttgtagctaaatgtagaaaacaatacgtagcaagtgagtatattagaactctctgaacattttatctccagagcacttggttaatcaaggttcaagaaaaaaatggtcccaactctgccactaccatttcaaagctccttgacccagggtgtttcaggtaagccatagttccatggcatgtgcctcttctttttatttgggtctggcaccagaggctgaatcagaaaatctccatttccctttgtccctattctgccatggacgcttcctctgccaaacatttcatagttcctttatggccgcatgatatttttcaagggaaatgattggcaaacagccaatacccctaatgcagaaaagatgccaacatcactcccaggtttaaataccttcaaggagaccctcaactgaagtggtccttacaaccaatctgactttttttcactctctttttgtgggaatatcttttacacgaggcttagagggaaaaaggaaaaaataataataagaaaacgtaaagaaaaagaaaacctgcctgaaatgaaaaattccaatcttgcctctgtaaaaatccttcaagcccagtcagctgcccctcccccttgatccaagcctctgtgtttcccggcaaagaggttagaaagctgttgaaaaacattctcctgctgaattgagactgacatctgacagagctcggtggtgtcctaacttgagtgaatttaaatgacaagcttggctttataagtaagggatcctcttttacaatagaacagcatgattgcttcatggcagagggggaaaagagggagaatcaaagttttcttcaaatccccagtggtgccattgacctgtcagaaggttgtgacccactcctgttaatccatgcaaatcagatgcctccaatttgcggtgctgattggagtaccacacctttaaattcaggaagcggccttagagtgaggttccgatcacagagttcagttcacctctcatttttttcttcttcaaaaacatgatgacagctgacttccttcccgccctgcccttactcagtcagggaagactgtctgatggtttcctgattagcatcaaggcaaaagcagcatgtttttcataggctatcgctattacctaaattataggcctgttgctctcagcattttccccccacagacaggttaatatacacatcccactggtattattgctttgcgaagtcacccagtcatttttatgacatagaggggagaaggcctggaattccccggaagaggcttcagatccagatgagagactcttacacaaccagaaacgccgttttctaaccatcccattcaaaacttaacaacacttcccacgttcaatgccatgtgccgtgcatattttaaaccatgggtaatttcaagcagaaacattcagaaaaagaaaatgaaaaggctggtattttggatatcaggaatatgtgattgcccacacgattcgcacattactcaagttgtccccaagtcatcttgaactggctacttaaacaatgtaagtgaccagaatttttgtgcatcatatcaaggtaattcaaaattctagtgagaggagggattatttaaaggacttcagtgaatttgcattttccaaagcttggaaaataactttcttaaagaacccctgaaccattaacatatctgaggaataaataattgtaataaccatttgcccatattttagaaaatatactattcctaacaccaaaaaaagatgccaaacataaaacaaatcgaaataaactaaaacaaaaatataaagaaaaactctagctctacttaagaattttttttttttttttgagacggagtcttactctgtcaccctagttggagtgcagtggcttgatctcagctcactgcaacctctgtctccagcgttcaagagattcttctgcctcagcctcctgagtagctgggattacaggagtgtgccaccacacctggaagatttttgtatttttagtagagatggggtttcaccatgttgaccaagcttgtctgaatctcctgacctcaggcaatctgtctgcctcggcctcccaaagtgctgggattaccggcctgagccaccaggcctgttcaagaattttaaagacataaataatatataattctttcaaaataggaagacttttaagacaaaagaatatatatgtatgtatatatatatatactttcaagatagaaagactcaatttagtagagatgtcaacttccctagtctttaatacattactcaactttctaaagacattattttaaccaaaaatatgattcattcatatacaagaataaataagcaataatagtcatgaaaatgggggatgattatataattaaaacacattatacagccatagcaattaaaatcatgcagtaagagaatcaaactagatcgaccaatcaatggaacagaacagaaagccatgtgcctatatatccctagttagggtggctattcaaaatagcagaattgacacctacattgtccctggagctccagtctggaagacataataccacactcactcctttaaatgcaccagagaagcccctttaaattgatagagaagggtctgaactgagggggaaggaaaggaggggacacttagagcagcagatatttaccaatcagcatggaagcattttaagattttaataagggctatagtcatattgtaagtatcagtggaatatctaccctatatttactgataataaatgaggcattctaaatcattaagagaaagtgagcttattcaaaaattgccacttaaataaatgttattcagaaaaaaattgctgtatctaatttatttctaaaaataaattatagaaacactaaagaggttacatgtaaaaagtgaaatcaacaaagaactaaaagaaaatataggtgaagatttatctgaccctagagtaaagaagacattgttaagcacaaagcaaaagaaagactctaaaactggaaatgattaatagacttaagtatattaaaattgtacatctctgtaaaaaaaaatttaaattgaagggcaaactggaggaaaatgtttgaaaaatgtttttaaaaaataggttctctaatggtttttaaatatatccacaaattcttcaagaggtggaacttcgtttctctctcctgaatgtgggctagagttagtgacttgctcttaacaaatagaagaagacaaaaagtgcaatgtgtgacttccaagactaggtcaaaaaggcctgtcagtttcctgtttgctctctgtaggctcactcagtgtgggagaagctggctgccatgtcatcaggatacccaatcagccccggaaaggccttgtatcaagaaactgaggcctcaggccaatagccctgtgaacgaactaccttggaaacagatctcccagccccggtcgagccttcagattgctacatctgacctgaaattcttgtgagacaataaatgtttattttttgaaacctaaataaaagcccataagggaaaaaaataagggagaaaatgaataggcaattcaccaaaatatgcatataaatggccaaaaacacaaagaaaaatattcgagctcagtattcaacctcagcaataatcacaaaatataaatactatatttcagtttaccaagttggtacaagtttctaaatgaggtcctttgaggacgccagtgaactgcactgtcttaacacatagtgaaagtgtaaacagtataacctttttggagggcaatttagccacatatatcagaaggcttaaaaatgatcatctccttcaattcaaagattacactttgaggaattaagcttaaaggaaaaaaaaatcatattcaacccaaagatacacaaggtggctcattgctgattttaacaattgcaaaaaattgaaaactgactacagactctacaacagagtaaataacttatagccataggatgtaacgctgtgcaactatgtgtttaaaaaattatgagatacactataatattcacaataaaagaaaaaagcaagtcacaaaacagcataatccaattttgtaaatacacagttctgatatatacagagaaaatattctgaaaaaaatacagatgttaaaaagatgatttttccaaatttttggataaaagataattttttctttccagtctgtattcttttaaattctctacagagaatgtaagttactcttttaatttattttctaaaaaataaaaatcattttaggaacaagagataaattatgtgcttaccacctaccactaagtaaaactccgaccagtggaggtcatttctattttctcaataattatttctttatctaagcttctgagggaaagagagcgaatttttttaggaagagagaaaaatgaaattttgaaatcctagaaagtcttattccagatgaaacagggaaagcttgatactttttgtataaacctgagtggttagtggcacaaatgcatcaaccccatttgtttacaccttgcatctgtgccgatgcacaggccgatcaaccatctttccatacaaacgctgaaggttaccaattgtcacaggtttggactgctatcgatggcagcacaggactgtgtttaagtgatctgataaagccggtggcagcttgaggggcggtatgcttccaaaatacgtaaacaacattgtcaacaactagcccatcccataaatgtagcccccttctcagatgttttgaaaataaaataggcatctcttgcttaccttcctgtaggccccaaacaaaacaaacaatcacattaaactcagagcttccaattcaaaagccttggaaaccaagccaataacataatgaagtgaagctgccaagaggctggggaccgaggcaagcagaggaccatataccccatctacaaggcaacaacaccacaatggccaaacgaaacgcttccccaagctcaatatgatcacagttgccagtttgcaactttgactctgcacactccctaggaagagtttctagaatcatgaagtttctcagtgctataaaccagagtgtcattatagaaagctttgttttatcagagtacaacttcttatgttctattcactttcctcagttaactagcattgctttctgtactgggcttataagagaatgaaagtaaatactttttaaagcctacaaagcccatataggtacttacagttcagggtgaagaacagtatattagaagtctgagagcaaggtataaatctcgcctgcgggactaaaaaggtataggacttcgagccatctctgcagcctccctttccacttctttaaggatggggttttatcagatcgtgggtaagtttcatactgactcaaaaggcccacaattctaaaatttaggaaaacaactcagtgacaccccagagtgagttcacatctagcccaacctcctgtacctcctataacactgccctatagacagaccactatttaccaaaaaagatgatgaaatccttttccaccagcaaagctgaaaaagcataacagatcactccatttccctggcattctggccagtcaaggttttactacaatcacgtatctccttaacttcttcggtggcttatagcttatattttcacttacagactgtggaggtccaggaatgaatgatattcactaaagaatactatcctcaaatgtctgttccaccactagccaattatggtatcccaccagatctgaatttctaaagaaaggttctctacacactagagtcttaaaaatgttcagaggtttaccacaaaaaaaacaaacattttccaacagatttgcaatgatactttgctattaacttttacggaatgacagtacaggttctttgaaggtttcatctcctacattggatgacagtaagaacatcttcagaactgacccctacgacatgccacaattcaagcttagagaatactccgaagtccatgacaaaggcttctccctccaactgaaaaaacaactttcctacctcttctaccagttataggcctctgcctacacacaaaacatatcacaaagcatgcaatgtagaatcacaaatagaacgaccccagggatcctgtgcttttaaaggtgctactagggaagctggtggtcacctgatcccctttgtaacttgggtaggaaaaaaacaaagatattaaatcgaaacatttaaacatgacataaaaaggcacccatccagctattaatgaatggcagtatataatggaatatctaacgaaagagtgttggaacattttctctgcacaatttctagtgtaaattcttgttgaggtttattgctttgtttccttcctcccacatttattgatttcattcttggaatcagacatagtacttggaaacaaaaataggaagacaataatatcctgcaccctgccctcaaggagctcgctgctggggatggggggagttacatggtaaactgttaccaggcagtgtgaaaaatgctatgacggagaaagagtgcacacttgtaccctaagttgatgggtccaagaaggcccctttgagaagttaatgctgaatttaatcctaaggataagtcagacacagcaagatgaaagctgaggcaaggagaaagctaagaagagtataccagttataggggaaaacaggtgcaaagacaaaagcaagctcagagttcacggtgagtgtgcatcagtgcaaagtggtccaatgtaaggaggggagtagcaagaaatgaagccaggaaggacactgtacataactcttaaaagcttgcactttcatctctgggacaatgaggagccaggctgtccaagtgggagccactttaaagcagaagagtgatgtcagaagcatcagaaagatcattctagctgccgtgtagacagcaaaccgagtagggttaagactggaggccaggagatagctaagaagttactctagtaatctggatgagagataatggtgaattcaactcagtcagacaagcagaataaaatggaaaggagagaacaaacatgggagctggttagaaggacccacaggtatggagaagctcgaattgataatgacagtctgttagggtctctgtaagcacagtattctctacctaaggcttccccaatcccagaaatattatatgatcaccaaagcccagggaaattctctgagctgagcttggaaggacccaaaacaccaatatgtaatcctttgagttccttaaacaggtagaggcccacgtataaccaagtgctctaattttcatttctcttggtacagtgtttactccagaggagcaactttccattttttacttgacacatgatctgacatctgcctacaagtaaaaaaataatatgaattttcaagtagtggaaatgcaacaaatcatcaagatgtgtaagaatatatttcacatttgtcaaacagatctgacttcagtaaacagagatagcttaacatgtgatgcgtcaaacaaataatccaacgtgttgagatatttggtaaccagactagagatatcgtgttgtttgttgaaaatggccctgaactatgagtcaaaaactttactttttagctctggttgtcactaactcgttatgtaagttttgtgctcccttgcctgggaataagggagatagaataaaagagcttcaaggttcttttcaacccagattctaggatccacctccatattatacggtggttttctaactgtgtggccacaggatccatgtggcataaaagctcttaggtggagattcaaatctcccatcccctttgctttgagcagtccccttacatcttttatacatattgtttgtttaaagaaaggttatttgggaaaaaaaatgcttgcaaacttgtgctcagtggatttgcctattttctgaaagatcccaattgtactttcattcctaggaagattaatatcatgcagaagtttaagctttaacagagagtagagactgctctgcagctttggatctttgcaattgtttttgaaaatccatacagttaaatcacggtgattcacttatgcaaattctgcatttatcccaacctctaagccttctgtggcatttgagtttataacagcttttgtaaatgttgatttaagatttgggattaaagaaggaacacaccacctgtcttaaagttgacataaatgttataaaatgggatgctacactttttctaatccttgtctctaaccagacccatatgtaaatttcacatagtagtatttagtagcataattaatccctactttatgttatgagtaatatttcctattcccgaccctgtaacgtcctttaagaagatccatgttccaattagactagcccatcggcactcttttaatgagcagattaatcattcagatgggtacaacggtgtcatcacaggttttaaatatgataatctacatcctaatggtgctgcaaaaccttggcttagagcaaaaaaggtagacaaaattggtgagggtttcattttgttctctatctgggacaaggtagaacacaggaaaccttgagtaaggcagaggatctgatttgggaaagtaatcttaattcagttacaccaattatttctagaagaagtaacattggttgcttccctaaaacacacactggtatttgtgactcttgggaaaatgttttatattttcttgtccaaagagcttttcttttagaacttcacacccaactttcccttctaagaaagagtatagaaagggaacttccaagtaacagcggttttaaaataaagttaattttgattaagcctgacccatattgaccaaaaggttctgccacacaggtatggaaggagaaaaagaaaaagtccttccaatttgatgatcactttttcacatagggttataaaaagctatttatttttctatgccttcatttcccctctctacaaaagcagcattacagtcaaatctcagacagcatcaattctctgggcaatagatggcaaaaccactgaaaaataggctcacagagagaaatatcaataaactggaattggcgataaatgattcaccccgacaaaaagtacactcttagaaggcaattaatagacccaagaaactcaaaccaaacacatattctttttcctgtacctcctagggctttatcgtaactaccctgaaagcaagttcctttttgaattcttacactgctatccagcttcccccatctcagttaaacttgtccccccgaaagacagccacctggcttggtactgaaaaccaggtccaaatcacctttttagacaagcaagtcctgattatatttttaatacaaatagctgaaggccaattcatctgtatctacagccaagggttagctgccaagaaatctccaaagagaacataggcttacttaagcagatagtgaaggatagtaatttagggcagatgtcaagtatatgataaaggaacataatgggatggtgctgttaatatgctcagggtaaccccaggttcatcagaggcatctgtaataacaacccaagtttctggatctacacagataaaaaaaccttttcaggaaataagagatttgggggaatgtacttataaggggggtggggaaggctgctccatagtgataacttcatcccttccatttaacaaatgcacagggagctcccaggagtgctgggcactgtacatgcagtagtgcaggagagatacaaatccccctcagatgatttcatacagctctgtttctgttttgaattataaggtgaaaaatattcttattttggaaaggctaaactaaaatacaagtttcattctggaattatggaccagaatcaatatgtatctttaccgtaaaatggagcccttttctatggaacacaaaagacgtctttattaccatcaagatgcttgttgtaggataaagtttctctttagtgctactcccatacccaccttccagcctttcaatgctttccctatcaaaactggctcttgagataatctaaaactcatccatatacgtatcgagtatatgtttggaagagggcagagagttatgtagttgctcagaagccaaagaatcaatatggtaggatttcagacagcagcaggattacgaagaaaattttagagagggaaagaactgcgtgaggtggttttggggaatggggaagtggggagggatttcctgtttcaatattctagatttatcactttggaagtttctttaaggcacatgttagccctgcttctgaacacccatgaagtcaccactgtgagtaaacatgaattcaactagtttccccctagggcaatgattcagccaaaactacaaaagggctgaaatttcccaaactcagaaatttcaaaaagttgtgaatgaattacacatagatgctattgagaacaatggcttagtatctgtccacaggaaacattttgtaaatctagaagacctgtcttgaaatgtgggttaaaatatgcaactcaaacatgcttgtctccagtaggtttaactcattcccgttaagtaccacatcatggaaaaacacatgtcaacaactacaaataattgcaaaaaaaaattataaattagttctagatgtctaagtcagtgcgattcatttaatgcttccactgagatcccagtccaagaagagttaatcaagcatagcggcttcctaatcagaacagtgaactaatgatcctatttctgagtaataccagtcagataaagctctcaaaaggtagttaacatcactttggtggaaaggaatgacaagtgcaagtcctggtaggggtaatgcatcattcatgccccctctcattctgacattttaacgttatcttgttttactgtgtcggcctaacactgccactgccggcaaattaaactgtgaacttacaaagtgggtggcaataaatacaaattatgagagttcaaaagatgtccctggaggtgcactgctagacacagaatgtctcttgtttttctgtcacatagcaatagatgagagacaaagtggaacaggcatttttggagacaggaaaaaagagaaagaattaacttgctgctgatgaaatatcagataaaaatgaagacaaaacacatacttaaaaaattgatttgggaagaacataccactgaaaaagagaaggggcctcaaaatgctgtgtaaacatcaaaggacttatgatcaacttgtcttttatgaaaacaacttcaaaaatcatttttgaaattgaacagggtatttgtaaattatcaacactaatagctatgtattccaagtaaaatttacaatgagaaaatatgcattgatgccacaaaaatcttgttccttgtataaagttgtgaaatgacatctgaagtccctagcacccctcccagcccagaaaaagtaagaaaaaaagaaaggaaatttgcttcttgtaagtaattctggatgtaccaacctagcctggataccactgaaaatacaaatatcaagagtttctcaggattggctgagcacggttgctcacgcctgtaatcccagaactttgggaggttgaggcaggcagatcacttgaggtcaggagttcgagaccagcctggacaacatggtaaaaccccatctctactaaacatacaaaaattagcccagcatggtggtgtgcacctgtaatctcagctacacaggaggttgaggcatgagactcacttgaacctggggggcagaggtttcagtaagccaaaattgcaccactgtgctccagccttgggcaacagagcaagactcggtccccccaacccaaaagaagtgctcctcaggaagcatttgtaggctaagaaaagagactttcaggaatcttaatttctgcagcaatcccatgtgccttcctggtcacagcatcctcaagggtcaatgggcaaagtcaaggagaaaagaataaaaattaaaatgtccctagaaagactgctaggggccgggggctgtggctcatgcctataatcccagcactctgggaggccgaggcaggaggatcacttgagcccaggagtttgagatcagcctaggcaacatggtgaaaccccatctctacaaaaaaaaaaaaaaaaaagcaaaaattagttgaacatggtggcaggcacctgtagtcccagctactccagtggctgaggtgggaggatcacttgagccctggaggttaagcctgcagtgagctgtaatcgtgccactgcattcgagcttgggtgatagagtgagactctggaaagaaagaaagagaaaaagaagaaagagagagagagaaagaaaggaaagaaagacagaaaagaaagaaagagaaagaaagaaagaaagaaagaaagaaagaaagaaagaaagaaagaaagaaagaaagaaagaaagaaagaaagaaaaaaaaaaaaaaggctgctggaagttttgcaaacttcaaatgcctacaatgaaaattggaaacacaccccaaacaaaagaaatctgcccctttttaggcacatgaaaaatgacaaacctaacccgtactacagccagggatcagattttttaatatcacctaacactgagactttttttgctctcaatttggtcaagttccactaatgaatcttataaaatattttatctgcctattccatgcccacaaaccactcacaggagacttggaaatcatcatttcttccagagtgcagatatcagttgggccatatgcaacaacggtctgtttatttttcccataaaccaccggtttcatagaaactcattagcatcacctgtgttaattacactagcaaaccaatcaacagctccttcttaattaggttttctttattaaagccggaaattgccaaggagacaaaagtcacctggggaaatcatgtgaaaaggagtgtttatgccaaattacacactaaaataataataaaataacccagtttgtttacaggaaaaggaaacaatattaatattcaaggtcactggcacactccttattaattattctcattatattacattgtgatcatttctgcttcaagagggttggcttatagaaagcctttgtactcaaagttgactcacatcagattttaatggctgcggtcagcgattatgactttcttattccataaacacaagcacctacgggttaaagcagttaagactaatttcatgagctcatgtcccaactgtaactcaaaatcctgtatgtctgttagtaaacctagaaaggcatataaaaatctactataaaaggaaaagatacacatgtgactcttggaatttgtaattctcctaaaagagaaaggaaaaaagacttccaaccatattcctctcacttccaagtgcctttcagctgtagggaggaggagtcatagcactgagaccacaaaagtagcttttagaaggagattctttctccaagtttagccttacagggaggttcccctgggacatttaaaccaagactggtcaaagcactagaaagtagattgcaggagcttctggtagcatggaggtgaagagggaggggcaataccgggtaacctattaggccttttcatcttcaatttactataatgctaagtacatttatcatggactcaaaatctatcttcggaataatgaaatctgggcacgcccatctgtaaagtggggataacaatgcttaacctgattcttgcaagaagaatgagttcatatttagaaagcacgtggatgatgaaagtcacagagcgagcgagcattgatctgatttccatgggtctcggaaaatagcctgtccagggaggcccatgaattccggcactgtgtggccagcccagtgagtgatggtaaaaagtcaactagacttggaagctggaccttgaagaaaagcaaatggggactttaaacaggcaaacataaacgaaataacttcccggcatcaaggccctggacccagcagtacaggctgtcaggggactgccttcttggagtcgtggttgcttttgcttcggttgcaggacacctcccgcccaggtcaaggctgaagaggttccatgacttttcactaaaaatcagagtgtttgccccaagatactgagaacctctgttttctagaataaatgccataggaggaaattgtcaaggagatgaccaaaagaccacaggaaaaacatcacaagcagtcccaaagcatgaagaggtctaaatataagaagatttttactgtggcctctaaaaagcccacagaaccaacacgcccatccagcactgtcttcaagagctaagcctagggagtgctctccctcacctccaccctggaaaagtgccgaggacctaaagtccataacattgaaattgcttcttagtgttcagagattaatattaaagattcataccaaagactatagccctaatgctagaaagggaaccagaagaaggacactcatgtatgggtaacaaagcatttgaatgtgaataataaactatttcttcctcttcatcattttgcaaattgccacaatgaattttaaccttccttttggagaacacactgggttctctagagaatgaaacttcagcttacacaaaagccaaggtgtccgtgctgattgtccatgaagggctgatgacctttgtgggaaggtgctcatcctgacaggccattgtctttcctgcccacctcaatctgtgtccccagctgctctttttccctccctgctcttccatctacccagctggatgccctgtcactcagccctcagctgactttatttcagtcacctgcccatattacccacgtactgtctcgtatatttaggtacacagttgtcacataaacatagatggtttcgtggaaactgagtttgcaatacggttgtcaaagcggatagatgtttaataagtacaatggatctgttcccaaaatgcatctttatgaatcatgatcggcttagccatcctgttagtggaactgacccagaagccattctaaaaacatcaaatcactagttgtagtggtcttaaggtttcactcaggaaatgtcagatgacctggaatacccaaagcctgttgttggaaacgcttccctttagtttaaggcttcttggcttaacgctaatgactaggtggatatcttcttcattgcttggaaaccttcttctcatctatttgtcctccactttcgatggcttccgatctcactcagagtaaaagcccaggacctccatagcgcccacggggcccaagaaatggccccaggatgccttgggcagcgccacctgctactttcttgcatgcacgttctgctcctccccactggcctccatagccttcctcaaacctgtcaggcacactccctgcagggcctcacactgcctttcctgccctgtgtttgcttcccctagctatccgcaaggctctgtccctctgctccttcaggtcttggctcaaaagccaacctatcagtgaggctttttctagttactgtatttaaaatgacaacttcagcccctccccaaatatttcttcaccctatttcccaaactattttccttgcagaattcatcaccatttgacgtactggatattttactggtttgtgtgttgattgtctgtctccctgccctagaacgtaagctccatgagggcagggattttttcactcttttatttgtgctaatccccattgctaagatcagtgcctggatcttgaaaggtactcagtaaatacttgttgaaagaagggaaggggaggagagggaaggatatttccaccctcttgatgcacctttttatttctcctctttctagccttttctctcttcatcccctatttccctctctagaacattcttcacactctcctaccccaatcccaccccttcacctacatgacttccattcttctttcaccactttctcagaggtttccctcaccttcctaaccagctcaaaccaacacacacacacacacacacacctgctgccttcattagataggaccagcaaatcacccagatatttggcgtcctcccttttgtaaacttatcacattacagatttcacattcaggtgtgtgaattttaaatttaatgtctgagctccagaacccccaatctcagtaactataagttccatgggagcaggaccctattatcattatacccccaagtaactagcacacagaaggcatgcaataaatatttcttggttgaatgaggcaaacatttatcttccgtggtaaaaattaattcatattctattcttagctaaatgtcccataaaatcctcaataattcctagtagtagtagtggtagtagcagctgtggtcattgtcattgttgttatcacctgcatgccatcttctggttctcaccacctctccccacctgggccagctccctcagtcttttgccaccaccttgtaccctgaggaaatgcacagacacctagatcttatgaacagcagttccgttcttattcctaaatcattttgctggtgtttcgattcattcatgcctccattgtagatttgccacagtgaacgtgtttgtaggtctgcatgctccccaagggcatagatgcagctcatcctcttaatatctctaattcctagcacaatgatacagtcagtacgtttgaataaaccaacaagtagttgccctattcagactgatttctagccctccatgattggatggcaacctgtggttcagagaacccaatataatcagagccttctctttttaaaaacttcaggcttgaggcagaaagtctggaaaattacctaaacctttggtaacctatgttcacagcctcaaggaaggtagccagtgtttctgagctttcaatcctgaaatttctcagttgccacttgagaggcattgcaaaaatcctcaactctgaactgtctcacttggatgatctgtctaaatttcaattgttttgcataatttcttcaagtttattggtgagaaaaaaatcctcattggaaacatacacggcttcgagatggagttttctttttgtagacaatttcttgaatacacacacacattatctccctgataggcaataatggctctttaaggcgctgtcatgatcaatcgtaaaaatacatatttagaacattttttaaaatgtgtgtattataaaaatgttttaaaatgaaaactatttacccaaaagactataatggttccaaagagtattttgtaaatccatatttgagactttaaggagaaaaaacagcaacaatttctgacctgggagattataaagacttcactgaagctattaacatttattgtctttcaaaagctaaaaacgttgctggggacatgcttgcaggttgaagaaaaaacacagcccatcttctaacaaagggtcttcgatgcacctctctgtcctgccccaaaggctgacagacaccagtccattatactaactaatggcacacttagaagaaaatgccatccagagatgttagcccagggaccttgactaatgggtactgtctaatgttcaaagaccccatcagctctggtcactgatgagacattctaagagtagtgcattaagaaccttggtagagaaagtcactgtgggaaatctgataggataaattgaatatttgaggggaaaaccctctttatcccttttgtcccaagcctgattcaggaaaaaagaaatgattaatgatctcacattaaaacccagtctcctacacctcctgtatctctttccatagtcctgaccccactccccccaaaaaatatttgaataagacccctgagtcctaatacttagtacataccgtatgctgtgtttactgagacaagaaaacaaaagactttctggttcacagggaaaaaatccaggtctgttgaatagcagaaaaatagatcagatcagtgctaaagttgtgaatgctgtgtggtgtcttcatatattttccaacttttttaaacgaaagagtttttggtgttgtaaggaaaaaaggagttgggagtgaaatgaaagacagagagaggcaggaaaaaaagagtgagagtgaaaggaagaaaagaaaagaaaaagaaaggctgaaagatttcaggcatctgtaatattatatgctaagtgctggcctgaagcaaaatgtcacaagcaacctacaaatggaagtttaaaatggaaagagggagaaacttatccacagccacatgagaaacactgttggacataaacaactggggggtcagagctggaaggggctcacattgacacatttttcacatttttatattgtagaattcacaaatctctacttggcttcctcaaaaactttacctgttgggaccgaatgaccagctgggtttgattaggacagcaagcacgcccccatcctctcattggagatctgggatgattggactcagctttacaccaaaggaagttaagtccctaatagttaatgaaacgaggtgatttcctttcttgcacctgaaataacctgcctcccagagcctgtccaatagactgtctccaaaagcaaatagatccagcaaagagtaccttcaaagccaagctttcatttattgtcaagacagaatgaaattggtcctttttatgtaacacatgagttaggctgacctagccattcatacatagcaaagtagtgattcattgtgttggcttttttcccctctcctgtaatgttacaaaaagaatctaaataactcaagggctcccaagcctcttgatgagagtacttagctcacatcaatggtaatgggacttaaacctaggcattttaggcagaatggatttctttgttgggtacttttcctcctcccctcaacccccctccagcttgatttcacaccagttatgtgtgcaaacccacaataaatcactaggaatgtaaaatacactacacttccccacccccacccccaagttggcctaggtcatttatcattctgtggatttcaaaaagatggtagtgtttttattgcaaaggccttgtcattacagaaactagaaaagaaagtattgatcacaattagatcatatattagcagccctgatgctgggactgctaaggatttcaacctagatcattctgccctctgttaaaattctggacagcaatttcttttatgttagaataactagtataaacccataaaatgtaacctaaaaatgtaattataattgccatgccaaaagcaagccagtcaatatctttgagattctaatagtttcaagcactattaccttaacggtctcacatcacagtactgattaaagaaacattttgtatttttatctgtatggaatggccagtgtaatcactgaggcatagagagctaaaatatttattagtgagtatacatcttggttcaggcagtgaatgtcaatttagggtggaaagttacagcagagctctcagttcaattcattttcaggttcttctactgctcctggggtagtcatcccatgcacagaaggaaatctcagaatctgcccctacacccaaatgaactcctcctgcagattttccagtaagaagctcttgttgggaaatttcaaactggtcttaaatggacagcgactatcatggaaccagagtgaaccaacacacctgaaaggaggcagagctgagtagatgcaaaccacaaagtgaggcccgcctgacagccagttccccaatccacccttcttatccctcaaaacagacaagcaagcaaaactattcatttgaaccttattgatttaaaaataatgtaatctaaaatacattaataaaaacctatcattctctcacagaatacataatctatgatttatagcttggaaactaaatactaaactcacaattagaaagtacacgtaaagggtttctttaagttagacacttaatacggtttctttcaacaaactatgcaatctcatgacatggatttggaatgtaagaaatataaaaaggtgtttaaaaatgaacagaatattcctgatcatttctctgagaattaaaaatatacgttctcccaattagtagcacaggaagaaaatttagcatcctatcagttcagaaacatcagcacagtagccaaataaaatttctaccatgggatatgcactattaatttcacaattaaacttatctgtgtcatgtgcgtttccacagcaagatatgaaaggggtggttaaaaatctgcttcatttagggaaatatactctgtgacttagtaagaatgccatggcgctgacctcccagtgggctgcctgggaatgcatccactttgacttttcactggttcttaaataaacagggtaccaggcctcaacccgccctgccttaggaggagggaggagagagaaagagacatacacacacacaaaggctaaaggaagggaaaatgggtgattctgactcaaaaattaagtgaaaacgccaaccctgtcatcccgggatggccagacaaagggaagaggctgcctcacacccacacggtctacccgtgggtaaactggcatttctaatacttttcacctagtcttgacttgacagatgcctaaccttagctactgagtggagacaggctgatgggccttggccatacagggggaaaatttttgatgcttctcacttatgacatgattgattttctttcagcggcccttcactttgggaagtggcgagggctggctcactgcgccccggtgcgccctgacccccgacatgcggccgctgtgaggctggaaaccgatgacggcagaaacctaaaaaatcaataggccctgtcagtcaggggccaggcggatgtcttttaaaaacccaatcacgacatgtatttgctgcatggtgtggaactactgcacacttgagaacacactgaatttcccccttcccttatttatttatttttttggatctgctttacacttcattttgcctctttttaaggttggaaggggcagaagccttaacctttaaggcagcaagggaaaggggcaagccatgtggtaagttctgttcatgatttttacaggaaaaattccctggaaactatttgaatagtatgaaataaatagagcaccttgccgctgccaacataaacagtgacatcatttttttttttttacattatctggaaagaatttagatataagacttttaagtctaaaaacatatgagggcaaagctgcttaataggcttgattaaggaaagactattgtttgatttttctttgggggtttcttgaaggtaaaagaattgaagatacacacacacacacacatacacacacacacacacacacacacacacacacacacacagagagagagtccacagttctcttttgggaaagaacaagcactaggagaatcactcagtttccaagcagggtcagtgtaatattctccattcggtgtagaagaaaaatcaaatatgcatcctttctttgagagacagacaatgcaaaaggtggcatttagcttcttcctgatctgaggtgggaaggataaatatcaactatgacaagccaaaaagataagagaaataccatcagctggaatgtttcagcataaagaaatccacactcacacaaagagaaaaaagaagaaagtgaaaaaggtttggagactataggaaaacagagaagaatgctattagagactattaaaatgtataagatctatatgaaagtggatgtcagaatttctgcgacatgcttttctcctttcttttcagagaaatagataggtatattacacattatcttaaaattcacttaaggtaaatatcatacattaaaaataaaacaaataaacaaaatctgtgcctgaattcccaaactaagcccaattaaaggtttctttatggctgtaaacctgacaagctacaatttccccctgttgcagtgggtgtgtgtgttttaatgtaatattaatgagccaggatggagggtcataaaaagtgataggtttttgcgatggtaaattataaatcggtattgatttttcccggcactaatgcagccagcttattgtaagacaccacaggcaaagtgcactttatcagattagactggggccggtatcaaatatacatgagaataaggatgcatttgtgagttagactagacttttcttccctaacaatgcatgaaatttttaaggaaaaaaaaaaagcagacaaggatactgggaaattcaactttttttttctttttctaaagcaaaaatttccagaattgttgctcttgagataatttgattcaaagtgaagagaaggcagtaataacgctaatcaaattataaatagttttatttaaggctgttctaagtttctcttattcatttgtactttaggttggtgcccaaaatgcaaaggtcattctctggccccttccctgcgttcactctctgcttgcagcatcattgctttcctctacccacaagtcactgggagtgttttgttttttgttttttgtttgcaaatgaccgaggttcttctccgttggtattttatagtcagaaggacttcattaggcaattgagtagagatgttcagccatagagagaaaaagagaaggcaaagaaagaataataacaggaggaagaaaagaaaatgactagaccccatttccttcaacaaagatattattatttgtcctctctccaaacctgggtcagcgtctgactcacttcacgtctcatatgtcaacagagaagaaagtcctcaccctgaacgtgtgcttgccttttgttctttggagagacttctccagctttgttgggaatgctagcagccctgtttccaaacacttcccgatttcttcctaataactgctggcacgctctctatcaaaatctgccactttcctccctgcacaaaagctgtgcttccaccacgtgatcgcaagccgtgcccagctctgaggccagatccgcagccaagactcctctctctgtctccatggcgtgaacaggaattggaaaccagcacactcaaccccaatatagtctttttttaagaagtcgagagaacatgtgtttattgacagttcattaacaaatatcaaccccccgcaagctgtttactaaggaatgtagttaagtgaagatgtgtgaatataaataactaacaaaggaagaatggagagaaaatatctcatggcattccccctttgaatgtagtttgaatctgttttattttctgctagaaacatgttgctactgaaggtgtctctatgacacccagaacagtaaaaacagcaggtgtttgtgtgctggtatctagaacacttaaataaaactctgaaaaactggagtatgacatgccttctcatttttttccccttgtctatatcaagggatttaaacaattattttaaaaaggaaaaagaaactagtaagtttcataataaggttaaggctataatataattgctaatttctaaaacatgatgaatatttaaaaccactgcaaaagtttacaaaaaccaagcccaaatcttgaggaacataaaatcttagttggggataagaggaaccagcaaagaatatatactattcaataaggtgtttctcatttgttacaccaatactcaaaatgggccatattcagcaagggtagctaaccatttccaaatgttaaaaaaaaaaaactgactataatatccttgcatcaaaatgactccaacaattacagaaacaagggaaaatgttttgagacaagaacaaatcaggtaaaacctaataaagtcaaaaggaaattagaaaaatagaaggttgttttcatgggagtttaatcttttcactggaaagtgatctttattgtatgtcaaatcaacattttaaggtgcttttttataaagttatgaaagtagaagcatacatttttacctattctaatttaactgtattagtggtgccaaaaccctcatttacatttttcataaaattgtgaagaggttctctctgctttagggatagagctaataaacaaacacataaattagtgtattttaattaaacattatcccatgaagtaatattgtacaccactgcctaatacaagaacaactttcttacttaaaatccagtataatattaaaatattaaaactcattaaaaattaattttaaaatactttataaacattcaagtaccctgagttctgtatttttaaaggttttatgttgttggttgtgcacatgatataatccacaagctcctaacaaaatggcgcaagaagctacagttactttgcagaactgcactgactgatgtagaacaattactattgttttattttaaatatttcatcaaaacagtgctgatagaatcttactaaaaataaaaaaaaaattaaaagtccagcggacacatatagcaaaacagcattgactaatgacttcaaatcattaacatacagatctgagacttgactcatgatctagctagataagcctcctgataatatcattttaaaattgcatccagttcactcaatcagaacttgtttgtgttcccactatgtgcttaaaatgggatttcattgtcaaattatggtttggggaaaaggattcaaaataagttacaatggcctagaccaaactacacgctaattgaaactctgtaaaaaaggtagataggttttaaacatgcctaaaaatatctttagaaatcctaggtcaaatagataaatgccctgagacaatgagctaatgaatgtaaatcatttgacatttattaaataaacattagctgctacagttgttactaatagtattatttgcacagtaaggctcaatcaaaggtgcagatttaccaaggcttaaaaacacagatgaaaaggatgcacttgggcatacttcacactcaagttaacagtcatttattgagggactattgcatgtcagccactgtgtcaggcaacgaggatataaagattaacaagattaaattacctgagggccataactttttagtctgccttacttagtgttatacatccagatcctagcacagtgcttggcaccttgaagatacttgataaatatttgttgaatagatgaattaataacaaaataaaaatccctgttgacaaggcattcacagtctaattctttttgctttacacggtacttaaatttttccatcacaagtccagcttgcttttttttggaaaactccctagctaaatataatttaataaagtgtccatgatcccttgattccgagaatataatcctgttggtatttaaagcaaaagatatatatatatatatagtggtctaaaaagggtcaaattcccattcagcatcctatgtatgaaactcttgatttaaccagaattatcttgggaggaaatccaaaataacaaatggttagaaactatgaatccttctggtctgctcccctatgaggaactgctttgttacctcatagggcaaagctgtcccaggatctgccgcccctggcaccaggctccacctgccacactttacctaagaggccctggatatccatcttgggggctcctgactccctcagcccttactctttcagctctctagtaggtctcttgtcagaaaaataccagcttttcatttcaatcaaattactgtgatggcccagaaggtggtaaaatagtataagggttctctttgtcaggaaccttgaaaaagctgtatcttttattcggttgaaatttctactaacctgaagacatgaaagaagaaaggaacaataagtcccaaggaagtatgtaggggttttttttctgtatataaagtgtgttttgaagaggtatattcacttattaagttctctgaaagtatgactgacttgatatttcccatacgactaatttacaacacaatttgaactctgctgcatccactcgtggaggcaggaggcatcttttcccaatattggtggaatgttgtctagagtagtattgattgcacagtgatgggaaactataggacaaacctgaactaattaagcaataagctcaaagactacctaccttcaatagtgtttgaaggtacatttaattattgcgtggatgcaacgacatgaagaagaacatgtcatttagggaaatgtatcaaatagcattgaccgggtgactaagactccctattggctctaatgtctttggaaaaatcaaagggaatatgaagcaagtgtttcaatttggaaaatgaatgctaccacatgggtgggagtgagatacggagagagggaaaaggtatgaccaaatctgaaataatgtgctcaaccaaaatctagaatagattccaggcctaggatagtaatttttataagtacctgagagtatgttagtactttatctgggcagattctcatcctgcaactgtaagagtgtgtgtgtgtgtgtgtgtgtgtgtgtgtgtgtgtgtgtgtgtaaccaaataaagaacatagaactatgtctcttccagtggaaattcaataacaaaaaatagaattaaaatgctggttactgttataatatttgagtcctttagttagaagcttatttgccatgaatcttccaaatcatacctggaatctcaaaagaaagagtaaaacagaatctcaagaaacacttcttaaagtttccagctcctctaaattcaacttattgctttagctgagagcactacctacaagtctgctaacaacgatatatcaatggtggccaaaaccataaatgttaagattctcacctgatttgaaaattgatttctatggtgctgttcatgattagttcatgtttctaactctattctctaagtttctcaagtctcttgttcaacgacctgagtttatacttcatttttccattttgtagatactgacctttttttagactactttgcttattatataagcactaccatcacttgttaagggaaataaaactgtaccagtaatgtgctcaggacaattctaatggtacaaggatatgagcattaaataatatggaatcacatagtaagagtgccgttttcaattttctcttaattgttctgattacatcaatgagggagtctcagtttggtgctagtatctggaacacctaccacttaccaatctccatgtttagcagagtcattggcaggcaacagcgtccagctacaatctaacgacgctgctttcttcctttttttttttttttttttttttgagatggagtctcactctgtcacccaggctgcagtgcagtggtttgatcttagctcactgcagcctctgcctcctgggaagcgattctcctgcctcagcctcttgagtagctgggactacaggcacgtgccaccacgcccggctaattttttgtatttttagtagagatgggttttcaccatgttagccaaaatggtctcaatctcctgacctcgtgatccacccacctcggcctcccaaagtgctgggactacaggcatgagccaccaaactcagcccaatgctgctttcttttcattgaatttttcttgtggttacctcccatctacggcaggtgaggctgaactgctacttactgcggcactatagtttcttttcaaataaattcaagtttaaagagtaaattgatgtaaatacatttgttttttaaaacagtacagatgatataaagatatggcaatagtcatgaaaatgatacgagaataccatttgcaaggaaatctggtgtaaaataaacacctgggctgaaaactggcaacctggatttccagtggtagttctgcctaaccagctttgggaccatgtgaaagccactgaacatcacctatcttgaccataaggtgaaaaagttagatcagtgttttcaacctgactgcacactacaatcacctgaggaacttttagaaaatgccagtgttggtctctaccccataccaattatttcagaatctctggaggcaaaggctagacatcagtatttgctttaaagatggccaggaaattctaatataagtccagggcagagaaccattgggagaaatgatctctaaaatcttctgaggcttaatattgcattcaaaatacttttaaaatgcaaagatctcttttctccctgcatctacttttttgtttgtttttaaccttcccctccttttctttcaaagttctggatccacatatcctttttgaattttgctgatgtgacatctcccaaatcactattatccacaaaagccattaatgtgctatttgcctacttctcagatcagtaataaagccattaaagcagaggcatcagagtctaaagtcagaaagcctggacaggcagtccagcttcctaactcctagctcagtgtgtgtgagaagggcaggaggaagaaggtatgattccttgacttgggtgccaagaggacccatggaggtcagcactgtgcaacaaagctcctggagatggggtaaactgcagaggctgggagtgagctctagggcacataccacttaagccccttcatcaataaccacttaccccagcaatggcacatcagcaaagccattctgagcaacttggctctcctgtccggcacaggccccgggtggagcggggagttgtgtgataaatgctgagccacaagccattccgctcccagcccctgtctccttcccagcttaattaagaaacagcatgatttctgtccttctctctctggttttcccttttatctcccccttccttggtctgcaacaacgggtgctgctctctacttcttagtataataggtggaagtaaatgctgatgacaagtcctggatgaaatggggaacaggtacaatttcaggactagactttttttaagattaaaaagagtcacttctatctcctcccctaggtttcctaggctgactctggtgtttctcaggcaggggcctcaaactcaaatgcctacaggaacacacagaagtgctgcatccccaggtaaagagagcagctatactcagcaacagctggggattgctgggcaggcatgtgagcccataattatacattctccaattttataaaagcagccagatatatggatttgaatgtgaagcctgatttcatgatgttggcatcaaattcaaattcttaaaaaatattctgccgaccaagccaaatgcatctgaggaccaaattaagttaggaagctacccatttgtggacttttctcagttgtgaggttgggggaaggggagagaaaattcctaagaatttaatctctatcatttcattgggctggccagatttatataatctttgcctggaccccagtttagaaatttaatcactcattcaaccaaatattagtaattattattactatttctataactttgcatgtgcacttccgctaaagacacctatgaataaggaactactattgccaccatttcacataaggaatctgaggctcagagagactgaataactcaacttcaatcacacagctaggaggtgtcagagacaaatgtgaagttgaggttgtctaatttcagcttccacatttttaaccctacatctgctgtggagcttccaaccctagcactaacagatctgagaaatatgagggagttagacagggacagcattcattcatctagttggagagataaagtagacatgtattcattaaaatccaggcttatgcatataccaaaccataagcccctgggcaaactattttacttttctgagcctcagtttcttcatctgtaatatggagatagcatcagtatctcctacagccactactgggtgggcattccaagcatagtgtctggagtataataaaccccagataagttgcaccactattgttatttttctattatctttactatagagtcatcattcctcatgttaagccctctagccttcagccatagaatcttaagcccttggggtttaagaacacttttaatttttcaaagccttttaatacccattatttcatttgatcctcccaacaatacaaggaggtaggcagggcagggattaccttgtatgacagatgagagaatgaaggcaggaaaaggttcagaggatgtccaaattcacacagacataggctccataaccctgtgttttcttgtagttattagacactccaaggaggaagtgggggatagggaagaccactaaaagtagaagcattacatgtgtccgtgggtgcctagacatttcacagggatcacaacacaactaactgcccaggaaaaagatataagaactcttctgaagtaacataaatgaactggaagtaatatactgcaaattatgtagataaatacttataggaaaaaattactagaagcaattgcaaccaaggctagatagtaaaatatggaaactttctgaaggaggaaagtcaaaggcctagatccccttctatgcgtatcctccatttactagcattgggaatggcatccccccggggctcactggagcagcactgtggagaaaacaggccactctccccagctcctctgtttctgaagcaccgtttataacacagacaactggaatattaaatactgtattttcagcatctagcacattatctggaacatagtaggtgcttaaaataggtggaatggatgagtgaatgaatgaatacctctggtcacaaagacggaagaaactatgagccagccatccgcagtggacctggcccattctggtggaagtctgttatttttcctgcccagtgcccccccttctcttcgtaattgtacttttcctttcgtaaactgcccctggtccattcttcatggtcttagggaaactgataaccatgtcaggccattctcactctttccctatacgctgactcttgagaagagtgggacctaggggaggaaaaaggaggagtccaggcctctgccaggcagcatcctgagcgactacaccacagccccagaactgcctcacatcctcatcttcccaacacctccttattcaactcctctcacttctaagctctccaataaatccctttccatttgcttaagttgtcaagagtcagtttctattgcttgtaaaccaaaggactctgcctaatacacccaccaccctatctttgaagggaggagttgaggggatagggttgctattgtatcagctgatgtgattccaagatgctttaaataggcccattgttcttctgagtctgcttcccgaacttatcaataataatataaatatgacaagaagtgcatagcctgttcaggttgcccctagctgatgcgaaggagagataactacttcaaatattttgctccttttctctccatctggcttagcctttgcaaagtgtagccagtgaaataacacagagaggagggaaaagaattttttaaaccttcaaaggggccttcactctttgcctcattcagcagctggtatctccagttgaattagttcctgcataattccaacagaaaaccctttggcagccactggtcttgcccaccgcaggcttaggccctcttctctgccccagaggaacatcgttgacgtgtccttcagtgtcatgcatgtttccaggcctctggggcacaccaggagatgtgtgttgacttcctggctgtctgatacccagcaaatcctcccacccacctccaacacctaattgagcgacaaccctccatatcacagcagctggacagcgacagtctgtacctctcttgttccagcacgaaacagaaaagaacaaattggagaagaagggctttctgcaaagcctcctcttcaatccccaggtcagagagctgtgcttagtttttaacacaatgcacagtcgggcctgaaagcaggctgctagggtgggagattgctgctcctgagccaaatgatggacaatttcttgtcagactggagagcaaacacaaacctcttcatgtcaaatgatggatacgagtgatggtgaggctcttggaaaacctcagacaagtgcttagtcacagacatcagtgtaatccaccaccatttaaaaccaattgcaggcatccctgtgatcaaggcagacagaaacctggcggggacacagcttttcttactaaagccttcctctgtttgtgtgcagctccaaacccagctcatggtcagaagagcagagtggccatgaggagagaggatcagcagtaatgacttcaaaactttcactcttactcccctttctcaagtctgtaagaggtcaagtgcctatcacagccattcattcatgtgttcattcattcaagacatattaatttattataacagcatgtctgacatgctataactcactccttcccttattccagacaatatccgttgactgcctgacctcccctgctaagtgctatggagtgcattatttctatgcaaaactctagatggtacggcccttcaggaacttgcagtcttggcagggggaataaaacatggaaaagacaacgagaatacaagatggaaaatgatgagtgttatgagacatgcaaacaaaacacaacaacacttcagagaaaccattggagggggtgattaagagacggatcaggaagcttcaaagagggagcgaaatgtgaacctcctgcggcagggtgaaaatgattctagacatgggattggggcaccaaggggttcagtcaaagtgcaggtggggcagcataaagaacgcagagaaacaccaccctgataccaggatggcactcttctgctggtgatggagcacactgtggggacatcccagggaaaccagcctctgggttcctaccaggaaggccttggggcaacattcagcaatcctggctccgtgaagccagctcaagcttcttcactggagaaaggcataacagaagaggcactttaaagatctccctagctgcagtgtggaggaatggattagaggaggagactattttaagcagaaagtcaagttagaaggcaactgcaataagacaggccttgaactaaggttgtgataccaaagagtaatgacacaaagacaagctcttattgtgatgtcagtcatacaatcccagaaaataagcaccaggcttggctttgaaaactaatgtgattccatacagaactgggctccaagtcagaaagtcttgtttccagccccaattcaagtaaaaaccagctgtgtgaccaagcaagtcccttagtctccctgtgccttgttgtccttgtctgttcctatccacagtaactcttaatgggaattgcataaatatgttttcacttttttataagaactaaaaagacaaaggctcataacagaattctactattcctataatgtgatctgtcgaggctctttactctcttagtttctctgtcagagataatctcactcaagacatgggctaatctcaattaaacccatcaatttccatttttctcagcacccatgggccaattgataacaaaagctggtatataagaactacactaatggatcccaacactgagctttagtcataggacctgctcaatgtctcaacgtccaataactgcagaaagagtaacagacatcgtagggaagggagggaatcataaatccctgctctgctatgtactatctgtgtgatcttgagcaatacactactgaactttgatttctacgtttgttaaatagagttaataatccctacccctggcactaatgagagaattaaagaaatatgttccacagagcacaatgcctggcacatagaaagcacttgataaatggaggctatcattcattgttatttttattattgatgacatcataggccattgtttcatgaatttcagactgcaatatttttcatattcattctagcataccagatggttgcttaaaaatatctgaatcacaaaacagctttagacattccattgaataaagcaaatttattttttaaattaaaaagtctcatattttatgtaagagatgcctttgtagagatagtctctttaaaaacactaccacatgttttgccactacttcttgacaaaatgtttttcaagaaaagaagaagcgcgcacacacaattgttcactgtcaagaaaatatatcaagcctgagatgttaacattgccaaaagatgacagtatttggcagacctaaaagtatttgtcatcttaaaagtatttatgcaaaagcaaaaaataaacaattcaatattttagtcactttaggtgattacggcaagtcattaggtttttgtttaaaatgttcttggaggaaatgcacccttttcaaccaagctagttttatccttttgcatataaaattcaagccatttcttatgttgtgtctgtgttacctgtggagtgttggcatttgcacaatgcaagagctgaacaaagcccctccctgcctgcccatttcacccctctccaatgtttttgcaacacattttaaattaaaagcatttattagctgaacgaccttcagcaactcaccaacttcccaagactcagtctcctcctctattaaaaagttgagatggtggtagggttgaggggagatagactactaaatcctgcttggctcaccacacggggctaagagagaacggatctgaaaaatctttttgttaatggtaaagccatttaaaggaaaaaaggaggttggggaacgtttaaaccatgaagcaacagcttattcaactaagactttcctcaacgtttgccttccagaatccttaaataaatccttgtaagggaaaaaaaaaaaaaaagtattccttttacctaaatgcaagtcactgtactgtgctcatgtagcagtggaggccaaaatgctctcaatggctttccctaatgatttttttttttcatcagaattaaagaaatgtatgcccttttgaaactatgaatgtgtatcttgtgaagttataaatacatttagatccatttctcttcccttcttataaagacattgatgtgttttttctgacatgcctcatgaactcagtcaatcacaagtctttcttaatggaaaccacatgtctgcccagaactgtgtaattataatgctaggattcttggcactgccaggaaaaggggcattgtcaaaccaattaaagtttatttacttacataccatttctggatcagaatgttctttcttttatgctgatgctgagaaaatatatatctcatcaagttgttgcaattgttttttttggacagatttacgtttcttaccaattatattcctggttttcagttcctttgcatgtaactaaaaatttctttaaaaagacatctgggaacagcatcatgagatgttctgtaaataagactttgcacatttcacaccaaaattactgtgcttgtctattttgctgctgaagtgtaattttataggatttatctccactaaggggtatattaagagccctgctgtttctttctttttttttttttttttttttttttttttgagacggagtcttgctctgttgcccaggctagagtgcaatggagcaatctcggctcactgcaacctccgcctcctgggctcaagcgattctcctgccttagccttccaagtagccgggattacaggtgcacgctgctacacccagctaatttttttgtattttagtagagatggggtttcacctccgcctcctgggctcaagcgattctcctgccttagccttccaagtagccgggattacaggtgcacgctgctacacccagctaatttttttgtattttagtagagatggggtttcactgtgttgcccaggctggtctcaaattcctgagctcaggcaatccacccacctcagcctcccaaagtgctaggattacaggcatgagccaccatgcctggccctgtttcttttagacttgttagggattgagtgtgacctacaaagaggtctctggttggtatctggcacaactactgaatcgatggattatcaagggggaaaagtttcttaaaatcctagtgttttccctctgaaaacagggataaaaattctactcacaggcatagcaatggtgatgagaaataccatgattagtagagaaaatagtggaataaatatttggagttagacatcaactactcaaagggcaagtcatttcactactctgagccttcttttcttgtctgtaaaatggaactaacaatactcatcctatgagttcaagggattgctccaaatgtaaaatgacataaggagaaagcacgtgtaaagattatcactgccaatctctctgactctgtccagccttccaagtctaagtcgagaaccaagatcacaaaccagcaaaagcaaaaccaaggaacaaacttcatctcagatcatggtcagacctaaaggattaaacagactgatggaacatctcaaattccagtccaactggggaggaaagggcaagtcaaaatgtaagtctgtcctaggtaaataggcaggcagacaaggaatttgcaaatgcctatggttgtctccgtcactttaagcattgtggataaatgaccccagttatcatcacagcaggtgggaagatgggtgagttacttgggttctcctatctcattctatgctggttcctgcacctcagccaaaccccctcatgtggtgggttaatcattccccttcctgcaggtgggtgcgtctcagaaggagaacaacatgagctacatctctatcccaccaacttaaataactgtgagattcctctttaacttccccacccaggaaagacaaaggggaaactccaacaatatgaatagaccaaagaacactctaattttctataagtacaatgagcgatctgattccagatattatttgggtactgtgtacagtggctttgcccaaacccagcaagcaagccaacctcagcctcttttaactcttgatcttagagtcaaggggcctttcaacttacaaaatccactaagtctaaatgtgtcttgttaaagggagctgtgaaaacacaacataagcaagagtgacacaacctgcggagctgtcacctgacatcataatctactaatgacaactctggaacatcccttgcacgccttttgagtaaagtataatatttcttggaactctacgcctaagattttgcctggctttaacacttataatcatatgagccagaagtctcataacgagagtgactgatcttgcattaccattttacattttatcattggaatggttattttatcagaaattcatttcaacctcaaaatcccaaacatgtcattacattaagagatccagtagggcaaaaaacacagttttgctcaaactaatatggcagaaaattcatggatgactttttgcattaggcaagaattcttcactcttgacaatgccaaacaacaaagttctctaagttcattttgattatcaaaaatttattctgaatttaacacttcagaaatgaatcagtgacatgagagtcacactttcagactccagcaatacacagagaaagcactgatccctctgacgagttctcagctatcaatcaagagaagccagggccttctaattggttaccctctgctttgcccaataaggcatccacttatatcctggtcaagctttgaggaaaactcatcttctgtctcagagttcatttcctccttgatgggagaatttggggaataggagtaagtagtagaaaattggagaaagagcatgccaggtgctaccccagattttcctttttctacttctccccaataacacattgtccttggattcttactagtggcataaaatcacctgaacctaagtattggtggtgtcttcatgatacagtcatattttatttaacaaggcacaatggtttcatgtggaatagtcactgcaggggaaacttttaggcacagtagcagatcaatgctagggggacgctcatatgcttggcttagaactgctgtgaattcagcagcaaatgcacaggtgtcaggattcggtgactatataatctccaaggctcttctgagtcctgagtctaaaaagctaaataatcttccagtgcaagagaggctcttgacacccctcagtgtggtgttgaggaaaaagccccgaacagggcatcctgtggagagcagaatgactccaggatctgccatttgttaagctctgtgagcttggatatatgccttaccctctccgaccttcttacagggtcattgtaaggattaactggatgatttaagaaagaacccagcaccctgcctggcacaggatcactgcatgataaaaatctcagttccttctttcttcatatcacagtgcactctgtgctactccacctatggggagggtggcccttgcctgaaacgatgagctaagaaagatgatctcatcttcggtcacagactcgcaatgcaattttatcacatgacgtgcagagccccccaaaacatattagtgaaacctactagattccagaggtgcaataacggtgtcaagtgctgcatgaagaggacttagactccctgaggatctcggccctgtttctagctgtctggcctccagcctaggagaatacaaacagctataacagattctgggccccaaatccaactttaatttactggtgacctcatggctttcaggagcattacacaggacttatctggaattcactctttccaacaccctttcttttattagagaaatctgatgatcatgctgatttatcagatctttttatctagaaaggaatttttctggaagtacttagtgttgttttaaccagatcaacaaacatgtccgggactttataaataacttgtaagcatgtaatgtcttaatatacttcctgggtaaattagtgatggctttgctacaattttctctaatttttatgaaatttttaactaactctcactttataagttaaccataaagattgttgtctagatttggacagttgtgatttctgtcttttacccagaagtaaggggcaaaggatattgtttcactttcttcaaatttggtttctgaaagtaactttaaaatgtgagcttattctaaattacttaattcagttctgggtgtacatttctaaggttgtggggaggccaaagacatgtagtattggtggaaagtgaggcgaatcttaacacaatttcttgaaaacacttaatatttagtaaaaatccacttaagcagccttacaggaactggacacttctaccatttattactgagtttctagtttaaagacaacaaatgcaaggaattatgatactcaagcccattcctaataaaagaaggctcacatcttacgtgtctaaatatttaaaagctataaaacaagctagcaaacttttaaatgaaatatgttatacctcctgtcttgacaaatacttctttataacaacctggaaagccaacttcgattgtagaattttcagttcttcaatgttcctctcaagtagtcagtggcatagggaggccagccccaactacaccccatcctcttctctttccacctctggctctgatccaaatctcaaggatcagaacacagcacacgtatgaacacagcagtgctcacatccaatctccctcctcatcctccacaaaagccctttgtctactcctcaagactcagggtgcacacatgagtacaccctgcagaaccaagccttgaaagtgaactcagggcctttggagcagtgaattcctgggtcccaagaacgctgagcaacatcttacaagagtgggcagtttccaggtggccccaggggtctctcactccctgaggagagccagactgggaccctctaaagagcagaggccaggcggaggacccttgaactgggtctgtgagcagtgctggacattcagccccattccgaataaatacttcacattctacgtagctaagtattaaatattttgcagtttccagttatctaaaaattgctaatccacatacatagagttgtttatcctccgtctactcctcaattccccaaaatccagattctaccctcaatgcataaattaagctgctttaaattcaccaatgatgcccattctgccaaatccaactgactccctatagctcttttcttcccattacttctttctgggtcttgttgaatccattcctgattttcactggtgcttgtccttacgccatgcaaatttattctccaaactaacacaatagtagttaatgaatgaagcacatgtaacatgtcatccctcttgtaaaaccctccagtggatccctgtggcccaaaggaagaagtccaagcctcccagacacaggcctttgctagctctacagcaggctctccctctactccttacctcaacgctcatgttcttgcagcgtcaaagcactcctcacatcatttttgcattcaacaggaatttaccagatacccactatgtgccccctcaaggaatgttttatacctttgcatatgttgttctctctactgtaaatggccctgtcctgccaccatttccttcccctcccctgctacctcctcctcattctgaaaggctcaattcaggacactgacctcctctaggaaatcttccatcatattacctcccatcaattaggacagccattccttttttccatgctcccaatgtctcctccttgcatcgctttcactatactctatcttattaaattttaatgaagtcctccacccccaaattatgagcttcttctggccagtcttttctgtatttgttttccagagccaaacaccccatgtgtgattgcagaatgaactaaacccaatctgtcttgctttctgctcagatgcaacctcctcgacaaggctttcctccacccttctctaaaactgcccctactccgcaagctctagcccctaaccctgccttattttcctttacgacactaactacctgagattatagcatatatttatttctcttccacatcgaggatgagagttccacaaggccagggactttgttcccactattgactgcctgaatccacagaatctggaatagacaggtattcgatacataacgttgaataagcaaatgaatgcactaagtgtctgaactacttcagcttccgaaaacttcaatcatttgtctatcattttaccaacccacctaccgcccttattgtcatttacttaataacttttctttaaattgactagctattttcagcaaaattattctaaaaggaaactatatgtagaaaaccattcaactgaagggaagcacaaaagtaggcatataattattaaattcaaaatgcctgtgtatctcctgaaatcatctcacaggccagcaccggtgcttttactggtagcttaccacactttgggaagtgctattgacttgatcaaacagatctttgattccccaactgtgccggatcgcgatgtatattatgtatgcttttcacctagtactgaaaaatacccacaacctgaagagtttagtgcctacacccaaagcatttctctgtcatggaagcttcaaaggttcagtccgaataccacacttctcaaattgcagtgaatgaacctcaagcacacacaagagtttttgtgtttcattttctctttgaaagaaaaaaaaaaatctgacagaaaaagaaacagaatgaaagccatattgatggctcttacccagagactccactctgggatgaagctatgctgcagcctgaaacactggcaattcctaagagtgtataatgccccaaaaacagaaaatgtgaccaatagttgttccaagcaacggagacataacttcaaaagcattagtacttataattagtttccataaaaatcccaaattttcttcacttcaaccaagacaggtttcttctttaagacaaactactttcgaataagttgttaagtcttttagagaactccttacatccagttaaaggatctgtcttcaaatctttttctctctcttggctaagcgggaacatgagatgttttcagttagagaacagaaagctttccaagcatttgtgagaaattggtgggttttgcctcttaaaatgctgtaactatacacaaatattttaaatctattccaagtggcaagttttcaggattataaacagagaactgatcagtgtgttccaatgttgacatggtaaaaatgaaaactaagttcagcagttgctgatggtctcaaaattatgctatccactgatccgtagtgtatttttttctttcttctttgaaatgaagcacaaagattcaataagaaataaaaacctactgacattttaacgaagcctctatccaccattacagacagacatacatatagaaaaataagcattaaaactttattgtaagaataatggtatccaactcttttcctactgttcactttttctgctgttttgctacagaaagctgttgatacatccatcactggcatttttgagagacagtattgtgtggagcagcagttctcaaatgtgctcctgcagaaatctgaatgtctctgagtctcttttatgggccatggggtgaaaactattttccttataatactactgacctgacatttgtgctgaaggtgcaaaagcaatgatagatgaagcaattcatgccttgtgaaaatcatggcaatcatgccaaaccgtactcactaatcattgtattcttctccatcacacacttgcagtacagacacacacacacacaaacacaaagcatcaaagccacttcatttaagaatgttgttgaagtaataaaactactaattttattaaacttttttaaatattaaattttattaaatcttgaccctccttacatcttcgtagtattctttgagataaaatgataaaatgagtaatacagataaagcttttcactgcataccaaaaagtacaatggtcatgtccagataaagcatttgtgcaactgtctgagttgcaagctgaagtagttattttctgttttgttttgatttttccatagaacagcatttttacttgaaaatacaactgacaaactatggcttttcaaacttgtgtattgcaaacattttctcaaaaagtaagactgtcacttcaaagaaaactattgacagcaggtgttgccaataataaaattcacctttcaagtaaaaattagaattttggaaaacctgggtccacaactatgagattggcagctctccaataccttttctgatgagatcaatggtgatattaatgaacataaatcgttgatattgtctaacaaagtatgtcacataactcaatgaacataactcagtgaaccaatatttttcaaatgaccaatgagtgatgttacaaaatgatgatgggtaaaagacctattcatagtgaaagatataccaatgtattttaatgtaaggagttaaaaaattcattgatattgtttcaggtatcacacaactaacttttgagaaacttgttaagttttggtgtggtatcaaagaagaatagtcacagctatctgaaaaataacaattaaaatactcctctttttttccaactatatatatttatgaagctgggtttccttcatatactttaatcaaaatgacatccaggaacagaatgtagaagcaaatatgagaatactgtattctattaaaagtcagacaatgtaaaaatgtaaaaccatgccattcttctaactaaatgtttttgtttcagaacatggagttattttatcattataaactgtgtttatgttaacatgtgatggggttgctattgttatttttaaatgagtaagaaagaaattttttttaatttctcattttaatttataagacagtaaatatggatagacataagccacatccacaaaatttctttaaatcttcaacaatttttaaaagtgtaaaggagtctgaggccaaaagatttcaaaatcactggtctagcattgaagagactggaatctgtagttaagaaagatccacaaattatgactcaaccattcactgactgtgtgacccctggtgcaaatcatttcatccctctgagcctcagtttgcttatctgtaaaagaaacgatattcccccacctcacaaggctgttatgagtccttaacacatactaaccccctctaataattgctagcttctgatattaccttcatcttgtcctttttggccaacttattaagttgacactaaagttgtttagatttttaaggagaggataaagtgccctccccaaaacagatgaaggttcctcctctcaggggctataggaccacatagctgttaagcctgagtcacagttcaccacaatattgtttgatacagtgatttcaccagggcttagttaatctccttaccaacctgttcctcaggagagtgggagctaaacatgggagaaaattctatcatttcctgaggccaccaaagtatttttcattatcacccgtgtgtgtgtgtttgtgtgtgtgtgtgcctgcgtgcacgcatgtgtgtatgtgtttaagctatggtgggtgctcagagtagcataaaaccaattacttctaattcaattttgtaatggttgcagggttccaatacagttgttgtacataatctctgaaactttttgccatgatcttagggaaagacaacagcccagtagaataaggtgagaaataaaagaaaccaccctcccccaagccttttttttttttttttcattttccatttactcttcaagtcctgtgggataggtacacaaagtacaaaaataatcatttctcaattttcccctattactttttccataatttgaaaacataaagctctttccactggctgcctttctaattctcctttctattcctattccagtgcaaaagtattttgccaatgaaagtgctataaacagccatgccctcactgaaaaaggcaatatgccgttagcctgacatatacctcgcttttccgctcattgtcaacacagtgattgatggtgtagttcattaatgtgagacgattgtcagcttttcctgaataaatataaaaagaaacaaagaaatctccacccttttcaagccagagtgaattatttcctattttccaggcttatgtttaaaaatccatagggcattcatcttacagtaaataatgaacataccctttaatggaagaaattttagtttgagttcaaggctgacatagtttttatatatatagaaaaggaggaaggagtgctattcaaaggatgaagccatataggcacctaaaattgtacttgaaagcagtacttcatctttagtatacatagtcatgtaaaatgtaagaaattatcacctttggaaatctgtaaagtaaaaaggatctgtcatgtgctaaactaaaatgtaacaagaatcataaggaaagaaagcaatagagtggatggagagctagaggactaatttgcagctgtgtaggaaagttgattaaaatcggtgcacatcaaaaggaagttttgtgaaaataatcaaaacagattttcctttcgatcactctttactcatgatgcaagtttgggatgcttctactgccagatacatttatatatataagctcaagaaaggtaagatcttggttccatttgcccttttatcaagggttattgctgctgtgacttttctctgcactggcatctttatctttctgtctgtttgaactgctttaattggctctttgctaactctgttagtcacaagatcaacaaacatcactgggtgtgtcttgcttttagctttggtgtacaaaaagcaacagccgaaacaaaaacatccccatacatatggcacccacaagctgatgaacatgcagtgtctcactctgggcattctgttcctgtacagattttcttgggtggtaatgtgctaatgacaataataatttattctgaagatgtgctaaatttcttgagttgaattgtgaagtattttgaataccactagaaggcacaggaaacacaactgcaggaaaaaaaaaaaaaaactggcattctgccaccacttgaagatttaatctgattgtaatagaaggtgattattgaggactaaccagaagaccttggatgatttcctcttaaaatgacagcttgcctgtgtattgtgcattcttagagcacatatgcacggatctgttttcagaatgttctaattcttagcaatataggcagagggactcaaagcgtgacaacagcttacattcattgaggactgagcacatgcccacaagccatgtgctcaaacttcatgaatctcacctggctcaatccacacttcagctctagtaggtgtgatctatcactgctcccgttctaaagatgaggaagatggagctaagattacacaagtggctcctttgagatcatggatgagtaagtggtgtagtcagggttctcacccagccctgcctgactgcaaagccagaactgtgagacactaaaatgttgggagaatttctatcaaggaaaatggcaatcatcatttggctttaaaatgcttctcagtgggctgggcacagtgcctcacagctgaaatcccagcacattgggaggccaaggtgggcggatcacttgaagttggaagtttgagaccagcctgggcaacatggtgaaaccccgtctctactaaaaatacaaaaattagccaggcatggtggcaggtgcctgtaatcccagctacttaggaggctgaggcaggagaatcacttgaacccaaaggcagaggttgcagtgatccaagatcacaccactgctctcccgcctgggtgacaagagcgagactccatctccaaaaaaaaaaaaaaaaactgcttctcagtgatatcaaatttgaggtctcatttcctcctcactctgactatattaagtcagcaaagcacatactattatgttccttttacagataagaaaaacaaagtccagggaggctacaggactatcttaaggttcaacagctctgacttacaggacctgggaccagaattcgggtctttccagaacactatcattttgctataaagtagcaaaccaaaaagacagagaggtagtaggtaggtaggtaggtaggtaggtaggtaggtagataatcaaagtctttcagagtcactgagtagaaaggtagttattgctgccatatttcaatttacaactgcttagcttgttctataatgaattccatgtttccctactagctgccaagtagggaactgtgctctggaagtctctgcatccactgaatgtcacattatctcaatagcttcaggtgataagatcctggattcttcatggtgaaggaaggctaagagtcttgataagcttgaggtggaagtggcaatgctgcttgaaatttacagccagacttaccatcatgggaaactcttcctgtaagaagccagccagcaatatatctgcccatacttctcaaacagtcatagcaacactcccagcatgtcacggaataataaaaaccagttgtgaggaatggagaattttagagagagaaaagtgcccttcaacaaactctaggctttacacgttaccatgacccaaagactgcaatagaaaagttcccatggcttaacagcaaatttagatggacaagctttctggaatctgccggggctagaccttgacattcatccagaacatcccacaagggaggaaacaacccacaagagcagtaaatttcttaatcaaatctcaaaagtgcccccaattaataacactactcacttttaggattttaataccagagaatgaagctccacctactactgctttgactacaagaactcaactcacagtagttcacaaagtatgtggtcttcccctaaatattgtcagtaagggagagtgtatgcacttttgcttcttaaagatgtgttgagttgtgggccaatgagaatataatgaaccaacactgataatgtacatagaatgaatttattctgtattccaagggactcttcctattttctccccagcaaattgaaaatgatatttgtaacctgattttaaagcactctgagtgtgcatttctcagagctattaactgagtttggatagcgttttatatttctttcctgtacatttattataggacatccaggagggggaagaaattaaagatcatgaaatatcagagttgtacatgcttttgtcttttctgcataaaaaaaaccagaatatcaacttttgaaagaagacaaaaaattatgatgatagaatgcagtggttccttaatcttttatggcagtggacccttctgagaatttgataaaagcctctccctaggaaactgcctatgacttaataaaaaatgttacagcaattttagaagtttcactgccctacccctgaaatctagtcttaaattgcctataggttaagctataggttaagaatccctgaattataatattcccaacaccataaaaaatcagttcacctaattgacttttcctgtgtactaacagaatcatagctcatgttttgctatggcaaattcagtggctatttaaattttactggaatctaaacttcctgacctctctcatcctctcttcttccttggatgcattactcagtttatggataacggtatagaggagaattcaattagaaactctgtctagaaggctgtttttgcatctctgccacttaaaacgcagaccttcagagaggggtttccccatcaagagaaaactgcatgtgttcccaggacaatcaaactgaaagagttacacttccaaaagataactggggctgaaaaggaaggccagctctttggggagctgggtgatatcacaaataattaagtgataatttccactggagtatttagtggggatgacaccatgagtccttcacccttatcccagagtggtggccactctgtccatttttacaatctaattttacaataggttaactctggaaaggctagatggtaaagaggctatagggggcatatgagtggaactgaccaatttggtcattagtgagtgtggcacttttattcctctcttagagaagtcaagaaccataatcaccaaatcacaaagcaacgtgggaatccgtttcaggtaatcccatctttgacaccacccagaaattaggtttgtaatttcacaaactcatataaccaatcatagccatgttaaaaaaaaaaaaaaaaaaaaaaaaaaaaagcctgggaatctcttgggttctcactaatgatgaaatttaaacacagaattgattggtcagaccacacttaattatacccaactatacccaaaaatactcaaaacataaaaagtttggtccataaataaagcaggagaacaactccaatttctattctctgttaacagaaggtttctgtctaacttgttcttttccttatgaagctgtagaaatgagtctggcttgaagaattctatttttaaaaactcttcctatttacatatgctttacttctcaaaagaatgtcaccttcctattaatgcaacacttaacaaaggcaatgtcagaaatgtaccgttggtgggggctttgtttctcatttgccattttttgattggaatctgtgataattcatgtgtcctcattgtgagacaactaaaaattatcattgtcaatacagtttcctaacaatcccagaacccaggcaattagttataaataagtcattgttggcaaaataaagaatgtcatctaatgtctcagatgaattaaaggaacagctgggaaaggaaaggaagaagcacagagagagaaaaaaaggggacacagacttctttatggggtcccagtaaaaggaaaaactttatatgcctaaataaagacaccaaaaaaaataaacatgcttgagaagtcattatccaatacacttttaagccaaatcctaaaaacagcttttctggaatgcttttggatgactgtttatatgttaaaatcaacatttaaattgtgctacaaagcttattgtgtactacataagcagttctaagacctctagaacaacatagctttgggtctaatccactgaaaacacactctgtgcacatgaaaatttggttcgctctggttgggaaaaagtgaggaatgtgcttgcctccaaattagaagagggtcaagaaagcatttaaaaaatatattcctccatgaatgaccaagtagccagggccccttcgtgcacctgagagatttgccagccaagatgcagatcaattcctgaaagaagcattcataccttaaatatgcatttattctctccccctccaccaaaatgcacagttccaattttttttttcaaaaataggagttcagaaatgaggggtgttagaaacacataagttctatttgtttaaaccaaagttaagtatcatgagatatgaaggaaagaaaaatcttagcaaccagatagatcccagtcacccaacaaatgttaaaattgattttacaagttattttctccaaattggaaagcagctttctaccatagcataccaagtgaacaatgatccatttaatcatgatgtgggagatagattttatttgctagcatgtaagagctgcttcaggttcactactcttcaatactatttcacctaacagtctgaacaactcatcatggttccatgtgtaagaataagagattatttctattgaaacaagtggtaccaaaaaaaagtaaaataaaatgagatcactagaagtttaagaagtcaaacttttgacccaggaattccatgtctagaaatctattctaagattgtaatcagagcaacagttgaagatttatattcaaaggtgttcatcacatgatatttataaccatgaaaaactggaaataactaaaatatccaatagcgaggatctttttaaaaatcacacacacacacactttagttaacaaacagatgaggagactgatatgaaagaaaataaaagaaaaagagaaaatacacctcaaatgcatttatctgggagttggtgtgaataaatcattttggtctcctttttaaacgttttcttttctttttcttttctttttttttttttttaagacagagtcttgctctgttatgaaggcaggctggacagcagtggcacaatctggactcactgcagcctcagcctcctgggcttcaacgattctcccgcctcagcctcccaagtagttgggattctaggtatgcaccaccacgcccggctaatttttttgttgttgttgtatttttagtagagacaaggtttcaccatgttgaccaggctggtctcaaactcctgacctgacgtgattcgcccaccttggcctcccaaagtgctgggattacaggtgtgagccaccgcgcccagcctaaacattttcatattttccaagtcctctataacaagtaatattagcaaagggacactttaaaaatgtcaaaatggcttttatcagtttaaattctaattaacattatctcttttagactcaaggaatgtaagatgctggaagtaggaggtgattttgaccttggccagggggaagctcagccagtggaaagctctcccagcctcatgctctcctcaactacaggagctctgcttttatttactttaattatatttttaacttgatgtcaagccaagccctttttaatttatgaaggagaaaaccccccagaaaagttagaagtcttgcctaaagtcacacagcttgttagttgaagatctcatattaaaactcagatgtcttcattcagataatcctgtgtccactttgtggttctgtctgtccaacaaagagcgcatgttttctgttaattgttttatagtgttaagagacccacacagaactacccaaattgtcttgcacagtatttcctccttcaaaacctaccctcaacctcgtgattgtgtggaacttgacaaaagagcctcgtttaagaaatgccactagaagccagttaacaataaaatatcacactttctttactatgccagccctggtcttaaagtatctttgtaaatgatcatgtctccttaaactttagagtgagaattcatactatgaatacgaaaaagatggcagacttactgaggacaacttcctgttatccaggagataactattttagacatcacacaaaaaacaagcaaaaaaaattagctgggcacggtggtgcacacctgtagtcccagctactcaggaggctgaggcaggagagtcccttgagccaaggaagtccaggctgcagtgagctgagatctgcactccagcctgggcaagagagcaagaccccatctcaaaaaaaaaaaaaaagcaaaaataaattaaagatgatatagtacgtgatattagcatagctgacacttgttttttcatgcaaaagaaacgtggaaaacctcaaaattatttcattttatctctgcataatttgtggttagattttgaaagtgcatcagaacttactccctttgcaattatgtatgacttactcaaaatctaaaattcaggcaatcctcaaaatattaaccattgtaccaaaataccaaatacaggcttgacacttaagtactaagctaatgctgaaatcatatttgaatgatgatgccaggtgagcatgaaagtatacagcccgaaagagtaaagtctaattattgaaacaaaagacagaagttatgctaagtcatgggcaaattttcaataaggtatctgaccaaaaaaagtcacgatatcctcgcagatgagatggagatgagtaggagggtggacagacacagacagaggaatgtagtttgcagaattctgatctggataaataaccttacctacagaggttaccaaaagctctatgggcaaatgcaaaaccaatttctgctcttgcaacaccttcagtatattacctgtccactatttacacaattgcttcttctgtgttctattgttccaaaaattatttatctttttgcaaacaaagaggaaatggtctatgctaggtttaaaaccccggaaaatactcccccccagaagcatgactagtttgcatcttttggacagctaagatcaaagtgatttaaaatgtttatttttaaagtaaaccatttatactgatctttgaaaaagctctttcgccctttaagaactgtatttgtctccacaactcttttagagacatactaaagtcacactacattcaagatggcaccatcagaattgtcctgcctgatttatctgacaccatctcaatgtcagctccacagggagtagatccaaaggagggcagggaaacgcataaggctggacctgtacagcaagagcctccatgagccccgtaacgagatgatgtacgccacagggctctttaattgaaaaaagctgcaaagaaacaataccaaggggaaatcataaacagtgttttttgggatcacttaagaaagtaaccttcgtgaatctccaacttctgtttacagagaaggaagttacaacttaaagtccagttccttgcaaattatagacacacaccataaaacagtagatacaaaatgccacaaagactttgcggggagggtgagccctgctccctttccttttcaaatctggagtgtgatttgaattgcatcagggtcaccgtatctggaggagttttcccagccgcctaactttatttcacatctcaagcacaacgcttcttttatgaaaacccagcttaaatattaatgcgtgttttcttaaggaagttgaaggcaaatcaacttcctggtacccagggtatctgatttctaaaatggtctaacactgattgtcacagctccgccagatgtgaagggtgaagctctgtaaaaaacggaaaggccagctttcaggctctctgctgtgcaggtcccacgcctccctgagctgcatcctctgagagtatatttttgttagctggctgccggaagccctcaactgcccgagttgttttgcgatcctataaggaccttcccagccctgctgtcagccctgaaattaagagtgtgtttgtgttggtaagtttggggggctggttaaaataataagtattttcatcaacatcgctgtttcagcagaatggaagcgggtggggtaccagagcagggctccaaagtttgctaaaaagcctattttgagaaaacctttgttctaaatactcttgttacctcctgcatcaagaaacaatgtcttttgttagaacccccccttctctgactgctgcgtttgtttactgacattttcaatactgggcaatacaaagagcatttcctcatattaactccaaatgtcacaaagaacaaaatctggttctaaagaagcctgtctaaccagataagatgggttctgctaagaaaaaatataatgaaaataaatcttgcgctttaatgtggcccacatagcctttgtggagccttttctttgactttcttgctgtgtcattcggaagccacttggctttgcatcactctaaccaagagagaccttactgcaatgaccctggtctctgcttagaaaatgctgacatgtggccgggtgcagtgactcacgcctgtaatcccagcactttgggaggccaaggcaggcggatcacaaggtccagagttcaagaccaacctggccaacatggtgaaaccccatctctactaaaaatacataaattagctgggtgtggtggcacgcgcctgtaatcccagctactcgggaggctgaggcaggagaatggcttgaacccaggaggcggagattgcagtgagctgagatcgcgccactgcattctcgcctggcaacagagacagactctgtctcaaaaaaaaaaaagaaaaaagaaaagaaaagaaaagaaaatgctgacatgtgatttgaagaacatttggcttccatattagttaagagtctaatcatggccactgccatgggctgaattgtgtcccattccactccaaaattcatatgttgaagtcctaacccccagtacctcagaatgtgactgtatttggagagtctttttttttttctttttttagacagggtctcactctgtcacccaggctggatggagtgcagtggtgagatctcagctcactgcatcctcaacctcccaggctcaagcaatcctctcacttcagcctcctgagtagctgggactacaggcaagccactatgctctgctaatttttgtactttttttttgtagagttttgtagagaaagggtttcgccatgttggccaggttggtctcaaactcctagcctcaggcaatcctcccaacttggcaacccaaagtgctggaattataagcataagccactgcacccagccttggagacagggtctttaaagaggtcattaaaattaaataaggtcattggggtgggccttaatccaatatgactggtgtccttataagaggaagacattaaaacacagacatgcccaggggaagaccatgcaaaggcactggaagaagacggcgtctacgagccaaggaaagaggccctcagaagaaaccaaccctaacagcactttgatctcagacctctggcctctagaagtgtgaggaaatagatttctgctgtttaggccacctggtctgtggtactttgttatggcagccctggcaaaccagtgtgcccatcatgcaactgctaagctttaaatatatatttatattaaagtcctttttgagcagcccttctaagttaccagaggatgatccataagtaatatatgaattttcaaattggtttattctgcggatatttgtgaagcaccacggcaagcacagggaacaagaaggtcagcaaaagcagacacaggccctgccctcagtgagcttacagactaaaggaggcaggcatgaatcaaatagtctcctaagaggactctaggcatgtctctgaaggacacaggcccagtgttataagagtgaaaacaaagaagcctgacaactcaggaactcagagaggctttcctggaaatagcatctgaaggacgaggaacacttgaagaggcagagaggcaaggaaggcactccaggtagaggggtccaattgcagaaggaccccaaggtacagggagcatgaatgaggctggagggcccacaatgctgtgcctgagatccaggctgaggctggtgaggcagaagatcagaccactggagccctgtggtggtgcagtggagactgatccagatgggttcatccagtgggaaaccaataaggactttagcttaacacccccacccatccctatcggctgtactaacaccttgagactgatccaaactgaaggcataacactctctgtcccatgcacacctatccttccagctcacactcctcccaagcaaaggtgttcaattttaacaccacttttcagcgctccaaagaagagttccaacttctggctgaaaaagtatgcctctctcctaagccaatctaaaacagtggtaacctggatagatataaatatagatccagatgtgaaatttcccaattagcccactcctttaaagggtaagttccaaattattttaaattatagttacatcaacattgggcttcctaagcacacaacataaaattgagttctacagagaaaggaaccatctgtgagagtatcaacagaaagagaaagaaagtcaacattatcttttattatttcttcttcaaacttttaaaatttcatgatcagtgaatcttaccacctcagcctgacagaaaaatagatattaaactaaagttacatggcaggcagaagattccaaagtattatttaatagtgaaaacagatcacgaaggagaaaatatagaaagcaagcatgtttctctagtgactatgttaccatgtccccaaaattaacagaaatacggaaggctttgccatgttttaattaaaaagagctatgttttaaatgatgccaactataggacattatgctaaatgctttccaaagtctcacttactcctcatgacacccctaactagagttatcctaactccaggagtgttatgaggcacaagtgagaacaagtaatcatcattttcattttatagatgaaaaagcaagaggaatctaagtgacttgcccaaagtcactatggtgacaaggtctattgctgaccccaaatatctctttgctctttcatatgaagttataacatcctcaatgtttatttgagtacatggctgcccataataaaaactgtatttctcaaacttccttaaagctaggtaaccatgtgaccaattcctggccaatgagatgaaagcagggtgctatctgtaatatgcaagccgtatcattaagaggaagggtctgccctgcccctttccttcctccattctgctgctaggaatattgctgtaatggctacagctccatcttggagaacagggatgagaccaccctctagggatggcagaagaatatgctagagggaacctggctggagggctttgggggaaagagcttccacctcaggtctaggctgcttacttccaggcttaatttatgtgagagtaataaacttctgccttatttaggccactcttgttttgttttgggtagggccagaggctccctcacttgcagccgaatctaactatggctgatgcagtcacctaaagaaaggcatggaacactgagcaaatgatttaatctctctcaattttctaatccgtgaaagaggatgagtaaaacctacctcagagtattgcatgaattaaatgtaataggatgtaactttaatatgtagcacagtccctggcatatcataaaccctcaatgtcagctactgccactaagttcctcgcacaacagaactcatggtgaactcccactaaatggatgaatttcactgtattccctgcaacaaccaggaagctccaacatccagctatacttaaggttgagggcctcataactgacactcttggaagctgcaggaactcagcttggagctgatcttgaagcaacttctagagataaggtgagcgtggctgaagtgaagccaaatacctggaggacctgaacctcaggctgggaagttgtcttgggccgggctgttctcttcaggatgcctgtctgctgccacctccatttccaaagaatgcctccccatgccaggccagacctctgctccttaacttcaggaacactgagactatttaaacttcagtgggttttctccccatcccaccaaagcccacatgaagaacacacattattctgtaagcactggggacagtggctatacggtccgcatctttgtgtccaaccacctggagttgtgctctaagaacttgtacacatttaaacgagttccatttagccacaaagtcgggtcctagacttagcctgaaaagcaaaaatcacgtgtagtcaaaactacccttgaaaatcacttagattacccataaaacaccacacatgtggatttgtgtttacagcctactaaaatttgagcaccactgagctggaccaaagaaaggaacaaaaggaaaatccatatgcccatatctgggcactctaactatcctgtctttaagaaaattgttaaatccttagcatgtctggaggtgggtagagactgtcaagtgttcctccttgcctctcttaagattaagcacataaaacctcagtagaggttactagatgtgtttcatgaggtgagaattaaaagaggtgatgtctgtacaaacattccatacagaacctagtccctagaaagtaaagcaataacatttcctggacttgaatctagagcttgcttgatgagatctacaaacacactgtgttctctgaaaagctgaagagaagaacttggccagtggcttcccatctttccaagttgtttttttcagctatggcccctcagactggttaccaccctcttgcctttcggaattgctctctcataaattaaacttcttgaggtgaggcttgaaagacttgaatcaattaaaatgtgggcctcaatttaactcaaaatgtgagttaaaatgtgactccaatgataacgatgataggaaattttaggtgcttgctctttttcatctaatagaaaataagattttaagcaaaatgacggcaaacaaaagaagtgtgattcccaggaatttgccacgccttctgaagaacctaggcaccaaggactccatgcctatgactgcaatgccaggtgtcagggtcatcattactggcacttgggtgaggacagctgggcatacactgactagccaatcgaaacctgagctcaaagcgtgagatccatctttagctctatccttggatcaaaactgacccggctggagggccccccaaaagacagacctttcttgaccttaggttggtctaagaaggaagaaaggacaagtagataagttcatggtccttcacccacagaaaatcacaaacacactttgagagatgaccttagaggaaaaacccagctcaaattctctagagcagtgagtccaccagaaatataatacaagtcacacatgtaattcaaaatgttctgattgccacattttaaaaagagaaaataaccaagtaaaattaatttcagcaatgttttatttaacccatgatatccgaaatattattttgacatgtaagcaatattaatgattattgatgcttttcataatattccaacatcagtgtgtattttatatctaatgcgtatctcaatctgtgctggctacttctccagtgctcaataaccacatctagctaccctgcagctataaaagaaagttgacaaaccagcaactcacagactaattttgttttgctttcatagtgatttaaatttttgaaaattagttgccatcacttaaaatctgatttcacaataaaataccttctggcttctatcaaaaaatcatatctgataaccctgggttcaaattctccaacagcaacggagcagagagaactgagaatgagcctcagctcttcccattagaaggcacactggcttccagcttgccatctctctcaacccccattccttcagtaccttacatttcctgcctggacatatcccagtaggtctaataaatagcaaggtctcaaccttgtggagataacatcaaaactattggcttgtttaatgtgataaattttgaaaaagaaatgtatttatgcatttgtactttatttgttttcctaccagttaccatttatgttaccatgaactctgaatttaaatggggtcatacacacaaagaagaaacaaatccttgcttactgattcaggaaaagacggaaatcagcctagggaaggaagctatgctatttactttgtttttcaaataactgaagacataagactgagaaggctaaggagtattaggacaccttgttattcaaatgcatcactgaaaggacagtctctaaaaatactagtgcctgtataaacttctttctccctgtgttgcttatttcccacatggggctaagcacccagtcggtctctctgcggctcccattactcagaggcccatttcctgtctcccccgtccctgccccagcctcctgggcaaggagccatggcccctcccaacacctcccatcgctaaccccaccccctcttctctctctccctcacactggacatttaaggatctttcaccacttctccccactaactgttttctctccttatcaaaatcatccaaggacatctagatctaatccaaggtctcaactgtagcttccagtcactccatcagctaccctatttgttctttcacatcaagccaatagtaacactatcaacacaccaacaacagtggcttcaactatgatgtgggagttagtgtctcaagtcagggtataagataaaacttcagaaagtctaaaaaatctttgcaaatccctgaaactacacatagagtgcagtatgcatgcgtttgcaaccttgagcattaacatctatatacaaaggtctgatcaccagcctatttacattttgggctcactaggaggcagatacacagtgagtgtatgaagaacattatttaaactattcttagcattcttttctcttttttaattttttgttccagcacacatagttgaaatcagaaggataattgcatgcacagtgagaatcgactgtgatgataattttataacagctaacactggctaagcactttataatgtactgggccctgaaccaaatgcttaataaatattctatcatttaatccttacaaaaactctatgatgtaagaattattctttttgcctccattttacaggaacaggattggagtggccaagtaatttgccccaaatcacgtagctagtaagtaacagcgctaagagttgaacccaggtctgtcacagagtaccccttttcaacaacaaagctgaagtccacagcttcactcctcctgtcttctgtctataaactgaaaatatgtctataattgccatctactgagtctgagcattcactcacctcctccgcaaagactataagccgccccggatcttggagctgtcctatattccctttgctacaaacatgcctgtgtcttctccaatcattgtaagtccagtaagtgtttacagatggcaaatgtttagtaccaaaagttcagaagacacccaaaccaaccataattcccacgaccagagaaaagtttttaaatgtttattaaagtctactgggggtaaaactcctccccttctctcccaagactccatgagaaagccctttagtaagccaccacataatttacattttcttctgtaaaaattctaaatctctgtataatttcccacaacatttaacaggagaatatttaaactaagaaatgtcttgtggatataaatgtcgggctcatataactaagtgtgtcacattatataactaaataatatcctagactttctgtgtatacctgcataacagtactgcaaatataaatgaaaaataagtaataatttatgaaaactgatttgcatttccaaatataaaatgtgtaaaatccaactaattagcacgagtgagggctgaggtgtttctatagcaactataaaaatgctaaattattttttctccaaagtgttttatatctgcctcattaatgtttgtttttcccatttgttttgtggatatttccaaagtgaaaggtttcaaagattgcaaagattctctgctttatcgcaaaattcaagaagaggtttctcactaagaagtgtctcatgtgccaacagcgatttgcattaaaactggatttgatagagtttctttcacgccagtggctccatcctttgttcttagcttcttcctaaattctccttttctcttactgctccgattgttctcggtgcatctctgataaggatacgttaacataggtcagtttttcatcttgcaccctttgctgccaccctaataattcctgagaaagtcagatccaagcaagaagtttccattaagctaaggataaaaaagaacccctaggaacaacttggggagcttgggcagtgacctcagccctgggatctcagtttccccacctaagaatgaggtggatggacaatggcccatctctaacgttctctataggtcttttcaaaggacccctgttgcctcctatgtcagtcaaactcctttgccaggattctaagtgtccttacctcacccctgcaaaccagcccaccttaaacttatggcccacattcccatgaggcagcagttcttaaccttgagccaaaggatcaattgatgggcttcagagggactgagttccttgaattcggtgcaaaaaaatttttattccagtggaaaggcacatagattgagaatggccgcaagaggctctaagtcccctgagggtagcacaatgtcttacccatttgtgtccccagagcctaacacaggacttggcagaaacaaggctctgcctcaacccagcaggcctttgcagtatccgccaaagcccactgctcagtcctctctgggacttcaccctcaatcgagcgatgcggactcctctgctctctttaccacctcctcccacctcctccttcctgcagttctgtgtccagctcaagtcccatttcctgcacgctctgtggccaaaatacctcacctactttgtctcttctttaaacttttattatactcatgactagtaccatgtaatctagctctgaacaagtttctcttttctgttaaaattgcctattcttcccagctggattgtaaactccctgaggcaagagtcatgtctgatatgattcttccccctctccaaagtgcctagtacagtggaagtcataaagtaagtagatgctcagaaaatatatctgatctaggcaaactatggggataagtaataacaattaattagctacagttatttaatttatacaatgaagagaagacatatatagtataatagttatgaataatatatgtgaatatacttaatacggcaacctacctgttcttatttgcaatgaacaccttctgacccttgacctcttcccgagaagactcgctccggggtgtgtttcagtcttctctctcttgcacccctgacaatactggagttattaattcatgccatgttcattattcgagctcagtagcaactttgaatttattctcaaatttctctctgcaacttccttacttcagtaaattgaaattgaagaccctggtacttaattattccctaaagcagtatcctgttgtttgggcattgagggagttaaaataacttaacacttaataatgctaccaaccttggaggaagttctgggaatctcccgccaaaaaaaagggcaactgcactcataggaggaaaaaaaataggagactaatgtatgctgaggattatgaatcactcttctttcttaaaaacgtggtttccaaacagaattctcattggcattctaacactaatgccctaaattctgccaagttccaaacagaacaaccacctcgaacaatccaagcaactctaattaacttctgggtccacctgtgcctgtgaggtcaggcaaaagtacacagccgcatgcagcgcatgaacacaggcaatcccgtgtgtgagcacacgtgcgtgtgtatataaagacaaggaggatttgcccaagaactactcagctccacttaactctaagccaagtttaatcaaaccctaattcccagtctttttgtcggatgttatttacaccttcagtaaagctcacggcagcacgtctaaacgatcgtgaacaataaggatatccttaaaggactgtactgttgacaaagagcatatacaaccaacccagctggaagggattcacttataatgcccttttagcaatagccgtaataatttaataccattagtctcagtctcaactgtaaatggccttaatggaccctgtggtgttcctccagattatatactgatattggggcacagctttaatgcctgcattaccgctgctaattgtgaaacgctgtgttggatacactcgagtgttgcaataagtgtcttcagttaacttcttaagggcatagctttaaaaggaacatttgtcagcacgataaaaaaaaaaaaaaaaaaaaggcaagagaacgtttcatctggtttcaacatccagggggatcctgcaaaatctgattgcctcgctcctgacttctttgcaacaagcactgttgcttcaaaacttgttagcagccatctcttcaaaggatttattttgatagttcatgaatgtgttgtcacacagcataattaaagcttacagaactattatcaaaacacagaggaaatgtgctcggggaggctgatggctacccggccgcctgtgtctgccgcttcccacaggatgtgcgctgactgaccagctggcttccaagttctgacactaggcatatggaggaaagtcaggcctcggggtaaagtgcgcgggcaggcttcagtgagcaatcaattacaagtaacagccaactcctctcagtgactgtacatattcccaccatcacacactgccagcttgcctctattttgaatgcaataaaacttgtggggagccaacgcatgtgcaactcttaaagatatatggtagggattaaccgtaaaaacactaattaaggatgggctaaggaattaggggacaggcaaaagggctttctgccttgcagtttgtatataatgaagaagaaaagggactgaaaaaggagtcttttttttgaaaaccagccgctgggataagaacacaagctatttaggcaatgcaacgccacttgtttctcaaagtcactcctcaactcagacatattcaaagagagacaaacggacagatggacagagaggaaaaaaaagaaaaaatgcaagaagagccttcaatgcaagaaaatgcaagaagaagtactcgaagttttctctttgttagcatttgacttttaaaaaaatattgtaaagtcatcgagccaaatgctaaaagaaattatgaaattaaatgattatattaatatttccaaatggccctgaattgagaccttgccttcccagttctcccttcaacatagcaaagatcttgcgcttgtttttctggtttgggaatcgtgaaagcttggggccattaacagtaataacagctgtgcttcactgcagaaaacagaactcttaagcaggtattaatttattttctacatcagatgccagaattttctcactaaaaaaaaaaaaaagctaagtttgtgagactcattttatgcaaatggcttcagaaaaaagagaatcaagaggctgtatcagattctatgatcattacatgatagatacagcactaaaaaccttatgaaaaacaaattgtgcccattgtacagatagggaaatgaagttcagactgaaccaagcaacgccttttgactggtgaggaaaatacagaaatttaaacccaattctgtctgatgcccacattatgctttttaaattagtctccccattgtccctgtgcctcatactgatagacttgaccccactgtgttccacggtctgaaaacacatctccaaggagtgaagcccttggaacagaggcacccttcctccaccatagtgtattggcaaagttacaaatctacatggtttgtaacatgcagatagtgattggaaaggaagatgtttgtttaatttttatgttacgttgccttttactcgcaaaaacaaaattctagcagctagttttccataccactcactctgttcagatttatagggaaagtctgatgcatcctaaaagaatagtcacaaatgtattgcttaccattaaatggcatgatatatgacaaagaaagccccaaaacaatcagacctcattgtgtaaataaaactatcctaagttgaatgtggagttggaggaaagggtgggcaaacaggaggagtggaaggtaggaatatgagaaactcacatgttctctttaacaactcacagctttatgagtatgtttctttggaataaaagttctttctttagattgctagtgggattattcaagcaaggaaagagaaattgtcagtgaaaatagtgtttgaaggccagaaccttatctcctaagaaagggaaagcccatagtattctgataaaatctccatgacttgggccaccccagatgctgagatcctggaactcttacacttcacaaaccagtttctagagttccaggagctcaacagatccaagcaaagaaggcagcaaggtcacttttcgtagactactaattccctgctggaagactcttcctgagaatagaaacttcaccttcaaaaactcattacctgcgtgacagttgacaagctaggactataaagtgataggctgatgcttagtcaacacatctaccagaacctaagtcttggagaaactacgtaatttttccaattttacggcccttgcttgatatattttggaaagcccttgacagtcctatcgaaaaccaaaccaaacaaaaaaaatcagtgcttacacttcataatctaatgcaacaaagaaaaaaatcacccaacgtgatcacctgtttgactcctaatgttaggctctttccaaacacagatcccaaggatggaggcttgtccctaccaaggatagtcaaagtaatatgccacaggctgggagtcaaaataggtttgaagcaatggaataagccctcaacttctcaaaagagtaatattgacttaaatgtgtaagtggggtgtccttctttaaaaaataaatacatcatatgattctttgtactcatgctttatagaattgtctctaagtaagagtgaccactaaccagaagcattctccatagccattgagtctggaagtagacaagaaacaataaaagtgaggtccacaagtcagctggaatggccagccatcaaccagttaaaactgagctggagcctggcacttacacagtaacataggtgcgcagagccaccttgcctgcaagatttccatctagggcacaacagcaagtgtctatggctgtgaaggcatttcagctgcaaggtcatcaaggctttccgttacttacaggaaatacacaaatgtacagaataatctgcaaaatcctttggccaccaaagccctgaattttcctggtcagctgggcaaatacagcccacacaaaaggtatctatctgaccttcctttccagggtagaggtcaaaggggactgaaagtgaatcacctccttggtgtggtggtttataactgcctttctttgacatcaggtgctaagctaccctggctctgctcttcttatattttacacagtctgatagatgttagaaaattcttctaaaaggggagagagtaaatgacttccagagagaaaagggggctgttgatgtgtccaagtaagcatgtaagatgcccaaggaaagcatctgggatgtcccactgaagaattcctgcaactactgcctgagtacatgagttatgatttttgtttttcccgcactgtgtatacatgacatgacatgctttatttattgatgctgatttatccacaccgctttattgttgaccagcttttatttcttctttaaccttattaacccttgctggtatttgacagcttaacaccctccatcactctgcaacattcactctgagaaccgatgtggaactaatagcagcctttttatttccaatctttgaggtcacaagcagttgccctagcctgaaccctgtaagatttttctataggaagctctctttcaatgggtcatctccttaatgtatctcaacaggtctgcctggatgtttgaaatgagatgtgattcctgctaactactgtcaccaccaacatacacctctgaataggaggaataagttttacctttggaaaaaagccctgggcaattcaagtgaagcaacaacttggtgattttcttcttgggcattttatcacctttcaagttacatccaaggagcatctatttggggatatgtttgattgtctcaaaaaaatacaacagcgaaacaaaactcacaaatgtctgttacgtgaaggaagtgtgaatgaaatagagcatggtgggagagatttcctagctccgtttttcagcctggattgattaactctaataaattcaggaaggtgatttcagatgatgcccgtcaagctggatcttatggcccagttgtttattatttcacactgccccgggctcagtctttgacattcacaaccctaaaaggtcatgaagtgaaattctacagccagacttagtcagtattttggtgagtaggctcttgtgttaatgaagactgtttttttttttaatataagttggacttagggaagaaaaattccaggttaaatacaaatagcctcaactcaggaaattcatgcttttaaatagccaggtcagtgtaagaacatttaagactacaggagaaggaagagcatacagagggaagccagtcagtgctaacaaaccaagcaaacataggagttaagaactgtgggggcagaaataacatttcccattagcaatgctgggaaaactagaactgacaccaacagagtcctaggctggccaccattgctcttaccatcccaacgaagtccaggcctttattccccagcacagaaaaaaatccaccccacatgctggactcacatttctccagaactacaggccttagaaggcatgcatgttctcaaatcaaatttttatttccctaagctaaatgcagccctagacatcgaaatctactacatcagatcagcagatagttgatctgggaaggacatggcccagtacacaagcagaggaccaatgtcgctttattttctaataatcaaaccttcctttttctgctccttgccctccctgtgtctctaagctaagagaaaaaagtaggcctctgcctgcagcacaaacaaattcccacttggggggaatcaaacaaactgaaaaatgaagagaagaggagatacaatctatttcatttagtttgggccctgcctaatttccattagccccacccagttggcttttctggcctcaggcatctatctggaccattagtgcatattttcatggctgtcctggatccattcgtccctccattagaaaacaggaagagggtatgtccagcatttcagcaggggcagtgccactatgtagcctgatttttttcatgagcaagaaattcctacctgtacactcctcccattcctgatgttgtagacacatggacattgtgctagttcacactgatgacttgaacacttttcagagagctactaaattcctcctcctattaatctatcatttatccaagaccaggcctcaaccccatcccctcctagctaacccttactcctccaagttactaatacaatgtcgcttcttccaggagccttctcagaccactgttcatccccagaccaggttaggctgccctaacataccctctcctagcactttgcttaacattcagcactcaatcattattttctgtctttctttctcacactaccacaccagtgttcttcagaccttagaatgcaaaagaatctaagaggagcttgctgaaaatgcaaattcctagtcacctgaccctagatattctaattctggctgaggcttgggaatcttcatttgaccagttgatcttcagatcacactatcccaaaacgttagttctttatcatagtcactgcctgacttctcagcactgtgtagcagctggcatctgaaaaacacttactggattgaaacaaggacatgctgattctggttcctacccctctagccggaattttccagccttccaacaactgtcactcagcagggtaggccacagctgaattttgagtagatctttgcagctcctgagttgtacaaagtacatgcaagtttgtcacacccagggttcccccagctcatatggatctttcatttactctcttctggaaaaatgaactttagcccatttatcttccaaataaagcttgcaagggaaaaaatgacacggacttggtaaataagagtttctattattaaaagcaggttgaagttggggctttgtgcaactgcttcctactttctgaagtgtctctattttaagtatgtagacggtgcttgaacaatcccagcaggctctagatgaaagagcatcctcctcattaaccctaatgggaactgggctcatgcactaaaggaaaaatacatcctttggatcaaacctcatgagtggcatcatggcaataggaggacttggggtaaggatagaggagagaggatattccctcatttcattctatccaggaacttggtgacaaggaagagagagtaaacccaataaatatactgctggactaagaaaatctaagcttctgaaaagatgctatcaacataccaagcaattgtaatggtaccgtactagaggaggagattgcagaaggggtgggcttagaaatatttttcattcagcaaatatttatttagaaagtattgggctggaatgtaatggtgagcaagaaggataaggtacccgttcacacagaattgccattctacgggtgggggtgaaggagtcacacaattaaagaaagaaacaaataagagtaagatattcaacatgaaaacagagagacttcatctgttttgttcacagctgtatcccctgcaccaagcacagtgctagcacggagcatggattcaacaaacatttgttaaaggataaatggaggactggatgactgggtggcttgatggttggatggaaggttggaaggaaaggaggagcttctctgaggtgatatttgagctaaaagacaagaaagagccagtcatggttattctgcaggaaaagttcttgaaagaaggaacagcaagttcccaagggatgaacaggtttggcatttcagaagaaggccagtgaggctggagtgtggcagagtgggtactgggaataaaatcacagttgtttgctttgcaaacaaaatggaagaatcaatcatacgtgtttcacaaccctaaagtatatatattatttttgatagctattatctttattctataaagccttaaaccaattgataagcaaaataagatctccataaagaatgaatcaatgggaatgaaatagagaagtcaccaaaaaagacatataaataaaatatgcacatatgggaaaatgcccaaccatactcataagagaaatactcatgtaagtaaagcccaatttgaatctattaagttaggtaaaagtaaatttaatgatagatacacgatgttggcaaagatttgaataagtggtattctcacaaataaccaatagaatcgagcactggagactcaagttgttggaaaacaatttgacattatgcattgagagccatgaaaatgttgaagtgtctgaaggagtaattcttctgagatttatcccaaggctttcaaagtattttctgcaaagccctaggattctgcagaggggcttcaagatttctgacagcaaagtccagggaatgattatgaaaggggaagaatgcgtggggctatagggattctacctcctgacaaccagcacagttctgttgtagaaattcagattctgtttcaagtttacttgaaaaagaagttctaataattttttaaaaatcaccctactatcttaaagaaatgatccaaattataaaaaataactaggccgggcaccatggctcatgcctgtaatcctaacactttggaagcccaaggcgggtggatcacttgaggtcaggaattcgagaccagcctggccaacatgtgaaaccccttctctactaaaaatacaaaaattagctgggtatggtagtgtgtgcctgtagtcccagctactcaggaggctgaggcgagagtatcatcacttgaatctgggaggcagaggttgcagtgagccaagatcacaccattgcactccagcctgggcaacaaagagcaaaactccttctaaaaaaaaaaaaaactataaatatgaatatgttcatcagtattatttgtaaataatagttgaaaatgaaaaaacctcaattttcaacaataagaaggtaatttattatccattaaacctaggctatgtagagacacagaaaaaatatatatatactttgttttacatatatatatatgaatgtaaaacaaagaacacaaaattgtagttgcaatatcataatttttttaaaatgtagaagtgcacatgaattaaaagtgcaataagatgattataattggattatggggtctttccttttttatgtcttttccaatttttctgtaatgcaattaaattacttttctaacctttttttaatgtttaaaaataacccttgatggccaggggatggtatattattattcatctctacatcccagcataagcaaaggagctggcataaaagaaatactccacaaatatttgttgagtaaatagatatacttttaattaaaatctgatcatgaatgaagcactagagagaggcaggacagattccctccagaggagctggagaaagcctcctgcagaggcgagcctttgtgtggatccttacagggacaacaggatccgatctgagcggagggccaggtgggaaaggcagccctgcagaaggagcaaggggagcaagaaattggcgatgagcaagtactgaatgtgtctgggaaagagaaagaagtctgggtcgcagaagcatggacactcctgagcacattaaaggaatataaggctgaaaaggtgaatttaagcccacaggccaaataagtcaaagcaagagggttccaatgaatgtgagccacagtgacatgttcagaacaggactttatggagagtagcatggctgtagtgtgcatgatgggctggttgtggggccgtgaagtatgaaaacagtagccgggcatggtggttcatgcctataatcccagcactttcggagctcgaggcaggcggattacctgaggttgggagttcaagaccagcctggccaatatggtgaaaccccatatctactaaaaatacaaaaagttagccagatgcagtggtgtgtgcctgtaatcccagctactctggaggctgaggcaggagaatcgcttgaacccgcgaggcggaggttgtggtgagctgagatcatgccactgtactccaacctgggctacagagcgagacttcgtctcaaaaaaaaagaaaagaaaagaaaagagtacagcccagggacaggctgggatgtggagaagaggtcaggggcctaaacaacatttggagctgtcggaatttataaaagaggatcaccaactagaaagggatcctgtatgtggaattctttaacaacatgtccagaatccactaagacagataatctgtcctgaaaaaatctggacatttgggggaagcagtaaccccctcctcacctcccatctccaccaggctttctttaatgcccagcatatgcatatgcacctccaacaacgaaagcctcctttcttacacgtatttactagcagtcccaaatgtttcctgtgctatataaagtctacatttgacttcaactggggaagtgaaggatggagctgggagaaggggaggaggcaaagtctgtggcacagtcactagcacatctccagttttaaaatcatgcattcagtctgaagcccaaatcgaaaggtcgcaaactcacataaagcaccggtgatttagagcttgctcctatacacagttcagcaatgcgtggaatgtaaaaatacatggaaaccacaacacagcagggctctcgctgcgctgctggcagaagtctctgtttcccacacaggccctaaatctaacccagcaatgaaacttttaaaatttgtaaaaatagaacagttggaaaatcttcaccacttttagttaaaatataaaacaaaacccgccatcttttgtgggtgcagttgcaaatcagccacactcctcccgtcttcgaaggaattttaatgataaaaaaaaattttcaaatgttgaactatgtatttcttctaggttacctggtgaatacattcttggatgctctggtatgtgtaggttgttttcagtttagcatctccaccaagaagagtctcaaaatgtccagtcaatatcaacaggtgtaacaaatgccctgtttaattttctgaagaataacaatagaacaactaccacttatttatacattaatttgtgccagaatcatctcctgtaatcctgattcctaaatcctcagtccaaaatcctgtgagtataggtatgattatctccgttgtacaaatgtaaaaaacagaataatttacttaatttttccaggtacaagtggtagccaggattcaaacccagggccatctgatttcaaagactaggccctttccattatatttattgcataggaagggatttccctcacccattcaaaatggttatatttagaaatcaagacacgccactggctcctcgatcagctcttagtttccttggactattacataaagctgcataaaaccgagtgattatttctagcctcttcaacagatctcttttctatacattgttattcttaaacataggcaaatcctgtgccttatggcagattccgggttacattatagaagaattctatggaaacataaaccagagtctgtctgtctccctatctctccgaaaccaccctctcccttcaaagcatctcactaatatttattttggaattgtcatgaacagtattatgacattggcttccttaaaaatttaacattcatgattagcacttgaaatgagtatatccaaagaatgtattttgctcagtgcttacaaccaaattatctcaagaggctatcaagagctctcaagtcattttgttaactatgttctctatttaaaggagccccacacagagagaagggaggggaaggaaagcaagacttaaaaccttgcttaaaaaaaaaatcaagtattctattctgtctctctttccctcctctaccttctccaccctcccacatccgcccccacccccaaactaaatatagagaccaaacaccaaaacccaaacttgaaaatttccaaaatgataatcaacaaatcatggtaacatggaacacagaaattaaatgtaatgcccaaattcacaggagcagccgcctggaagcgggaagtggggtgcacctgagcatgctttaggaagttctgcacacgtttacccgctttgcagccatcccttccttccactccgcagcacaggaaaggcagattctgagcataactccagagccccagcttttcctaccattaatcgtaagattagatcctggatacagaaatgctaaatgatcaacaaacatagttagctctgaactcaaatgaatgtttttttcctttccctttcattgaagagaggggaaaaaaagcttcacatggcttcctttccttgacctacaacaaattccattaaacctcaaaaacaatgctttgagatgctagaggatgcagacaggaaactgaagaaagactttacacaaaagttaaaacgtctttttcggagggagttaaggaagggttgtatcttgacagtgagagctcatggcaactgagaacataattagatttgaatgtcatgtagttgtgcctgggatgcatagcacatcaaaacagatttactgctcagagtaacagaaatgtgcaaatgccattggctggtaaataattaatgattgccccaaagtttacaaatgcataaaatgccctacagataaaattccatcatattttcaagttactgaaaattagctttttttctggaataaatatcagttatctgtccaggattgattcctctttaagaccaaaaaagtcttcattctacccaacgacctcctacacccctttgtctcctgggacatctaatttatgggtgtttaatgtaatagggtaagctttccaaaaatggtgtaataaaaatgggcttagatgtcatcactattattacatctgttattataatatgtagtgtttgcagtgaaaaccaggcttgcatctatatttcattggcatccatacattgaggccatcttgaaatttgactcaaaggactaaaattcaacatcaaaaaaactgcttcaaagggatattcagcattgattttattgggcttattttggggagcactcaaactatgctttttttgacttgttggccctaaaatgcaagaagggttaatcttgattgcaaaatcaagaaacaaagatacaggcctattgtgcaataaacagcccacatttcaatgaataagtaatatttctcacaaacccaagttagatagtggatttatttaacctcttggggtcaggtaataaatactaagtgaattattcagcccaatggctaatcaatacaattccatgatatattttttgtgtttcataaaaggttgtacactaaaggcagtgagcaattatggaaattgggccagagcgcctctcaattcctctctggcttgaaaccccagcaggccaccttgacagcaaatcgattagtgctccagtgaagcggctcagtgacccctgacctgcttccagcgaggcctgacagaggagagagtattttatatttattttattgaattaactccatcttgcctgtaccatcgctttacacacattaggcagcaagctacaagctacttcattgtcgttgttttccattgctcttgctaaccaagccccaccccttgccctgcagatttctttgtcctggttttcctttcacttttggcctcaatgcaagatttcaatccaccctgagactcatgatggagctccaggtaataaaaaccaagagcaaggcacaagatcctgctgcctgatgcttcctgcctaccttgtccaaccaggacaatgccctatccccatttttcccctcatgttgagaaacaaagaccagtcaataaaaatctggcttcacatggtgctctttggaaaatatatgcaagagaacatcaaggattaggggtatttcctactagaaaatcaaaaaataaaccagaagccactggttttctctatttttgtggcctaattacattattgactgattgaagccatcagaaacagggggaaagaaagagaaagaaagagagagagagagagaacgagaaccaaggcagctgagtttagaccaccatttcatcaggggagcaataaatccaaaggctcatcagccatcagtgactgaaagcttacaagaagggaaacatctctaaatcaccaaaaattttctgttttacttctgctaaatggaacattggtaaaaaataaaaaataaataataaattaaaaaaacaccaaaataagtgaaaagtaaatgccaggaagaaaccaagagttttaaagtcagaaaatctatttggcagctctagatgttaaatgataccaaaggttaagttatcagcagaaatttgacgttataaatcacaggattgaaggatcttggaccatatttgaaggaggcagtacagagtgatggtttcatacttagaggctgaaattaaactacctggattcaaatcccagtttttctacaaactagctgtagactttgtacaattcatccaacctcgctaagcttcagctttcctcacctatacataaggatgacaacagctgttgtcacataagcaatgttgactgacattatcatttttatcagatcccaaattattttatatgggtaggcaagaaatcacttttcagacttgttttatgaatggagaggctgaagaatgtgaggaaacagaatttgccttccaaattattgcccttcccagggtcatgcatgcacaaaagtattgtgataatcactcactcccttaaaatctccttttggggttcgaaggaccttgaactttaccattaaaagattcagtccttgggttgatctccccaaagatttaaaagggaagttctcctttcctgacccccagtggtgggggacatgaaactatttcactctattcatatcaccttgcctttctcaggagagacttggttcttagggaatattggcttcatgggtgcagagtaagggataaagtttgtgatgcaggataaaagactgaagacagtgattgagagatcagaagagaagaatttcagagttgcacttcaactgctcaattgtcgcatcagggatgggttggcacttttagataccttgcttctgataagaagatcagctcctcatttacagattcaatgccatccccatcaagctaccaaggacttccttcacagaattggaaaaaactactttaaagttcatatggaaccaaaaaagagcccacatcgccaagtcaatcctaagccaaaagaacaaagctggaggtatcacactacctgacttcaaactatactacaaggctacagtaaccaaaacagcatggtactggtaccaaaacagagatatagatcaatggaacagaacagagccctcagaaataacgccgcatacctacaactatctgatctttgacaaacctgagaaaaacaagaaatggggaaaggattccctatttaataaatggtgctgggaaaactggctagccatatgtagaaagctgaaactggatcccttccttacaccttatacaaaaatcaattcaagatggattaaagatttaaacgttagacctaaaaccataaaaaccctagaagaaaacctaggcattaccattcaggacataggcatgggcaaggacttcatgtccaaaacaccaaaagcaatggcaacaaaagccaaaattgacaaatgggatctaattaaactaaagagcttctgcacagcaaaagaaactaccatcagagtgaacaggcaacctacaacatgggagaaaattttcgcaacctactcatctgacaaagggctaatatccagaatctacaatgaactcaaacaaatttacaagaaaaaaacaaacaaccccatcaaaaagtgggcaaaggacatgaacagacacttctcaaaagaagacatttatgcagccaaaaaacacatgaaaaaatgctcatcatcactggccatcagagaaatgcaaatcaaaaccactatgagatatcatctcacaccagttagaatggcaatcattaaaaagtcaggaaacaacaggtgctggagaggatgtggagaaataggaacacttttacactgttggtgggactgtcaactagttcaaccattgtggaagtcagtgtggcgattcctcagggatctagaactagaaataccatttgacccagccattccattactgggtatatacccaaatgactataaatcatgctgctataaagacacatgcacacgtatgtttattgcggcattattcacaatagcaaagacttggaaccaacccaaatgtccaacaatgatagactggattaagaaaatgtggcacatatacaccatggaatactatgcagccataaaaaatgatgagttcatgtcctttgtagggacatggatgaaattggaaatcatcattctcagtaaactattgcaagaacaaaaaaccaaacaccgcatattctcactcataggtgggaattgaacaatgagatcacatggacacaggaaggggaatatcacactctggggactgtggtggggtggggggaggggggagggatagcattgggagatatacctaatgctagatgacgagttagtgggtgcagcacaccagcatggcacatgtatacatatgtaactaacctgcacaatgtgcacatgtactctaaaacttaaagtataataataaaaaaaagaagatcagctcctctctcaacccctccaagcttccttatcaataaggaccactgccaccatcacatttgccacatcagccatcctctgatctcctagggaaagaggactggggttcaagtcaatttgcagggactgtttctgcacaaatacccatacctaggttcgtgtgcagtgccagagtggcaagagaggctggctgccaaggctatttttgaagaactcaccacacttctctgggatactgtgaaggaaatgtcttgattttgccccatatctttccttgtcctttgcaatcccagagattcaagaccatttcatttcttatctcggcagtcctttctccctaaactcacggcccaccatcaccatgacagacagcaaagcaatctcacctttctctttaacctataagctttatggcaaaaagataaaacaccatgggaaacagtggagggaaatgaggggggaaacccaccctactctgaccttgccctgccttctccattctgcatttaggtaacagcccagatattttacacttttagaaccaatgaaagagactttttatgtatacattctccagtcgagatggacctacctactcatatcaaagggagacattaagactcacggtcaaaacaacttaaaaaaaatcaaatgcagggtggcactagtatttccatacaggaggagagtatgggggtgaaagaaattagcaaagaggccatgcctcacagcaagcaaacacacattaacttagactgcatttaagaaggccagtgggtagctgatagagactatggagagtggggatcagacctcattcctaagccattccttggtgtagtgctgatcacctcataatatttgcgctgttttgggctgcctgacctattagcaagactatcaacaacactttgaaagttccccttgatctagtgtctgagcacctaattgctgtggaagtctcagaaattccaccctaactcttcccaggagggctaatgggatggggtagaaagagatcctggttcagatgcccactagctgtaggatctcggacaagtagcctctttcctgggcccccatctacaaaatggagaggcgatttccttccaggataaacatatgattcaaagtggtgtttatctgatgtgtgagaagcctgagatggaatgtttacttcctttagaaaattggaatttaacagccaaaagagtcctttttcctctgaaggaataaaaaagaaatccatttactcaatctgctaaccccaaaaccaaaacaaagagtctgtggtataaatgagttggccaagatgcctgcacgtgctggctcacaagtcagccctcttccctgagtcattctgcaaaatggcacagcagattcctctgggtccgtcagaaaagaaaatcttttacacttttgtataactctatgcattaaaccataaattattattcccctctcttctactttcagaatctatacaaaagtgattacctcagtcatttttcaacattactttcatacttggaaaatgcattttctaaaagttatttatttttcacagcatgtcaggttgttatattgtactagttaaaataaaactactatataaactactgtctacttttgcatgcattacatttccctacaaatgctgtgaagcaggattttcacagggcctaaatatatttatctgaaatattacattatactttattttagcaccattccagattttaagaaagaaagaaacaggaaagccagttgttaaagtaacttcgctattaaataacttttttatttggagttccccatttcagaagaaaaattatttaaatattaaaagcggttttgtcatgaaacttaaaaccaacacatactattattccttctcaagggccctgggaagagctaaaaatgtcccattggatttgattcatgctcacctaaaagcaagacttgggcagggagtaaaacaagtaaggaataaaatatcgaatgagtacagaccaccatttctaataatgaggtccccagacccttgatatacacagctaggtttaaaatattttctggagtacctctaaaaggtgacaaaactaaacaaaagctttgcttgaggtaatcctaaattttatgcgtaaaattgttttttgctcaaatgtaatattaaccattctctaaagcactgtgaatttctttaaaatgccacctcacttaaagactccacaaacacaaaaggacgtagatccatttgtaactgtagtggtgagggtcctgcagctgtgagtgaggggtgcttgcttgagcatcagccaaaacaaagctgaccctggccagtaaacctaaggaaagtgccgcacaccagcaccacactgggcttagaaaatgctgctctcaggctctctctgtcgctgagtgagaggcagaaagaggaagcgcttaaatatttaataaatgattctgcaaaggcttttgagccttggcatgaagggtttgaaagcactatctactttacatccattgaggccaccaccaaaatggctatgatccagattacaagcgactcaagaaactagttttccttccctttttcttcttctgaagctgagttggcagtggcctatcttgaaatctttcagaattgctttaatctttcattttagtttcgtctgaagccacactcatgtccaccctcagtgcccttggtgttgccaggccttgagtcctggaaacagggaaagcatccttggagaaatacagagaacaagaatggagaaaagaaaacaaagatttttttacatatgtttttaacacagccaaatttaaccaaagtgtgctccctggtagtgcttttaactaacaagcaggcaatatattgcactgtaaaatgttttattttaacaccttacaggtttagctctgtggctgttgcaggtatatccattaaaagcaacacagactataaatcagaattccataccttttcacagcatatgaatctattctcctgctggtaagcacatagctttcactgatgccgatgggggtgacatatactcatgtagggagaatagaccactctctacatgtgaatttatgcttttagacaggtggctgtatgtagacaagagacaccaataaacagattttatagtagctgtttagaaacggattctgtgctacatatctacagaggaacagtcatcttttccaaagagaaatacagaggcaaacccttggcagacttacaatccacagttcagtacaccacaatttggtacccatcgtcacacacatcaatggtcatttgaactgagcttgaccaatccccaatgccttaataaactaacagtatttctgaaattccaattatgctgaatctaactcatccctgctatgaaaacatagcaaacactgcatggaaaaggcaaacgttaactttttaatgttctgtgtcatatacatacctacctgaacacagggtgcagattctcagaggaataggtttttcatgaagtagaaatcttttagatcactgctaaagggactcatacattggctttaagggaatatatatacttcttacgtttaaaaaaataaatactaaaacagcctgtcgcgtatggattctgtgtggttattttatgtatttcatttctttgaatgacatttactttgattttctttctgcattttagtcacttctagaaagggatcccaggaataatgcaaattacaaaagcagatgtagaaaatattttttaaaagcagcctaaatttccataatttacattagatattcacacctgcacagaggttgacattcagcacatgcatctagctgtgtgtgatgaacacagagcttttaccagaataaaatgtctatttctagagaaatccataaactagaaacagaccagctcctatatttagttccttcctgtacttcattttaaagacgcctcctagaagatattggaagggtcagctcactgttatttactgcaccaaatattgcttatgattgacactgtcatgtccgtgtgttgcagagacttaaaggccatgacgagatttaactactcacttttgcttgcatggctgtggtggaggaaaccacagaatactgatctatccaaaagagaaaaaaattagagagagtgtcacagtggaatttatgaatgagagtgctttggctgcaaagcattcccattatagcccctcagccaccacaaaactgctgtgtaattggaagggaactttttcccatgcaaaaaagcttgctgtcggcgccaacccatcaaagccatggcatggagggatgcacacctgcaggtagcctacctcattcatggggatcctggtccctgcctgcatcttctgctcacaaagggatctggatctgagaagatcagatcacagaagcagggaatgaggacgtggcaaaccttgacggtcctttcatccactcaattcagaggtgaggaaactgaagctccaaaaaaagcaaaataaacaagtcccaggtacatagcccatcaaaggcaaagcctggacccgaagccagcctttctcttgcatcccagcccatccatatatctaaaagctgaccctatttcagtgtttatttacctaaaactatgatcaatgaattcaaatatcctaaatgtcattctggctgggaaacaataaacttcctccaaaccagtttacacatattactgttttcccaaaggaaaaaaaaaattctttgcctgtgtgtgtgtgtgtgtgtgtgtgcatgtgtgtgtgtatgttttggctccccagcaacaaaaactatattaaagcttaaaataattacctcctttttcagttacttaaaaaaaatccgtcttctaaagacaagtgtaccatagccctcctacttattaatatcttaaattttaaaaagtctaagttgttaagttctgtagagtgttcacaagtttggatgactttatagcatgtgttacatatattttatttttatttaccaaacattcacagtaaaaaaaaaaaaataaaaaagttaaataggatgtcatgacagggagctactaggtagctgcttaaggttaggcttcaggaaagccctcttaaaaaatatctctggaaaggataaggcctgattcacataacttatattttatcataggtgaaataataatagtagctgatatttatgaagcacctactgtctaattgaatcaggtacctatagaatgtattgtttcaacaacaccaagcaatccagcaggatggatgttgctttctctattttgcagacaaaaactccaagttccaaagagatgaggttacttttccaaggtcttatggctagttaggaacattggaggcttggaacccttgtccatctgactccagcatgtatgtttggactctaaggggaaaatgcaggcataagagatttgctcagtttgatcatcacttcactgaggacacatttccagaaccctcaataagccagttcttctccctggcatatcatatcatcctcctgccctttccttcatagcacctaaaacaattgtaattttacctttatttatgtgattctttgaatgactgtctctcccactagactgtaaagtctatgcaaagtctacaacagtcttcgcttggtacatagtaggtgtccactgaatgaataaatgacccactactccaaacttcaagccaggagaattggtatcactgtcttattattctagccagatctgataacaaccacaatttagattcaaattatgtcttttatttaaacatctcaaagcaagataaaaataaacagctggaaatagcttgcaataaaagagagagagaccaaaataagtttaggactctgccaaaggtcttaatggtagcaacaaaaccataaatgtctctcggcacttcatacgtcatgagggcttgcagatggaaataatatcagtatccattctctgcttctgcttcggctcaccaagacactactccagaaaaaggtgatgtgatttattctgcattctatcattctgaatcttctattaactggcacttgtgcagtcacagtacaatgataaatgatagtcataattgtgaccctaattcacagcaagtcaccaaggtatctctgaatcacagaaaaatgtcactaggtgagaagttctttgagagatgggaacactttatacaattcccccagggaccttatacaacacctaattgttgaataaaactgtattgatcatagctatgttattatatctaaaaatgatgttctgtgtatatcatatgaagaaattatctattaaccagaatgtttaactacatagaatacccactaatgtttgttaagagaaatttaattcatcttaagtgtaagtgatgacaatcttagcagaggatattgggcccaacctcctatttattaagcaacaaattacattattggaaacactgggcttttgaaggaccccaagttaatgcaggtgttgtgggggttgtcgctattgttgttgttttaatctactaaaaactattgtctgaatacttaaattttcatataattaaacaaaccaaaactataaagtgtgttctgtctcacaagagaatcctagctggtgtgtaggagtggaggaagtggactcaggacaaataaaaattcactgcatttttaacatataaactaatcattcctctctcttccagtgtaagtcacgaggcagaaaatacatgtggagtatgtacattgccacagagtattcatataacataaaaattaaaagtaaaattatattcttctaaagtgcaggtccccaagatttttctctctgagtcaaataagtagtctattactcactgttgttgtcatttattcaattatacgtagtgttaactaagtagtgtaatataaagagtgtagttattatgacaatatttccttatctcatctatttcatatcccctttctctcattcatgtatatttgtatatttctaaagtaacttcttaaggatcacaagggaatttgttaatttctataaacaaaaccacaggaaaaagaaaatcttcaatgtaccagagctaaaaacaaagattcaaaagaaggggaaaatattaaacaaccttaagaccttaccaaatacatttaatcctttgaataactgtataaatatttgagtgtcttttatttatgttttcctccttttattataaagtaagataggctttatgaagtagtcctttaagaaaaaaggaaaaaaagaaactttggttcattatttaacttccgaaaagccaacatcaaaggttagatttttggcattcaagatcagatcatttgtaatttcttctttttttaatgttttttaaattttcatgtggagaagaatcagagatctcaagaattcttatctggaggcctctcttagccaagctgagctgatgggagcaacttttttgtgccaaaacgcagaagagaagttatacacagttcctccctccctccttttttctcccctacgtacacccactttctgactcaaaatgaatttttttttccccttgtatttaaaagaagaagaaaaaaaaaagaatccttgtcgtattggaagtgtgacattacaattcattgcattaaaaaaaagatctgaaactcccaaatttacttaacaaatccacaatgtttatttaggaccagggtgaggggtgcttcctatttgcatatggtatcctgtgaatttactatatgcataatttttaggtacttaatgaatgattcaaatagaaacagaattagaatgcagacaatgacagtcatgacactcagggacaatgaagtaggatggaagtccaaagctgtttggctaaatcaaattgtgcatcctaaaatccaatttctattgaaactgcaggagcttgagataaagttgtcataaagtcttatcaagattagtcaagataacatgaacattaggaagccatatttagatcattccaattctcccatcttcccaccacaaaaaggactggaggaaaaaatgatccagacagttcaccttgattctcttctccctcagctccccatagcctatctgagctttgttccctgcccactgccttctagctctgccaccagtaatgaccaagacttcattatctctgggccattactatcccagtaacttcccaaattgatctccttgcctctgggaactgttccctacagctctccgtatattcctccaagtctaactcaaatatcccttctctctagctttccatgacccccacacagaattaatcaattccgatacaggtgcccctgacactctgtcccaccatttaaccatcttatcagttactcttggtttgcatatgactatgcctctcagtgcacagaccctcgagggtagaaaatgtctgtttcactagcatatgagcaatagcatctcccacaaaacaggctctcaataatcttgttgaattgaacccactaggtctactggtgaattttagctattcccataattgtgtcgacttgtgcaatgacaaaaatcctacttattaaaacattctactgtaacataagcggaatgtgtaagagccatgggcctaagtggagtggtggaagggaagagacctcaaataggccaaagcatcatttcaaaatccttttctcaaagagcacattaagtagaagagacagcatgccaggactggagactcaagctactagtgagcgtctttctttttttaaacaggtgcttattgagttgtacactctgctacagattaatgattcagagactaataagatgtgatctctgccctccagaaaactggtgacaaagacatagtatggaggggtaaatctgagaaacctaagattggataagattcatgactggcaggatcaacagtgttctgagtaaagtgggtggagggagcccggctctgtagtgtttgccaatttctatggtgtaaatatccccactatgaatgacttcaagctaccaatgtgatatcactgaacagagctgggaaaagattcactcagttggttctcatgagtccacataagccagctacagcacaacactggacagaatccgtaccctccacagccacaagctacattgcttttcatccaataactcattcaatagatattactgcgtaccgagtgtctggcactgtgtttattattgagtactgagtgtcaggaggaatagaatagtaaacaaacaaccacagctcctggctgcatggggcttagagcatcctatgctgggaactgacccagctggggagtgaaggtgtctctgagaactgaagggaaaggggctagaatctgacggatgaattgagcttctcagagaggaaggaatgtccgtgacagaagcaatgggaacagcagatgagtaagaaagttggcttttatcctaagaacaataaggagccactgatgagttaaaggctacagaatgtcgtgatcagcttcgaattctcaaaagcttactttggctcctataaggagagaagggtctctagagaaaccaaaagattgcagagacaccaatctggagttaaggcaggagtcaggtggcagagttggggtggcgcaaaggggacagagctgagagataactagtatggctgacagagatgggggaggggcaacagcaaggatgactcctcggttcctataactgaagggacagagaaatccatcaataataaggaggaagatgaattcatgttttgacattgagttttcatccacatgaattttatgttcccctttgtgtaaaaagactccctacaaaagaaaacccatacctcttctcatgcccttcaaggtccttcacacatcagccccaacccttttgtacccattgccacataccccattactgctatttccctcccacgggggtataacctttccaaaacttttagtaaattcatagaagcctgtctgaactttttctctcacatcccccatcaaagtctgctttctgatccttgcttcttggaaggacacatgttcagcatcttacagagctgcccaacccagaactgtctgcatttcagacagaagaaaaacctccaatcatgtctcattcatctttgcatcacctggacctttcaggagataggcactatattttccacatgctccatgtggaaataccttattctccagagcaaaatcataacacctggtccaacagcatgaacactcttagggaagaagacagaatggtctccagacatacaatgagcactcaacaaacatttgtggtatatgaatttgtgcacttcttgatggactcaatgaagaatcaccagatgcctcctacacccaagtacgcagtaggtactcaataaagaaaaaaggatggactatcaagcttccctccccataggaactttacactcagcttctataacagatgcatctggtgcctacctcacatccctgtgtcccacctctgacttcagccacatgtctgaccctgaccacaacctgctatgtcgtggcttccttccacggcatgccaactctgaagcagatgcccagcctgcacaccagcaccctgggacagccctcaaccaagaggggacaggtgccaggagataatgctctagcctcttgtacttctggagcctggctctaggaggcacattttactctgtcccttagaagattccaatgggaccatgtaccagccacagcagtgactctgataatacatcactgccttactttttcttccttgccttttttccctcttctctctccctcatttcctgcttcctaagatcatgcccatataaactacctgcatccaaatccctgctgaaggtctaatttctggggaactgcaaactaagaaagcctctgatctaagccagccatttcaggatccacaagagactctttcactctggctgatgaattccacaccaaaaacagggtgagggccgttcagcaacttttcagttctgttgttctctgaggacatctgtggatgttttcagtggaagcagtacacagtaagtgctaaatacacatgtcttccaaattaaatccaggtaaaaatccagcttcttcacaagtagtaaaaaggaggtaataatgtacatggcatcccaaattattcattttgtcacaccattcccctgcattcgtcaggatttcatttggctcctttttccaaccttagcccagcatgctagcaggtatttatcaatatattaaatgctacttaaacttcctaaaatgatcccagaacagtaaaggggaaaaaagcttctgatttaaagctaaacatacacagctatccattagcatgacaatgtctgcattttacttagacattgccattaataatgaaatgatgtatgatttccactccagcagctcttccttccttgcacaatcaattatacatttaagaaaatacttagtggatagaaagctcctctaattaagcatcacttgagggagcttgtgagattcttaaaactagaaaagatatctcagagaagtaggatggtggagggaaaaaaaatccactcaaaatgtttgagtcttgattagacaaactctcaggcattctgaaccactatgaaaggaaaaactcacacacacatatattttaacccaatagactttgaggcgaactaaatattctgcaaaatgtaaaaactttctctttgttccagctaagaagccaggactaaattgaaattagatattttggttgagatccagccccagccccagaattgctgtcccttttttgtcttccctgtcaaaatcattgaggagttaagatagttggttcttcagaactctggaaattgtccaacgttagaatcaaatagaaatagcataagatttcccagaaggcaaaacaaggatggttttcctcactaaaattattacatatcacatcgtgttcttgggaggggtgcttatctggtgataatctccagaatgattttacatcccggttgtcctacaaaactaactctctccgacacagcacagcaaattcattcaatttggtgggtcctaacgctttctctttctctccctctagaggcagaaaatgaagcactaaataaggtttaatttcacggcattaaaaacaaaaccaaggataagccactctgacaggaacagaaagcaggccttggaagaaggcaaggagtatgtcaagaaagtggatacaggagaaccaggggacagcggggagagaagtaaacaagaggttcgtttctctttctctctctctctctctctctctctctcttctctcttttctctctctctcctctcctccctctctctctcctctcctccctctctctctcctctcctccctctccctctctgcattgctcttcctctgcccctgtatctatgactctgtatccctgtctgtctcttcctcttgttctctcttgacttctacccctccatgcttccccaccaggaccatcagtcctcccacaagggactgtctcccctcctgcccaggtggcttctcctacaagaggagacaacaataaatttccaggacaatgtacgtggtgtgggtgtgataaacatgtcaccagagacagcagatgtcccttgactttagtgacttggccttcagaagcccctcctttctccagctcccctgggcccctgagtctcagtcatagctctcagaactttggtcaactgtgctaggccaccagttactttctgcacacaggccataagcatgtttgtaacatacttgtgcatgaactcccttataagggttgactgactcctgcctccgttcatcctgctagccagtctggctgggttcagccaggagccctccttccccgccaaggcttagaagcaaactcagaagaaacccagcggcaagcaagaattgctcccggagggagtagtgggtacaaagctgggtgcctgtgctctttttaattccccattctggcaaaaagaaaacctcaggtctgactttagagcctttgacacataattggtagccaattttcctaagtggtgagtcaattttctgcttgtgaaatgtaactttaccctggtgaacaccaggccccagggttttcagtgtggcttaacagcaattatacgaatgttaggaaggggggaagtgttaaagtccctacatttacatttgttttttatgtttttacctcttaaagggataggagaagtctcctaaccaagtaacctatgaaaaactcacccaaagacaggcacaggatatcctgggaaggaaaaccattttgaagccgcaccacaaagggttccttttttttttattttaattctcaaatattctcacaagtagtgagatgtcacggggagggcacaacatttagaggtcaaggcatccttttcctggttccccttgggctactttctttgctcccaccctgtcccctctctcccctccccagccccccaaacaaatcccccggtgagcgctaggccccgcctcgggccgcattccctccccctcccccccgctcccgcagccccccacccccccaccccgccgcccggcggctgacggctcccgctccacatgtgcgactcgtgtttcggctttcgctggcgacaaactggagccggggcctttccgcttaggaggaactcgctacgtgtcgctaacaacaacacaaacaccgccggcccggctcggtgctccgctgcccacagtgcgctcggcaccagggctggatttatagcaaggagccccgactgtaagaagtaattcatgagtccccacaatgccactactgagaggcattcagaagggggggcaagacacggggtgttcctgctccgtggcctccatcccagccgatcccgctttgcagttgtgcacaatcacaatcgcagccagcagtttgccctcattcattttgcactttttcttaatagagtgggagaaagtcatctcggccaccaccacccttttatcacaatttgttgaaaccccaagaggcttaaaatacgttcttttgccatttatagttgtaacagtattacatacaaatgtgtacacaaatctgcgtggtgcacacatacgcacaggctcataagacacacgcaaaaaaattattattattatgggctcttctggaagatttagtatatttgtttcagaaagacgtaagaattttaataaaactaaaccttatttgagaagtatctaccatgaacgcaattttggaaaggtgcaataggaactaaataactgctgttaaaaatcatttagctgagaaaaatatgcatgctaagaattccaccaaaaaaaaaagacattgtatgccacgtaggtatatgtgtattgcttagcagccacagaaaacctcctatctcaaatcaaagagaaaaacactacacgtgaaaactatcctttggacgattagactccattccaaaagatatagaaaaaaaaaaaaaaccacagcaaaaatacacacatggatctttgtaccagattctgtattaaaagattgcttgtcaggtcctatgactacctccccgaagtctgctctgtggttacaaggtttggtgttcagtcctctgcaaatcagttcggggtttctctaaatctgagccacagcctgtcaagatgatcctttgcaataccagccttttaaatcccacacttttgttttttctccctcgctctcagaggaattgtcctgcctaggtcagccattctaagctggaattcagagactggacggatcctttaccatgagaatttggagctgcaaaccttcggcagagccctggggagggataattgttttagtgaagctcactgcctcctcagtggtccgtgagaccctgctgagcgtggctgcttacctttggcaggaacccagggcaggttcaggaaacggttccgtgttcctgcccttagctttgtgtcaatgaagcctggcacatcttttttgtggttgtaatttaaatgagacaaccaactgcacagctgtctcggtcaaattatgcagggccatgtggcctttcttccatctttaaaaagtctggggcacctctgaccatgtttgaaggaagcccaggggagcaatgaccaacaaaaggaatagcgattacgccagcaaaggatggaaatttgcctaaatgaatatattaagggctgcgcttagaaaatggaaatgttagtttttaaatagaggcagaatagtgttatgattaaaaccctgatctttggggtcagacactgcaaggttggcatcccagctccaccacttaatagctatgttgacgttgggcaagttatttaaccaactgaagccccagtttcctcatctgtaaaatgggagaaataagaatactcagcacatagaattgctgtaaggattaaatgagagaatacccagaattcagctaatatgtggcttcataaatggttagttatcatcagtaattacagtaatgacaataacacatagaacatgcaaaacgccaatgccagtcactgccacaccagtcatctgtaaccaagaaaagactaattttactctgcctctggccccttattttacatattacagggatttattcttgcaggcaaaactaatgtgactgaagtttctatcattcaagttttatttattctgttgatctggcattgggtattttaacccctctctccctctctctctctctctcacacacacacacacacacacacacacacacaccccagacatgggaatgtgagtataagcatctgcatagatgcacactacaccaatacaagccagcagatatgcagacacaaaatgagtatatgtaccccggaataaaaggaacataattaccaactttattttgacaactcttttcaatgatacccaattaggcattgcatggcaaaaataaactctttaaaatactgaaagcacaacccattgtatatttgctcctaagggccctttaaaagctgaggttaaattaccatcagatggcaagaggataaggacctcgccttagggcacttccttgggataaatggccagttcttgtcctctttggaaggggttgctggcccaaagcaccatgaggccagtgaccccttgctggtcattaatcgttaccgaattccctagaaccaaggtcattattgctaatataaacttaaataaaaattccagagacatatggatttcttttaatagttagtcttatttctttgctttttatagggcatttctatagaattaatgttctatacattagctctgtagttggtttgtcttaacacttgatcctgcttaaagtaaaaggtttattggacctaaaataagaagcgaaggaaagcaaacaaaaaaacaggaaatcctgaaagggcctattctgtacctggaattctcagaaaaatcattatccatgggactcacaattttatttctttggaaacctgtcaaaatattataatgtttatatttaacggttggataatttaaaatttaaaaaatagagagagagatctggttcccatcctggacaaagttttctgtttctcagtctctctctcgtctcctctgcacatagaaaaaaatttttttcaagattttatgaaattccaatttcttcaagcttaaggaatatatactgtattgtcactcacaagcaaaggatattagcagagcatataatttcatagcttcattccaaagatgctcagcattatttgccttaaaaggaattatacaccctaaaagtacagaaacaaagtggatatgcagaaaatgaacaattatttaatgagcatgtactatgtgcaacttagtgtagattctctgtatatcaacattaggctgcttcatctggaagacaagtctcaaccagattaagagacaacttgaggatgttgcacaggcaacctctgcccacaaccttttggggttactatctcacagagacaaatgtgttggtccacgtgcctcacattttacaagcctacaattttctttttactagatcccttccccatcttgcccaagttatgctaccaataaatttaaatataacaactcaattagccttgtaaggtgcatcatctaaagatctcacccactagcttcctgccttaaggtagattttagcaatagacatgggctgtacctgctgccttatcttcttattacctggctgatcccttggatgaggtaaggaagaagaactgaaagttgattgagaatattgttggttattcagttctgacctctgtgaggttgctatttaccttatagtacatgctacttaagcacatgtttaataataggtactgtccaatgtcagatatgagaggtaaccagatttataagggtagagaggattaaagtcattgagagaggtaaccttaaagatcctaagtgtttacttctctcgttctataaataagaaagctgaaatccagagaagttaagagacacacagacacagaggctcacatatctaaataacagcaggggcagtactcaaaaccaggtctcctgtgtcccagttcagcattctacatgaggttccttctcatttcataatgaatgagaagtcccatatcagaatgagcaatttaatgtgtcgagcctttaacagaaccaaagcatgctttctccttaacagaagaatatgcacaaatttgggttcatattagaactattagtaccttgaagatgaaaattattagcatagtagggaattaacctacactaaatctgatgagtagtgaattactttaaatctctttttggaggtgggaccttaccctgggaatggccaggtaatggcaggagaaagatgaatggcaatggatttggtggtgatttggaaaagagaaagagattctacaccaaatccaatttccttaataggtgagtgccctgggaggaccacaaagtgcttctggggcagtccccaatctgggattgggggtacaacttattttatatagtagatgcttcacgaacatttattgaataaattaacatgctgggtcctttgtttctcctgtctgaggtcaatgaactcaacagctgcttgtcctcaccacctctgtgaatgtaaacaatggtttctaaaggagagactaaccctacatgaaaccattttttaataggtttagcatgattatcctttctggcttctggtatcaaactatttgggagcagaaaggaatccagcctgttgaatgatttatgacaatttgggaagagaaaaagagaagaaaagagtatacataaattcaaaattccaccttttaaaattaattttagtggattgatactgggaagaaagatttagttggttgactacattcagtcatatatttctgtggagacggaaaaaattaaatttttccaaatcagcacaatcttttcagccagaccagatagtcaaataattcagaggtgaaataattgtcacttcctcctttgccccatactctgaaacagtacagaagctgccaactccccacctctccctctagcttaccaggcgaatgaatgcccctttgccttctggaatcattctcctgcagttcagcatgagactatgccaggggctaataatttctctcagcaccatacccatgacttctgcccttccttggcaattccaaatgtgtgacaaacctcttcgggcttaggcaaaactgtacacaaaagtggtttgagtaggaagaaatacagtgtacttttttcccctttcactacaattttttcagaattatattctgcaacaatgcctcacttcctttattattatttttggaaagggtactttcaatttgtttaggtttaaataaaagaaaaattttattaagacttactttgaaaattgccaacgtcaatatttatgtatgtcagtaccttccagagaaagataatagtcagagacaactgctcatggtaagacatctggaatagaaagaccttttgtaaaattcctactgaaagatgactattgatgaaatacctctggcaaacaaaaacaaaaattgcaatttgtcgcacggtgttatatgacatagtatgaacaagcacagttgcaaataaatgaaatatgtgggcttttaaaaataaagtaatattttatgatgggatattctgtagcttcctcctccctgtgactgttataatttctttcttttcttttcttttcttttttttttttttttttttgagatggagtctcactctgtcacccaggctgaagtgcaatggcaccatcttggctcactgcaacctccgcctcctgggttcaagtgattctcctgcctcagcctcctgagtagctgagattacaggcatgtgccatcataccaagctcatttttgtatttttagtagagacgaggttttgccattttggccaggctggtctcgaactcctaatctcaggtgatccacctgcctcagcctccaaaagtgctgggattactaagcatgagccaccgcgcctgacggactgttataatttctgagaaacaatttaacttgtgctccgtgcacaatgctaggccttgttagagatacaggacttaggggcttccttggacccaaacccagaaaagacacgttgtacccttccctaaggctgattgcacacaaggtgaaatggagagcagagcaggacccagatggcccagagtagtagtagaaaagccactggaaccagagccagggacttggcttatggtcctggctctgagactaattaggtctttgggcaacattgctgtgcttctcttggcctcagctttctcatctttaaaatgaaggggctgaactgtaatctctgagagtccactcagcttaaatggaatcgtggtctcttcctacaggaatctagattttttggaaaacctgcctttgggatctagctaggctatgtattagcgttcttaagctattcattctccatatttgtgaaatgatacaaaaaaatcctgcttacctcactgtgttgtcatgaaaactaaaaagagctgaacccatgtgagatctttatgtcattccctcgaagaggtatgtgaatgatagaattaaagtgctagccttccctaagttttgtatgtcttggtatacattgaaggttcttagctaaagggatgagattctgacagtggaattccaagcatcagccagaattgggtgggaaaacctttcctgcattctcatgagctctgcagatagtctttattgtttttaaacccagccgtttaatcagacctcaaggaggcttttctattggagcttacagacttgtccaaactaaaaagaatatctaaacctggaggagggggatgtaggagggagaatgagtaagaaaatgttttgttaatgaataaagatcctgtatttcattcctgaaagctctcactttgctttaggaccatcagcagaagcacagagctagcttaataagctgtaggacgtgaaaaagtcactggtaggtccagggaagttctcagctgaaggggaccctggggaattgtccagtccacccccagccctaccttgcaaccagacaaatgaagctgtctgctagaaaatctggagataccctttcacatttccacaatgacaaagttgtgtgtgggagtccccaggaatcatttataactgaaagaaaaggaaaagccaccttcaaactccagttccaatagacctgagatctttccggaaacccaaaggaactgcctcatttggttttcccagagaatatgaacaacagatcaaactaatccaacctagtggaagaaggatctgtagagtttgggctaatttcttagtaatattcagctgcagccacttcccttctgtttaattttcacgtatcttagtgcttgaattcgtaattcatacccttgttttgaattcccactaccaacagattccataaggccattcatgtcaaacaccctccaaacagttccaagaaaaggactgagctagaattcttttctgaacagtcagaggggctatggacctggtttatatgagtagcatgttctcataacccccaaatccttgacagacattccagggacatggccacttctgccatgtagccaccatttcaatcaggcctcctcaaacaacttactcctaatttctacaatatgtaggtggcaactgtagcccaacgggtgtccgtagatacaaaccaaagctggctaaaaccatgtctggaaagctgacaaatttccaggcaatctaccctgagcagcagacagaaataaaagagctggtaagaagagaaacagacatataatataacagagtttcctgaaattcattataccaaacttccaggatagatcaaggaattggacctaattctgccctgattattttgggtatgtcattatcaatgttgcagaaacatttttaagccactgtctatcaacaatttgatgaaaaaaaaaaaactaacatttcacgagtaatgttgagtgcacagtgattttgaaagaatcactattagtaaactaaacagcactctaaataaagaaaatgactgctgttaagacatactgtctgagaattctcaggaagaacaccacaacgctaactctgctgtatataagaaattattccagtatgcatttgagtaattctgcattttaatttaaccctttgaaacattaatcaaaccatggctaattataggaattaaggaattaaacgatggaatcttctaaaagatattatttaaaaggcagtttatacaattacttgtatagatgtttgctttaaagaggaaaacagttctactgtaatgaaaagggtcttagaaaattaaattaacaaggggggaccaggctgatatgaaactaaattagcatcaaatgcaaattacagggtacttaatggtagaaacaggtgcagagaagaaccctaaatgagataaatgaataaaacatccctctccacaaatgtggaagctgacacaaagtcaatgatatgaataattcagcagcctccacactgctgttgaggtcagcctgccttgacctttgaaacaggaagtaaaattcagttcaaatttgagtgactagaaatataacagtcatttgttttttatattaaaaaatcaacagaattttttaaaaatacaaatacagaaaatataaaatagaattacagtttgaactagagacattatacaatcaaagtacttagtaaacaaacaaaataatttgataagattttacccaaaccatacttcaatatggaaatcctaaaaataaaaataattaaaaacatatataccagtgctcagcttaatgaaactccctgtgagaataaatttttaaatcgttatcctttcttcaaagtattttgttgtgttgctatcaatgtaaaaaaagcatgtcataatttttaaaagccacatattcttattagtaatgcaaaataatttctcatatttgaaagataaaatttggttaaactagatttttaaaaatctatgtaaagttgctattttttaattcttcaattcctgattgaataaatactgcatcctccaaaactattcaccttagaaaaatgcaacctaggttctaaaaacaaactattctcataaccgaatatctattgtggttttacgtgtcttttatcctttttttttctttttgcatgcttcaaaagtattttgtacagtcaaatagtgaaagtactctcctcatttcaaattgaatttagtgctgttagagattaacagggtatgacaacaaaccaatttctacaagctagaaagacagcaaaatatatatggtatatcaccctcgtccttattttacaggatggcataaaagatgtttgataatagcagttatctctgccctccaattggttctattaaggggacccacaacttggctatctacctttcatctatctactgtgcttgtcagataaaagattatgttgaaagatgagcttaattttattttctagatttagagagggttaaagctacatacacacacacacacacacacacacacacacacacacacatacccctcagccatctatgagagagcagtggtaaactaggtctatgattgtaatcactgtaggaagaagtttgagaaatgttccttccaaaccggagtgtttagttgaggcaaaattaaagatgcagggtgtgctgggtatttcttaattattattattattattatcatatctgctaaatcactcctcgctcgacatttaatacagggtgatagacaaaacactgctgatttggggtttgccataatgactgacctgagcaaaggctttgtgtacaaagtggctccccattaaataagggctctgtggaaccagctggttctcattttgaaacaaccggtttctgtatccccaagtgctaaagaaaataatccctgccatctatgactgcacactttcacagaggcagcaacgagaatttgattgtggagataattaaagtcattcctggaacttccaagaaaaaaaaaaaggtggaaagaggtggggtagaaagaaagaatagtcaatgatagtgtttaaaattaaactatgacaaatcattttgagtggagaagagggaggaggagcccccgccctttatggaattcagttgaaacagctctgttttcttccccactcggctgctccagagggaggtccgagatgcgattagtcagggcgacggcccccagtgtccggctcggaagccgaagaatcgaaacatggctcaagaagctacttgtcactgatgacacatcacaatgagattgttttgttttttttttttttacgtttcaatcctaaataaaatagccgcggaggaatctaactggactcttcaacaaacattctttcctagttgatctgaaatgctgaggttagtttaatataatattaagaaaaaaaagagtgtatcagacattcagagacactcatctttcaatcttgaggagagcttattcttttattattttttgaatgctacattgttctacaataagaatccatgttcaaatagcctgaatgacattcagctgaacctacgttccctgcctgcctacattatttcataagcttttgggaaaaaactaaaatatgtgtaatctgtctgtctgcgctatctgcctttaacaggaagaagagatgggctcaatgaggacgactcacggcctctcaattaacctgattagttcagcacattgctctcatgaatgacaccttatcttaaaataagggagaacttccttcctcgagtagacacaggagccccctaaagccacaaagatgcagcctatcaaatgtgagggcctctgcttctcctccctcttcccagctcgcaggtcagagagactagcaggccaggcgcctgattggattttgtgtcctaaggacagaaggcaagctcccgtctgcccaggtggccttggagaaggctggggaaagggatgccctgtgggtaacttcaagccccttctttcagagtcaaccaggcacatgatgggattgggggtgggggacaggaagattggggagggggagggagggaaagagaattcattaacccttcaatctccagagtatcaggtcaatgctatacctgcctgaaagaaaaactggtgaattctgaagtcttctaatagtatataaaacaaaggcgctgcttgcacaggggtctttctaacactgatttcgcgtttgacataatagaggatggctgaatttttgccctgcaaaaatcaagccttctcccaaactctctgaaatctggtggtttgcaaaggatgccacatatatatgtttttacaaaataagaaattcccattatcatgtgtaatacacatagttaatagaatatattcttgaaaatatgctttgtgagaatgtcaacagcagagattttcacttgtctgctctgtgatttacttgatcaattaaacagttaggcaatgaggagatttgcatggtaatcgtgtgaagattaacatttttaagtgtaacaaatttaatattttatcttacattttctgttcctcatcattctttaatggcagtgccatttcactttattgtgtagttataacaagcttgtctttagacagagagatgagaccaccagattcaacaactgcatttctagttcctgtcattccttcttttcacaaaaacaagccctaagcatctagtacacaggagggaggcactgtgctcaacgtagtcactgccctcttaggcttacaacctaccctccaaagcgctcatctacctgcctgtgctcagcaataccacaaacagctaaaattagaattccatagttggaaagggtcttagagatctcttccttcagtcttaaccaacatgtagactgcctcagaagagtgcaataaagccgtggaatttgcccaagttcgatacctctgggtatgagctaaaaggtgactttaacccggggatatttttcttctgcatcatgatcccagtgtaaaatggcattcttctatttttaaaacatatatatcaatatattctttgtttatacttgctattactattccaactatttttgggggactgggggcagagatcaaccctgagacactgagaaagctgcatgaagccaggaactatgtttgtctttttcactgttatacccccaaccctgaaaacagtgcatgacatataatagaggcttaataaatatttgtggaaacaaaacaatgaatgagtctttatctaaggagacttagctaccatgattaacttcagtaaggtaattgtgctcaaaggaagtcccatggcaatgatcacattaagaatgaaaatccacatggaatatacgatgctcaaattgcaagagctacctgattttaagcacctgttatgtgccaagcccagtgctaggtgtttcaatcctcacaacgcttcaaaatagaagtgacttttcccattttgaagatgagaaaactgagccccctgaggctcagctactaataagtagctgtggaggaactggatcccttagccaatgcactccaaaatctatgcctttgccatcatactgtgccttctcccagatttctgtatggattactgatgtttttttcaagcaaatacacaatcaaattaaatgaggacataagaactcaaacattgctccagcaatgagtacaataaacagtgtcacatatgtatatatgcatatatgtgtgtgtatatatatgtgtttatatatatgtgtgtgtatatatacatataaaatcctgaaagttaattgtgacatcaactaagaaagctggcttggtaaataggtttagagtaatacatgaaaatgtgctgtggatagcaagaaaaatgaaataaaagagacattatgaaatactgaaaacagtgtttttagctgagcaattgagaaaagggaaaaaaatcagtctgggagataggagatgtggagtttctaatcacttgctttgtcaccaataaagtggatagttccttaggctgtgtgcctcagtttacagatctgtcaaatggagtcaatttgtgcaaagagaattttctgagatggtataccccgacgtgctctaaaacgctggaagtgccatttaggtgtaagctactattaaactcacagtgatcaggggttttgcttgctttgttttaaggtgctcatagaccaggattcagatgctggtcttcacgagccagatcagggcactcccatttctacagctacaggaagaacaactcagtgtttaaaaccatattctgagacatatcccatatatctaacattagaatctggctttaggaaaacaacaagactgtgtagagaaacatgggttttcaactgttggtaacagcttcaaagataaccaggtgaacccttaaccaactttcttttctaaagaactttttaaaaaatgaaaaagagactgctctcttttcatctttttttttttttttttttttttttggtctctgtagagtatgtgcgtgtgtgtatgtgcgtatgtgtgtggtgtgtgtagctaaacctgatgcaggtccatagttcttcaaattaactttccattctgtgagggggcttcagccaatagtgcacccaagagtgttaaaagtgatattttcagatattactaacagatcagaatacttatgaacgagaagcacattaaaaacaggtggggaaaatctcagtagtttacctctggaaaacaataaataaattgcaagcagcatgactgtctgatattcaggtggagtaataaagagctttagtcaaatcatggttgcttcaggaaggtggaggagggaacaaccttttgaccattagaaaagttacccagctgggctcctgactcctcggcatgcaccagcagagtctaagtcgcgtgcaccacccggcaaaggcggagaattcacggcactggcggggagcagcaccacatcaaaaagcagcagctgatgtcatgaaacaaaataccctatcattttactttgataattttcaattcatcaattaaaaaagaaaagaaaaaaagttatttcagccttgaagatgtcatgtcctgagccccagtgttcacaccctacagaagggctcttcctacccacacatggtatcaatattaagttaattgagcagcaaatgagcaaaaaagttcttgagggattcttgatattgattaaaaggacattaaaaaaaaaacccaccacaacctttacatgaaccaaaatttgagaatgtcgccaaagccccataaaatatgtataatagtgacagtgtccagattaaaaatgtacatgggcagcttgattactattttctggttttttccctgccctggctctgaaagtgttaaagaaaacaataaaagaacaagtgagtgtacagggtaggatttactggcatttacttttaatctatggcccttcactctgtagcttatcgggcctctgtcagtcctttttccccctttatatttcatgaggagccccccatgctgctactgagagacagagcccaagtgtctatgagctttttgtcaggtaaaaagagaagaaaaaggaaaggaacaagaggaaaagcaaagctaagaggcatctattagatgtcactaggcttttgtattcatgtcaatgattcaggattagagtatttgaaataatcttattgagaggaatcaaaaggcccaccgagtgagaggctgctctgtagcatatggcaaaggcacgaacaatatcttattaaagatgtgttggctaacaccattactttatattatattacaaaactattgtgcctcaaacagttagcaggatggtatagttaccaagtgccattttggaggttattgtgtaggatcaatctatataatttgccagcatgtctagctcagtcatgacaagtagggtttagggcatgtttgcaactggaaccaagcacttcactttcaaaaatagaaattcccaaagcacacagaagaccactctgttcccaccgaaagtggagtacacatttcatagatggaacgccaatggcctgtccttccccagaatcagtttaattaagtttgcatcatttaacatatgtgacaccccctgccccacccatgaaaaatgtaacaaagattttttttttttgcatgactcccctccctattaggaatacatgcacagacacacacacacacacacacacactcagcttcacactttagcaggattagggcaattaaaattctattagaataagtactgtaacgttaaaaccttcttttgcttctggacaaagacttgtaactggagaaatagtttgtaagggagatttttcttcctctacccacacctttcaaggcagggagcaatgaaagacaaacctgtactgttcaccatatttcattgattgcaataggagtattgaggtcacttttatattgtcctggatagtatgtagttacgcggtttgtaaagagaggaatgggatggggggctgtgagaaggaagaattagtggtcgatttcagataacatctcatgcaaattaaagtgaccaaaataccatctctttacgcaggaaccactaaatggagttttttaaatctggtcaatttttattagagagttaaccgggtgctggcaggagagggaaatgaggaaatgaggggaatttatcaatggagagttacacttggagagagtttttccccccattctaagcaacttcttttaggaaagtaaaagcatgtttaatatactcatatattctcattacaaaatgattgtgcatagttactaatgggacacacagaggacttcgtactgcttttctgtatttttccagaactgttacaaaagcaaagttatgatgacatgggattaaaaacctacaccacgggctgatacccgggccatgctacacatacacactactgattctctgaagctccgttaaatacatttcttggaagttgctgccattatttcctttacaggaaaaccactgttgttcattatacagtgtctgcaatagtattataccatgtaaaagtactttgcattatgatacattgtcagcgtattcgaaatgcattttaatgcatcctggttgtgtatttgggaatagctgatagcaaatggaatatagactgcgattagcttattgtattagttattttcttatcacggtagcaaactgcacacaaatgtacggggctcatctcatattcagaatggtattatctgatatgtgataaaatttagaatgatactcattcacataagtctcatcgctaataatcacatatgaattcccactgagaagacaaatgtttaaacacactaaggttaataaacagtcttaaattcatgctcagtgtcaatgctggcttttcacttttgaaaaaatgcaaacctctcaaaccaaccaaaaacacaataattatcctgcctagggcaattttagagagtgaattcctcctccttttattttaaccaagcagtcaaggttacaaatcaggtggtataaaaggtttatcggaacgctgagaaatgcatttacacctctggttcttcataccccacacagccatttgtgtatagtgcagaatgattatgcattggtggtggttggtccttctaaaaactggatgaagaccaaaataagaagagttgaaagggcattgaaatgaaatcatgaaactaactaaaagcctcatttgcaactttaataaaattatatatttatgttcatgttaattgaggactttatgtggatgacaaaaaataaataaatattggaatttacctctgattataaaagacagaggaaagccattgattgttgaaaggcccagatgcctttacaatccttggcaaatacataccacacccgacccaatggtaaaaagtatgtgggtgggtggatggatggatggatggatggatggatggatggatggttagatagatagatctctcctaactctaaagtttttatattgttttcctattatacatatgggcatatatgttatataaatacattggtgtcaatttaatgaagaaaattagcttggtgataaggcaacactgcacttttctgaaaagtcttaccacagaatttacacctcttagaaaaagaatgagtcttcaataaacttgtttatctgagcaaccataacatggttaagcttttccgttcatatgatgtacatcatataaaatcaacaggcaaatgggcattctaatattttcattactgaacattctatttcagataatcataaaacaaacccaattcgtgttacctaaatggaagtgatctagatgtggaagatctttagacaaatctggaaaaaagaaatacaggcatttttttcctttataggagacccttgcgtaagtgtgacccgaagtaattccaaacagactaggtttttcattttacaaaatttgtgtattttttttatgtcacatgtcaaggcctacatcccatagccatacacatagatacaggaattcttaaaaatgggggaaaaaggcatggtaattctgttaatattacaataaacaaactcaaaattcttacaggtacataagttgacaagcttttaacatccaagttttaaatatcggctttgaggaacccaaaacttttaggttactggagctacattatatccttaaaaaactaggtctaaattcacaccaataggagaacataatttgagatggaatttcatcctttagtatttctatctactaaaaaaaaaatccacttgttaacagataaggattcattgcacaaggaatgatgctcacattgtcacccttacttaatggttcatttcatcaattgcactaattctaaattcaaacaaacaaacaaacaaacaaacattaagctgccccctatcccaccccactgcaaataagcaacagaaatctagccagaaacttcaggagtctgtgtgaaaagaagcctccagcatactttggagaaagaaatgtttttataagaccatctgtattcatccatgtcattgctcaaagatagtttaggaaaataaagagtttggggaagcaaattaagaatgaatggtcatcctaaccagatatggaataacagtctgcatacttaatatattcagttccgacatttattaaaaagtttccatatagaaagattttttaatagatgcagaaaaactgggttcccaattcagactaccctatgtgacttttgtcattatcatcttttctgattcttacaaagtaaacctaattaagaacctccctcattagtcttccagaaaaattagcacagcttatgctaattactcctgcaaaatttaataaactcgttgaaatgggaatagtctaatgaggttttatttattgaactaagataactccaaggaaaaaggttaggacacaaggatatccaatgtggtaataaaactcctatttattcaatttctaaacatgaagtttattgcaaaccttttaaattcaaatattagttactgtgtcaatatgtaaaatcaatctccaccttaattcaataactggaagtcattttttgctttttactttaacaataattaccacacatagccctttacctcaaaaataatgaaatctgctgttatcagttcctggttatttgctattaaacataacacatttgacttttcccatgtctatgcagctcaaatatctggatcactgagtgcaggctgggttatgtgcttcttaatcaagctatttggcaccacacagaaatgtaacctggcattcaactccagatgtgcacttcctgcatttacagcaatttttctataaacttttttgaagtgacttgacaaattgtcatgattgtaaaaagaattggggtcatatgtttctcagtctgtgcatgccataaggatgaagtataatagaagccccttttctaaatcacagtttgcaactgctgattttgttaattctacttttttgatagaatatgccaggctgatgtcccaaagtcagtggcagcaaataatacagccaaaatttaacacagaaatagcttgccctgcacgattgcactatgaccagaaagtctcttctctctaccctataaatagttttcctgaataaaccactgctaaaagtcttttgactgataaaaatagtagtgttctcccaaattccgaaggacaagcaaagagagctaaaaattattggtgctcaaaagttgactgcgtgttaaaactatgctaaatcctaacgcaaggatggcctgtaccctcagctctgtaattgcatattgtatgcatcttttgaaaacagttactattgctactgaatgcaggcctcatagcctattttcacaaaatattcagggatttgcatccataaatctgaaagcaaatcaaaccctaagcacgtaacacagatattatgcaatcagtaatatagaatcaaattggaaactatgaaattcaaacacggttgccatcattttttcccctttgcagcaattttatggaattgaaaaatcttttctattttgccctttcttgcataagttcttctcttgttgttattctcttctctcgctgttaagaatgggagtttcacatatcagcacagacaggactggagcttttaaaacctttggcagcctgaaggacaaataaattctgaaaactcaggtgcaaataaaaatagctaaatggggttttgcatatcaactggcatcactgcatgaaaagatagttcatcagaaacaatggcaacagccagcgaataaacatatgctgtggggcttgtgcacatacactgagtttcagctgtttttaaagtactcctatctgaagagaccaagattggctacacactgttttctactttgtcaaaccaaaagggaaaaaaaatgaaaaggataaatgtcatgagtaatatccccaaagccaccaacagcataaagtgcatacttattttgcctaaattgtttgaactaccccagccaagaaaaggttttaagtacccttctgggacagatgcaaagcggcaacaatagaagccacactaatgcaatccaggtaacacaatcctgtttcaaaaacaggggccgggctaattacagtgctgctgagtcaagtttcttatgccatcgcaacccacaggaacaggtcaaaatcaaatgttattcaaaccacagtcatatcaaccttctatatcagagtcacagcttcaaaccaaacgaagaacttaaaagcttaacccattcacaagcgaaaaaaaaaaaaaagtcttttcattgagggtggcaaggtaaggttcttgtcatcatctaaaccaaaaggaactacatggcagaacaaaatgcttatagtttcaaagttttggggactatttgggctggtcctttgatccgtacactttcttttcaacagaggaggaagaaaaatgcttaaaataacaaatgatattttggagaggtaaatttaaataaaacaaaccagcataaaggttaaatttacttgtgaccttattcatttggagacttatgttcaatcacagaaaaagcaactatatgaacagtatatctgcttttgtagataaacatgttatcctaattctataggtagcacacacatcaccatatgtcaaactttctcatcttttaactttgaatcaaatatactaatactcttatatggagcaaaaatatatatattttagtgaatactagtgaggaatatttagttaaaatatctgattgaaatgtaacctttataaagcttcttggcaatcaattgggtttatgcctgaagactcacataagtcaaaatcaacaatcgatcttttggcataaattatgttgaagcgaagtaaacatcttgttttttgttgttgtcattgttaactgaaaaatgataaaacaagcccaaaaaaggtagaaagaaagatgggtttttttttcttttgttgttgttgtcaaaaatcaatattgctgaaacccaaaaagggacttgtgttcaaccattggtttcctcaatgagggatcggtcagtcttattggcaagactctttttccagctagtacaagatgctagctcttttcctagctgacaattgacagtatctataaaccttccaggccatttaactctcaatgagtaatgctatgtaacaaatggtttatcatacatgtttccatacaatgaatttcaataattaaaatgtaaaatgaatatttggaatgcgactttgcataatgcgtgcacactgactcaaaattacaccgaacaactaaaacagatttattgttctacggtgatttacttggtcatgtcagattagtaatatggatctgtttaaaaacacaaaaattaagacaagcaggataaattaatcaacttacaatatggtctcatactgcaatcaaatccggcaaataacagtagaaaatcttggttcacagatctctttaaactgcttttatgcataaataaaaccttaaagtgtagatggattacgtccaacagaactactgtagctaaaagtgataatgattcaaacatttttcaaataaaagttaaatatttataagcacccaaccacatttcataaatcacaaactattattattttatttctgaagcttcctggcacagcatgaggattgagccacagaaagtcaggaaagaaaaaatatattcctttaggagcatgaatcagacaaaaaccggagcaatccaaggaacaggcctctaaaagaacattccatatggctttcccaggaatcaaaatcgctcagcacagcgtaagtcatgaccaacaggcaaatttcagccacatgcattcctaaccctcgcccatgagcaacacaagggcaggtgtttcattataatgaggaataagaatccagtgaaagaagagtggtccctacctgtcaattatcactggatctgagggagtctcatttcggttgccacagcttttcttgtcacaacagcggctatggagcaaaagcgaaaggatttagtacaaccattacaatgtaaaatcatcatttaggcagacagaaggctcaaattgctgggttgcaaatgctagaattaccacaaagccatacctggcaatcaacggatccctgggacagataattctatttgggtcacctatgggttaatggccaggcttaacctctccctgctcaaagaaggaggtgggggagaggggctctcccagagccaagactcagaaccccaagatggggtctccccatgactgcccgcggtgctggcagagttcactgtgaagtgcactgttattgcatctacccaatgagaatattcaaggttgtgggtggctcaaacgttcttccctcaagatcacactaattgtgtggaacgcatcaataatgaggtatgagtgatttctccccctccagtcattttgtattaaatggattcctttttcttctcttttctcctttatgggtagcatttccttcaaccacagcctttccaaaaatcctacagctaggtttgcttttgaaccattttcatgagaataaaggtaaaacacaataattaagacaaggaaggggcaagataaaagaaagtggagattcacattcctctggctataaaagcctgttctgaccctcacttaagttttctgggggcattatggacattggaagtaaaggttagcacagctctgtgagaggacgctctttatgttagagaaggaagagcctatgggctcgaaaagtacctattactaaaatctcccctgccagttgtggctgccagttttttaaaaactgagatgccttctaaagggtgaacattttatgtttttgaaaagtacaatggtcaacagaaaacgatccatctgaaacttgtttgcaaataaaaacaagatctgcaccaggggcatacttataaaagcagtgaagtagatggggagggaggtcctccaaaacttacatttcaccaagcaccacaagcaaatatgcacttcttgctcttacacacacacgtgtacacagagagagatacacacatacgcgcacacttacaacttagtgaatcatacagcctaaatttagagggctgctggagagaaccaaatattgaacttcatcttcaggacccagaaatatactcctgcgtagggagtccttcaccaaaattggaaagtctcttttcttgccataactatgcctctgagaagagaattagtctccactcttaagtgtcttctgtttttctttcatgtcttcggagagtaagagtaagaactgtatctcctttgtcaaagcctcggctaaaaccactctgtctaccttatagcctttcaccttctgattcagagggaactatttcctccaggcctgagttctgctatatactgctacttttgggatggaaaaaccaaagtatcatgatatctaagagacagataaagtaacaagtagttgaagcagtggaaagtacaagcagttgaaatgcatgccagaaaatacataaaaatataactccttcatccctgaactctgatcccctatacctacatttcatgggcttctcagaatagtatagtggttaagaacactggttctgaaatctgacagagctgcctatctcaacttgagcaaggtaatccacctcacaggatctcagtttcctcatctgtaaaatggagcaattgcagtatctacctctaaatgccagggaacaggcttgaggcaataagggtataaagacttggcttcatgactagcctcactaaagccacaatgaagcatcattatcaccccctgcacctaccctcttcagtcccttcctccttcaagtccaggcaaatctgccctgtgctctgcagaagcagcaggtctccaaaagcagcccatcgacagagcccacgtctcctttacccatggaggaaaactgccggttgagaaaacctatttctccttcattttccttttcaaaacagcaagtaggcaatgcaagctgcccacagacctgcctgggagaaatgtcctccaggaactcctccaacctgcttgctgataaccatgcacaagggtctgtttttaaagcctatctgattttctcctcccccactacaccatctccatccaagtccttggactctgcagtggctgcctacttttctgtctccactctgaccccctgcaatagccagagtgagcttttccaaatgtcagtggtactgtgccatctcactgcccaagactttttaatggcttcccactgcacttagaacaaatccatgacatgacatgataccagaccacctcccaaccttctgcccccttcctccaacttgccaagctcctaccgcactggcccatttcaatccctctcagttgtgccctgttcaatctgacctcaggcccagaccctggccgactcttgcctggcgggcctctcctccaacccttccctagttagccaatcttttctcaccctcagagctcagcctatagctccttccccagagaggtttggcctgacaccccacctttaatctaaattaggtttttcctgtttttttttttccttttaaggcacttaactcaatgcaaattatatttttacatatatgtgtgtgtattttttgttactgtctttctccctcttcttattcttctcttcctttaactcatagacttcgtagaggaagaaactatcaattttacttacctaatgagtggcataaggcctggggtagaatagaaaagctcaaatattaattgattgaataaatgaataattttatgaatgaatgttatgtattggggggcaaatacaatccggaagaataaaagggtgacagataaatccaaggcattgttgatggaaggaaggtgcacctcatcccaacccgtagaacaaaccacctcccccaagcatgccacaccaggcctgagatttttccttttcacttaagcacggtcgtcatctaaaaataaaaatgtccctgagagcagccagatgaattgaagcattcctttctaagggacccagggaaataggcagatgcaaagagcagaagtgtagaaggaaatatagaaatgaaatggggagaatgaagaaaagtagagaaaaaagaataaagggctggagttcactcaccacttacaaaaaaaactttaggccaagtatgaaaaataagcccaacatgtctcctgtttcttgggtcatatcactgcatcacatagtcattattcctgaaatgagctactccggcttctgttctgcacctcaaaataatgtctgctacaaaataatgtctacagtatgattctgttaaatatatatatacacacacacatacatatgtgtgtacatacatacatatgagtgtacatatatggatgtgtgtgtacacatacatgtgtatatggaattctgtgcagcattaaaaagaatgaaggtagagttagaagcactggaatggaaagaaatgtacagcatattgtgacttgagaaaaccaagttgcagaatactattcaaagtatggccccatttctgggagaaaaatgaaagcatgaaagagtgaaagggagagagggaggggaagagacagtttttacaagtatggttcactccctcacttcattcaagtctctgcataatgtcaacggctttagaaatgccttcccctctgggcatggtggattacacctataatcccagcactttgggaggccaaggtgggtagatcacctgaggtcaggagttcgggactagcctggccaacacggtgaaaccccatctctaataaaaatttttaaaaaaattatctgggtgtggtggtgggtgcctgtgatcccagctactcaggaggctgaggcaggagaatcggttgaacccgggaaacggaggttacagtgacctgatatcgtgccattccagcctgggtgacaagagcaaaactccgtctcaaaaagaaaaaagaaagaaatgactgccctagagcactctagctccttattctgcttaacttttcttcatagtactcaccatgttgtattttatattcatttgtcttttattgtctctctcacctgaatataagccccacaaagacagtcatagaccccagcaactagaactgagcctggcacacagtatgccatcaggaaatattttttaaatgtaggaacttcaaagagttaacctatagagagtggaacaggcagtggggaagaatggaagacgtgcattttatttttatatttttgcagtggtttgcttttttttttttttttttttttgcactcccaggctggagtgcagtggtgtgatctcagctcagctcacagctgcctcgacctcctggggctcaagcgatcctcccacctcaggcccttaagtagttgggactacaggcagatgccaacacgcccggctaattttgtgtattttttgtggagactgagtctcaccatgttgcccaggctggtctcaaattccctggctcaagcaatccacccagctcgacctcccaaagtgctgggattacaggtgcaagccaccacgcccaggctagtgttctgctttatatggcaatatgcttttacattaaaaattaaaaatcaaccacaagcagtggaaggaaagacttcttgtagactgagctgatatcaagccccctgtggcttcctagagccgagcagagtgaggacctctcctttgttgccacaatgctctttcctgcccatgtgagttctcccttttcaggtagaactgcccatagttctttctgctaagctcagaaggaccaagagtgagcaccaacctccactatacacaggaggaaaccaggaaggaaaagctgaaaggagaatgaattcacttatgtttaaggcagaagagggctcatactgaaacaattccgtagatgaaacagatgcaaaagcacttaacggaaaaagtgacagtgttaataaaagaaatcacaatgataattaggtcctcattactgtgtgactgatggaccttcatccgttcaaagcactattttttaggctcctacgatgtgtgttgggcactgtaccaggcacagacttgggatttgctctctcatgctggcatcttgcaaggcttggagtttcctaatttgctttgctgccagggtaagattttaaaagcaggccactgtttacatcccttccgaacctgcaaccccagtgacatgagaacaatgtggccagtctcaggcgttggtagccagcacctggtgtggtacctacactacggaccgaaatcagcagccctttcctcagcaggattgtgtgtctcccaaacaattctgcacatccagagaaaagcgaacttatgagtctctttcttaccagcctaacacaggtggcgtatttctagagcttcataaactagagcaagaaacacctaaatattcccagtcatggaatcggcagatcctcatcttagggacatggaactttttcctatgaatagtgtctttctcaacaggaggaaagcatcatttcaaacttgtaaaaaacaagatgccttacctatttccctaaagtggctagagactgagatctatgatttatctgaatagtcttattaatagttataaagatgacttgattttaaagaatccattacataataggctcttctatcctctctcttcctcccatgtcttaaagtaagtgatccatcctcgtcacactaactcaagtacctgagctcacaggtccgtctcattctgccttacctgggaccagccccaccaaggactcctcttctgttttgcatttgccattcttccctccctggttaattctttccttcagtttgcaaacattatcaagttttcccattgtctaaaattttaaaaggatgctccttcttttctctgagttagtttcttcactgccgacatccttcttataagagtccctgtcactacttgccatttcaaccacataatacgggcatccaggccctcagcatgtacttgaatctcctcttaaagtttaccagtgactgtctggtgctttctcagccttcatgtccatctggatctctctagcacttattatatgactccccctctttgaaacaccctccttttatcttttttttttttttttttttttgagatggtgtggagtctcgctctgtcacccaggctggagtgcagtggcgcaatctctgctcactgcaacctccacctcctgggttcaagtgattctcgtgcctcagcctcccgagtagcttggaccacaggttcacacaccaccacacccagctgatttttgtattttttggtagagatggggtttcaccatgttggccagactggtcttgaactcttggcctcaagtgatctgcccacctcggcctcccataatgctgggattacagacatgagccaccgtacctgacctcctccttttatttctatgctctgtatgctcaagcttctttttctgaactctctaacacaccctgccttcttgctaagcgtgattattccccccaagaatatagccatgccttctctttctattctccctcccttgtcaatcccatctaagcccatagcttcaactctcacccttgggaaacgacctctgaagtcagttatctttgaccataactttatttccagatccagaactcaggaccatccacctgcaggactctccacagagaaattttggctggactgaaacagacgtgcccaaacacttcatgcaccctctaaaatccccctccctattcctgctacccaactacaagtatttcctcccttctctgaatagacatagccctttgcctcaacctctcatcacattcaaccctttctagagtgcagtctcgttatctgccaaccaatatcatctcccaggccacaccataagctcccctactacagaacaaagtcttccctggctctccgtttttgagtgttttgcacatagtaggtgctaaaagaataaatgaaaacatccttaactcccacaactagaatgaacaaagtgcatgaatgttttggtagacatttcactttgattcaaagttcttttatcctcattcacaccaaacaactgcgcaccaagtacttagccccacactgcaaatattgctgttactgcttctattaatacaaatactcttactattaataataacagtagatattcagtacttactgtgtgtaaaggcactgtgataagcatttgtggtgattattgcatttaatcttaatcaccaacttctgagataagtaatattatcctctatttcagaaatacgaaaactgaagacagaggaacacccagtaacttccttgccttcaaaaagcaatcagtccagcaaaggaagacagattgtgggcaaaaagttacaaatgtgctgagtgctatgaaagaaaagcacagcagacagtagtcccccttatccatggttttgctttccatggtttcagttacctgtggtccagtacatttttttgttgttgttgttttgagatggggtctcgttctgccacccaagctggagtgcagtggtgcaatcagggctcactgcagcctggatctcctgggctcaagcgatcctcccacctcagccccctgagtagctgggaatacaggcatgcaccatgcctggctaatttttctttcagtttttatagagatggggggtctcactatgttgcccagggcagtcttgaactcctgggctcaaacaatcctcccaccctggcctcccaaagggctggtattctgtacaatatttggagagagagatcacatccacatagcttttaatacagtttgttttcatggttgttctattttattactaattgttgttcatctcttattatgtctaatttataaattaaacattatcataggcatgcatgtataggaaaaatatagcgtatgtaaggttcaggactatctgcagtttcaggcatccactgtgggtcacgcaacacatccttcatggataaaagaggaccactgtttacaggacaacgtaacaataggacttgactcaggctgagagccagggatgcttccctgaagaagccatgcttaagtgggaatctgaaggatggaatcagaataagccagtaacagagaaaggaagaaaagggaactcaagggagccctgagaactcatggtcctataagaaaccatacactgatgagggaaagaggtctttcttaaacagagctctgggaactaggttcactgaccaagcatagttcttattttccatccacatttaaacacaggatgtcaggatgccctttaatcaaatctcttctagaatcgtgctttagaaaatcatgtgtggggccgtattattttaagagcgtagccaacaggtatagcaaaatgtaatgatgattgatatgatagattccaatttaccaaacaggcagagactctctcagaatttcacagaaagagctccatgtccagtcaaagaggctttgtctctgagtggtaataataattataatatgatccaatggtggccagtcccttatccagcccaggcagtggggtcacctttcagacagaacacaatggattttaaaaatttgcaaccacctgagacacaattctctggtgtttctcattttttctttttttttccccctttgcctgcaacaaaacagaatcataccaagccttgtcttgtcgatctaaattctctgtgtctccttcaccatagccaacatactataaatatacagctttcatgacatcaacacaaagttttattgtgccgttagctttgatagaaagcactgcagaaagttgtttagaaattaaatatctgaaacaagctattttaaaatccagggccctcactatttcatgtctgcaatgaagaaatttcatcttggggagagcaagctgtctttcacaccatatggctaatggtggtgcatagcaattagccagcctgattaatggggaacagactctaattttatgcttataattgagcctgcatttgcacccctggtgcaaattcagcacatcccaacttccacttaaaacaggcaagaaatcaagagaaataggatggtgtggaaagtgagaatttttttcctaaagccccctaaagagcatcagatttgcaatttaaaagactgttagccacacaatagatgacaggtttgtgtaatagggtcatggcagcctggtaaacaaacagtaccccttatacatctataggcagccaggaaaacccgtaatctgtaacattagcaggatgacattttgaatacggcttttccctcttagccacgcagtacaaacatcatcatttgccttcagtggcttcagaattttatttttgctatttttatgtttctgaaaaatagaaagaacatcagcagtaaagcacaccaaccagcataataaagtactttggaccagtgaattttaaaaacaagaaaaatataaactgcattaatagagggtaggcctgtgtgtgaaaggcataatatatctttaaatgtttcaagaatagaatgatttctagcatagtctaaacatgtgcagatatgagatgcaaatctatgatatatagatgttatttggcctattggttgagatccatcttcctgtctgtttcctattttgctagaatcacatgtagtacaacatggaaaattcattctaatgacatgctaattgtaagaagccagaacagagatatggtcaaaaagatagtaagaagaaagaggtcatgttttaacattttctaaaatgaattttactcacaattctgaaaggtgcaactcagctttattgtagaattgttatgtacaatataacattaatttttgcctaataatatcttataaagaaatctattgccatattttgggggttctgctactgttttaaaattagagaaaaacaacctattttcataatagttaacaagttttacaaatcactgaaatgaaaacttgtgaaactcctatatattttagaataatatgttagaaatatttttaaaagggaaaaaatgaaaattgtatatccatacgtaactgtagacatacaagaagttggtatttgggatttcactcagaaagcacattaagccctttttctttccacctgtagagttttaaggttgctttcccccacaagtccacaagcagcaaataaagcccatccatgctgaggcagcagctgaagccctaaacggattggtcagtaatagtcagcagccaggccagcattgtgccaggaagagcctgcatggttaacaaagcaattagtagcctttctctgatgcacagtggcatcttcatgctttatccaattattcagaatatattgggagcaaactgctggtgttactttatgcagaataagaatgcaagttaaagggctgttccctggcctactccctcacatgtggaaagcctggctgaggccatggaagttaatttggtctacttgcctgttttcaaatgtagcttcagtctgattacaggcaaaaataaagacactcatctatgggtcacatgaattttatgccttttagggactcatctttgccttccttccaaaagctcactacctctgcgaagtattggctacattgtcagagttatatatagggtaaataagaggtgagatgcaagaggaagaaaaaaaaaacccacatgcaatttaagaagaaatgatgcctaagtgtggacgtcatattttcaagtgggagaattagaaaggggaactataactttcaagtcttacccaaacagaagactctgctgacatcaatagaactcttactcattttactagcaatgcagttgagcgcatatattaacactaaaagggttatattgttttatttgattttaagagagtaggggaaggcagtgctttgtgcccattaacagtgtgatatcaaaatggaaatgtatgtctttcgggatgaaatctaataaataattaagaactactgtgatgcctgacactttactaccaaatactcacatctaacagttctttttagattgtctatagaagcaagacaaatgtgtaccaaaaaaaaaaaaaaagaccaaagttcaccaagatttgaaatgcaaattcatcttctctttgctaattaacgggagagaccaagatatttcttacctgcacatgatctcatgtgtgagcaagactcggcacatttctgggttcttgtcttggccttcatacactatggcctaaaagcaaaagcacagttttagctaagaatggaaaggagtagcagaaaaaaaaaaaaaatcacaattgagttcttaaccacttcaccactactgaaggccaaattagctttgaggagccaaagacatcactgggttgatcgtctgaaggtatgatattcgggattaacctgaaaggcatgttcctctctgccccttcaaccaccttgccatgatgcacatctctggatcagagtatgagatgggcaagacagccacaattctccttttaatatagaatacaaataaatctcatcaataaggagggaaaccccagaaggcttagcagattgagatactatttagcgaaaatacagaaaagcatttggatttgatttttaaatgatatgtatttgcctcctcactttactacttccaggctcaacatttagtcttccagggatgggtagtagaaaacaagtgtaggtgaactaaggagtccattcactaactgtgtcatgtttgcaatgatttatcaatcagggaaaatccctcttcccatcaacaggctgagaacatgtgctctcacagggtgcacacccacccaaacaggaatactcgctggcatatgctctgtgtgtggatttaagccataaagttatctccctaaactaagaagagttacaactgactctcaaaatctggagtcccaaatcacctcaccagcccaaatagttttttctattttttgtaatgtgtttgtaaaacgaacattttactcaaggacaccaagaagattccctgggacctcagctttcatggatctacatgttaatacctggaccaaagcaatgcacacagctattagcagagcagggctctgcagtgggctacatttagctaatttaacactgtatcacggcataatactaatatcacacggcttcaaattgttaacaaaattactttcacacattcctatagccctcaatttcttgatgacaaaactacttaaattagccagagactatctttatatagtacatatatcttaatatagtatatatatctttatatagtacatacagatgctacaagactaacttgtagttgactctaacgtgctttgtttttgaacctgggactttcagaacctgtaaatgatgaatataacttgcgacccagtgtgtatagatcctcagagagaactgtggttatggtatctgatcccgttacaaaatgaacattgcagtaaaataaaaaatgagaaaatgtacttgcatgaggaaaaaatacttctccaccattggcccatcgaaaccactttttatggctaacctataataccttgtattttaaaaatttttttactttgacatacatgtacacctacaaaaagctttcaagaatatgtaaaaaattccaagatactcttcatccagattttaccagatgactaaaatgtttatattttattaaatttgctttattcttttctctgtagttttttctgaatcatttattaagtaaattgcagacatgccctaaatacttcagcctgtatgtcttcaaaataaggaattctcttacataaccacagtacagttatctaaatcagaaaattaacattgatacaataatttaatctacagaccctactgagattcaccagttacccaataatgtcctttacagcaaaagaaaatccaatgctgcatccagttatcacgtctcctttaatatggaacatttctgagtctttatatttcatgacattgatatttttgaagaacacaagccagttattttgtagaacatctctcaatttgggtttgcctgcgtttcctcaggcttggattaaagttacatacttcagggcagggataacacagaggtgattttgagttcttctcagtgtatcaaatcatgttgttgactagttccactattggcaacataaattctgaccatttggttaaggtagtgcttgctatcagagatcatgagccaggtttccccagggtaaagttattactttaccctatgcaattcataactatcttctgtagacgtaatccagattgtgttaatatcttactatgtgtcaaattttcatccactagtttcagcaagcattgattattctttgctgtattcttaaaagaccttttcaaaatcctaagcagttgcattactcaagaaaatgcattaactaaaaatgttttgaaaaccaaaaattacatctgcctgctttatttcctgcaatcactcctgaaaacattttaaaaaacacagtaaattacttattagatctcatacatgatgctaaaaaactctaatgaagcatttcttctaaatcctattagtactacatggtttgtatgttctctaaatactcgtaataatctctgtttcagctttaatatttgtgatgttttggttccaccactctttaaaaaataatatatttgtcatgctaagctaaaagaagtaagctggtaaataaattcacagatactgatggggctttccctaatatatatatatatacacacacacatatatatatatacacatatatatatacacacacacatatatatacacatatatatatacacacacatatatatatacacatatatatatacacacatatatatacacatatatatacatatatatacacacacatatatacatatatacacacatatatatacatatatatatacacacacacacatatatacacacacacatatatatagaaaagcttggtttttggaggcagggggaattatcagttacatcagatctttttatttcaattctttctagatgacgcaaatattagtttcactaagactgctggttccattgaaattagtgggcccatgatgatattcaatggatgcaatgctgcaatacaaatacattcatggttttcccaaacagcagatgatacagacttccagaaatcctgtgtcacttctttggtgactgaatatcacttgtttaaggccctttgcctccatgatacatctcttcaccaaataccacactgccactatgcttccagcagcagagtcaaaacagaatctttctccaaatcaagcacagaaaaatgaaaccatcagtttggatttgctcagaaatagttaggaactctagggaggagtgcaagcatgaagtttcttctctccctctccttggggcctctatagaacaatatttttcagcacataaaggcagagaaagaagtgctgcctccatgacttctgaaataaaagcaagtgaaactccaccatggagtaggactaaaatcctgtaactaaagtaaactaaaaactcagtgtaatgaggttagctctagagtggaattcagtcaaagacagatccacctctaacctcatcaaagcagtttttgttactgaaaagtattgttaaacacacatacacacatgtacccctatcatacagaaggtatgggcacggaaatcaacatcctgattggatccagcataggaatatataataaattcattttgatgaatgtctctgatgcagagtggcaacaataagaattttcaaaatgccctaaagttctccctgcagcttgcacacccaactgatagccctacatcaattttaccatctacatttagcatacacatcaacactggtccacagttcagcaaacccagactttaagccccaaaggacagggatcctgctaacaccaacttcgggagaagtttctgcgtttcttcctaatttaaatatgtgcctctgtggtgtatgagtaaagctggttggggttggatcagctgggagatcacagaagcatataaacagcattggctattttaagtgaaaccattttaatagacagctggtttagggcccagacaatgaaacaccaagaagaaggcttattttcatcctccatagtaaatcatgagtctgctcactatgaggaaggttgtctgttgtgagagggacaaagacaacactggtttaaataaatcaatgtgtttatctgaagtgaagatgggatgcctgctatatagatgggtgggagggggagaaaaatcatataaaatatattatttaagtaaatcaattgatagtgaatcaagttgaggtttgtaacctaagaatcaaaaatgcaatatcaagtagaaaacaatgtttaaattaatcctgccaatggcaaataaatcccttaaggtgacaggaatgcttgtataagaggaagagttaaatagtaaacaacattaacctcatctcaactttaaaaacctggtgaaattgacaaacaagctgtcaaaagtggatatatttggaacagatttatttttgtgatatactagcctaccttttctgctgtcatactctaatgagtagaaagaaaatatctcatattattttttgatactctcttcacttcagattaaggggcttttaaaggatatttaaaataattaactaaaagaagaagaaaacatcgaaattgttaaacttgcatattcttatgcaaaaacatctctggaaatttcactgttatgaataaaatatcatcaattctaaacgctcaattataaagtaacctgtaatatctttgaaaatcaaccaatcaatcaatatacaaaaacctgcctgagttgccactgttttgaaagacatactgtgaagcgtagttcattctagcttttcttaaatactgctaggtcttaaaagttaattgaaacttactatgggtaaagaccacacagtaaaatgaaaaaatacacagtgaatgtacaccgggatcacacttcaataggatgccaaaggaaatacagagaattgaacatggtttttctgtgtttacttttctaatagttttaactctttgtgttccacgacaaaataaaggcggtgaagagaatacttttgactttggttcagcaaaatccaaaggatttttagaaacaaaatattttcattaggaacctttcttgatttataagcaaacaaaaggaaacttatcatcattagttgaagaagaggaagaggaaaaagaaaaaagaaaagaagaaagaaagaaagaaggaaagaaagaaagaagaaaagaaaagaaaaaggaagaaaggaaaggaaggaaaagaaattaagaaaaagagaggaaggtaggaagaaaggattggagggagggaaaagaaaggttatcagtaactaacaaagacttctaattttctatttaaatcaaaactgtaccttgaaaatatgttactcctttttccccttacaaaataaaaagccaaacctactttgtcacctaagagaataagttcatgaatgcacaaagtacctgctgtaaccaaaagtgaaatgtcttctgaatgcaaactgtcaacaagcctttggcagcaaattaccaagaattgagctaatcaaaaaatgatatgcacacctacaatatcaacacactataataataatcattacattcaaccaccaatttctactgtttgtcattaaaaaaaaaagaaagaaaaaaaaaaaggtgctagctaatctggtcttagaaatttccagtaggtgaaggcacactagttaaaaattaaaccatgccaaaggaaacactacaaatctgacatttcataaacaacgtgtcaaacagcaatccaacattagtagtggaataaaataaaaaaataattttgcttcaattagcagcttggctactggtgaacaaattacaaagatgtaatttcagctcagcagctaagcaggcccgttttcagaagtgaattaggaaagttgcgaaggaatgatatcagattcagtgtgctgttcagttacatcacagccctgaataaaaagagaatgtgtaccaaaagcagttagctttagaatgcatcttttatgtctcaaagagctaaaaccccttatattattcaaacaccataaaaaactaaatcactctaacaatcccatattgtatttctttttctagcacaaataaaagatatttcactcctatggtaactacatttacacctacattagtaaatacaattggctttgtcaacccaatggggtaataataataataataataataataaaagcatctaatttattaagcacttaatttgtaccagtcgctgttctaagttcttaacatgtatgaagttatttaattctcacaacggagcttcaaggtaggtgctaacattatttccattagtctgattccaaacattgatgtattttaattgctcactaaaaccagatcattcttgctcaacaactatgtagacaattcaccaatgtccaaacactccttcatcgctctcagcaatataagacagagagaacagactatctgtacagtcatatgagttcaataaatgcatctctactaatatgttcgtttttaatgctgttcaaacattcacatggaaacagctctagcgtaaatatccccgaacaaatggctgtatattatccaggagggagcagttggcccgccagactggggaagtactaggccatctggctccggcaatctctccaaaaccatcagctttgttttcacccccagactccaaacaacacattttccactgtgatgagtttacattttcccaaacacaggtcctgatcatgcataaaaattccaaacttcttcattcctctatgtgcaaggaaatttaaatcacctgcatttttgacatgttaccaaaggagagagaaagctgctgaaatatggcctctgactataaacttgctgtgtccttttttgtttgtttatttccccaaatatatgaaagaaactctctgctggcctagtgaattccttgggaacttattgatatactgaaaatgtgtttatctaccaatgaagaaccatgaactgaaagggttgttaatcaaatctatgtagccatggcaggatataatgaaacaatcaataggaaaaaaatacacttgcatcaataccttaaagtacggggaagatcaaaacaaatatatcaagaagtctagctgggaagagaaacctgatagcatttctgatgattgtaccttggaccccccactgtcctgggaaccttttcacggtctcctcactacatcatctactttcaaatccatacatacaaggattatgtgactacgatttcctgcttctcaagcaggcttttgtttaggggaagagtgttttgttttgataacttaatacaatttggtatcttttctttgaattataaaatatcactcttttaaagcaagatggtaagaggggagataagctaaacttaaaaaaaactatttaaagatatataactcactatagcaatcacagaatgtaatcatatttcaaatactacatgaaaatctgaaaggatgcccactaaacctcagacctcccccactggattcatttgagcttctgcagtagatattgtttctggatgcagcagccataaacttctgggtcctacagggcattctgcatgctcactaatggaataccaaaaacagtaatgacacgaaaacaaactatttttagtccagctaaacttggttttgaacaacccttcccaaaagcaagcctcttattttctagttggtgggtgaatttttaaaatattatatcctgtgtgctttacaatgaaggcatagggataagggatctcagattcttatatattcatttctaatgaagcttcatctttcctggtagagtccaaaaattaagagtcattacccaaaatagtctaatgagacactttgaaaaggtgtgaaatactgtgtcataccaacacatcttggttgattgagtacatttcttttctatctcaatgctgctaatcccacccaagatcaagaacagtttatggaaatgtagaatgcaaaaatagttttaaattttgcttgtccaaaattccttttgagttttaaccccactttctagtcaagaatatgacatcactcacataaagctgcatctctgataggaaaaatgttataataaacaggcagctaagaaaagacacttgaacagtggctaggtattccttccacaattgatgatgttatcagaacttatcagaccagaagtgtttcattctgtactctaaataattatcaaaatccataatgtatgaggaagaatttcacaggaaaaaaaaatgtaatcatttaatccatcagtttatatcaagacttacatctgatttaaggagccactgtatattaaactaaaatcaaagattcaagaaattttaaatcagacttggtatttaattatgatagaataatttcaagctagaggaaaattaactgttttactcattaaggctaaatatcaattatttttatgtcacacctagggaaagttaagcttcttcacgctcatctatctgctttttggaggccattgtattaaccctgtagacaagaagctaacctacttccaaaactcttgcagcacataatcaaagaacaagcaattggataatgagtaggaactgcctttcaaagtgaaagctacagagaggtggttaaacaattattatgaaagcacacaggtaagctttgaaatattccttttcctgatattttttagacttagataattattcaaccttttctcaggccactccccaccaaaatatatcattgcatgcatttataattttgacttttactgagatgtcatattatggcaaatgactttctcataagtgctattatcgaaaataaaactaatcttgttcttattcctctctctctctttctctctctcttcctccctctttcctgatagaatttatgacaccaagtggtcaaagaatgccttaagctgcagtttttcttaagctctatgaccttgttagtaaaatgatatttgatgtattgctttaaaaatatcaaaagatgattctcccccatttttatatgagtataaggtaagttcatcccataatgggaaaatcaattagtagtggcactttttgactagagagacttaaaataaaattttgaggaggtttaattcatagagcgattaatcacttcaaacatgtcttaattctgtgcttcttacaattgttcatttcatagtgctacctataatttaatatttcattggtcaatgttgcacaagcagacaggccttatgtactgatttgtgtatgtgtgccttttatcttttagaaagtaaatcctaataaatacacatagagtatgtcttagagttcctactttccccctctccctcccaacttttttttttttttttttcctgtaatgagaatggcaggaaaggatatccagggtatcaaaggcaatttttgaaaacaaaactccacttaagacatttttattttgacatcgcaaaagaaaaaaagttattaaaaatcaggcttttgtgtttctgccttggaaggcaaaaaaaaaaaaaaaaaaaaaaaaaaaaacacagtgtccaaatgaaagtgaattatcctatgcaattattaaatccattaaagaaaataaaaccaagaccaaaaattataaatggtgatttactctgagcaatcaactgagaaataaacagatttttaagaaagccaaatattttaggcaaataacatgaaatatatttcaatctttatttttattttaaaaaatagatttcatactcttgctttctacttgtgtcatatcgaaatatgaaagtgatcatcaaaaatagctgttaataaattggttcttgaagattagatttttaaaatgcccaacagcttattaatgtgacatttctaccacatatttaagccgtggtgtatctaaaaataatttttaaatatgcatatataccctaatttgaaactttctcagccaatatctatgaaagaaaatcatttctcttattttaaaggaaacattctaaaatcacaatcaagtaaataaattttaatcctcttgctaaattgctggttagtacacaatggataacttttttctttgttctaatttctttcccccacccaataaagctgtcttcttttttctgctactaactcctccaactacctaaccagctacttaattctgaaactaaactttttcttaaaattaagaagaaggggaaaaagctcctgtgcctcattaaaacgtcaggcctcttttctgactcggctcataattgtatcttttaaaccataactcaaccttaatgtatactgcttgacacccgcgtgttgggagcttaagaaaatgccgtctatgtacctttaagaccacaagctcactcatgctgcctggcttcctgccaaacttggaggcaaaagcaggagggtttttgcaaaatatcctctaacaattgtcgctccctctttcaacactaccttcaccatcattccctttgaaaacaaatctgcagaatggtcatctgcgctctcagcccatctcatcattcctggggaagccgcctctgccacccctcctccgccccctcagcccctcgcccctctgcttcccggggaggcctggcttgcttgggtttcaaaggttcagcccactccgcaccagggtccctgggcacctttgagcccttcggggctccctggccgggtcagaggaaattcagccctttttctcgccactcagcaccctgcagtcttaattcacaaggcccgagttcccttggagggacgcgcgcgcgtcgagccctcatccccacgcggcggtgcaagcgcatgaatggacactggaaggccgtgcaagtttggtctgagccgcccccgctggcttttagagttagagtcccagcccacctgcggtggagcaactagcttcttgactgccctgaattttgtgacatagagccccccgtggcccaaaatcaagaaacttacttgttttgtcatggagtcaatgaggcgcacgtagaaatcctgctccgtccttatccctagggttggaaatgggggaagggaggagaattaagtgagaggttacggagggtgggtggacaataattaacaacaacaaaaaataacaacaaaacccccacacacatatcacgaaaggggctccaaggctgattggaactcccactgtcctggaaaatacagccacgatctcccttccccagtgtccagagaggtgctgctggccttgccttagcgctcctggaagccagacgccaagttctgcagctgggactgggatgggggtaccccgacttgtctgttctcacggcaagagtccctctgctctcgcacacagccttcaaggccatgacccttcagcccctaagcccaaggggccatgggcctgcagcctgggccaagccaaaggaacaggcctcaggaaggggaggaagaatgaaagtggctcagggagggatgaggcactacacctggccccaggtaaacgcgagaccgataaggctcttgggccactaggagcctcctcaggtgaaacctcctggggcgaaatttaggagaggctggttcacctcaaataaagcggatgactgaccttcgctggaggatttcgtccacctggagctccctgcgccccctgcccagacccggagccccagggtgaggccatagacccgacccgggcctcaccattgctgtagagaagctgaagccggtagtgaattccgttattggtcttttcgctgttggcttcctgggttgcatcaggacgcaaagacacaagagatgcaggagagaggtctgcgtgagcgagtggaccaactttcgaggcaactttccccaagccgggacccccgctggcgagccaggcagccacggtagcagcagaaattgtggccaattgtgatccctcctccgccccctgttcctgactgctccctctctcccaaaagaaaattccgtcgggcgcacacaggctatcctctttccagggcctaggggctcgtgccccggccaccagaggcaggcggtgcgtaatctggtagtggagggcgggttcattccgggtgcccatggctgtggattgtagagccaggcttgcctctctctagctctgggggctccgtgcgaacttttctggagaaggagccagtggaccaggaccctgggttcgtctgggatgggaagtggcttgggggacccccacatagaagtgtgttatggatgctttgcactcaaggaagggcgcgctgcccaaggctcccgggcctgctcccgagccgagccggggacgaggggcgacagcgctgcgcccacttactttttccttctccacgaaccccacaaacgctgtcctctcgatctccacgggctggccctgtctgtcgtagagggccaggacgaagtggaagaagttggatttccgcagattggaaggcggctgcttctcaaagtgagcccgggccagacccaccccgctgcggccaaagacgcagagttagatggctaaaccggacgccgacccgcgccccttgtcaccctgtacacacactcgaaccctcaaacacccacctcctcttcccccaaaacatccagtgggcgctcttcacgccccttcaggcgacatagacccagctgacaacgggacacacatgtcccctcatgtcctcgtcctctccgccaaggacgggtgcgtcctcagaactcgctgaagaggtgtgaaagttttgtttgggttttgcgcgcgagatgaaactctataagcatttactcctacctgacacgcactgcgtggggaggaagaaaagtggcggtggatgaagtgaacccaccttcgcggagtagaacccacagttatattccggcacccctcgaatctcacgtctcagctagcagggcaggtgggaatggatggaaaacatgctcggcgtctcgccgcagcagccaccctccaggaacccctcaagctctggccaactgcgagtgcccggccttgggaagccacatccccccaccaccaaaaagcatgtggagaagggtccgagggcggggctcagaactgtcgcgggtggtcgctgtgaaaaagggaagaggggtgttttcttaaagacctgtcctaacaaagtttcgctgttccgcagaaatcctcacactcattccagaaatcctaaaggccagggctgctggctcagtgcgccggccggcgatgggaggctggagcgcctggggcgccaggcggccactgacagccggacctgcccaacacaagcgcgcacaggcacacacacacacatagaagaacacacacgagcgccccgcgcacacactttcacttccagcccagttacccaattcactctcactaccacccacccccatcctaatactcagtggggatgggaacagtgttggggacacttgtccccagcccagggaagctggagatgatgtaattagtcatcttccttcttccccttccgcactctgagtccgatagggcctggggccaccagatctcccactgtcccaagctcagctggtggcttaatggggggaaaaaggccatttctcacttgggaccaggagcctgggaaagagccttgggtgtgcccaggaaagttccctcaggtcaacctccaagggcaatgcctccaggccacacagtctagtgtctagggagctgcgagtgagagaagggctggaaggggccatggtgacaggggctggagaagacttttgggagatatcagaattaaagttgggagttgctattctaccggtagactaagaaaaaactgaaagacagagagggagggaaggagaacgagatagcagaaataagagaagactcaggggagaaatgggacgaaaaaacaggaaagccagagaggtaaggaaaggagaaagaggagaaaggagggaagctgaagaaagaagagaaagaaaatggagagaggaagggaggaaggaaaagagtgagggagaaattaagggaaggtgggggaaagaaatgagagaaggaaatgaaagaaagaagaaagaaaagaaggcaggaagagagacaggaaagaacgaagaacgaaagaaatggaaggagggaagaggggaagaaaggaagaggaaggagaagagaagaaaataaaggggggagaaaggaaagaaggaagaaagaaaaaagaaaggcaggaagaggaaagagaaagaaaaaggaaaaagaaaaggaggaaagaaaaaaagaaagaaaaagaaaaaagaaagaaaaaggaaggaaggaagagaaagaaagaaagaaaaaagaaaagagggaaaggaagagcgaagggaaagaagaaaagagagccggccggaaaagaaagagcaatcacataaaaacataaaacacagatctccaacatgctgtgttgagacgcctcttctgggttaaaacaaaatgaaaacagtcacagacgaggcaggggaaagtgctggcaaagcgtgggctcctcgcagacagctccaggtcctccggccgcaggcgacgaaggcagagcggctggagagcgcggagccccggcggagagcggagcgcagcggctgcggactcaccccgccgcccggccccgcggcagcagctgccgctgccgctgccgcctccgcctcccggctctcccgctcgcggctcacctcggccgcggtccccgcgcagtacccacctctgcgccgccgtgttggcgtccagcaccccggcgccctgcatccacgtccgcaccgcgttcatgccgctgcccagcggctcttccttcatgctgcttccactccgttggatgctttcctgaatcccaaacatgaaaacaaccttttcttgtggaaaatctcctcccccttgaaaaaaattaaaaaaaaaaaaaaaggaaagaaaagaaagaaaagaaaagaaacaaaaacgccaaccagagatttttttttttctcagacgatgaactcgcacttagaagatcaaggcgggctggaaagcaaatttttaaaaaatgtaaacctctgctcaaaactgagcgataacccgaaaaaaagaagaaagggaaaatccaacgaaaagaccaaaataataaaattagagatgtatgcttggctgttgggggttgtttggttggttgatttttggtttgggtgctttttttttttttttgcttttttttttttttttttgtaatgatcacaggccggtggaggacaggaggggctggagtttccttttgtagaggtacccttcacttgaagaagcaggaagaaaaaaaaaaaaaaaaaaaaaaaaaaaaaaaaaaaaccctgatggcaatttaagaaacaatagactcaactcgcgctgccggctttgctacttcaagtgtcattttccacaaccaggcaagttttttcctctctctctctttttttttcctccttctctcccaaccaaagatgtttctttcctttgcgtgtagatgaggaggacgctggttgccgtagacagatacaccagagagggtggggggaaggggagagagggagagaggaaagggggggagggaaagagagatagagaggagagggagaaagagagaggggtggaccctgctggatggagattctgttttctccttgctaaaatagaagtgatttgcaggctttccctatggaatccagtttgactttccccagagctaaacacaggcacactaaccccaaagggaggaggcggggcccgcgcatcgaggccccgccccttcatttgcataacgtcatctttccgcccaccgcagccaatcgcggcccgggagccggctcgctggcggcgccaggccacgctctctcattaacatcccgctcccggtggcgcaggggagccggccaaagttcctcgcaaagtggcgagcgaaggagcgctgagcactgacgtctgggctggggaggagcgggtccgagcgaggacggagaggggacagagggaaagggaggcgggtgtcttcctcaggaatttgagctggggatctgcatcctggccattgcagtcctttagcatcctcgccgcgccctgagcgcgctggaggctcgcaggctgcgccctcccagggctgatgccgcgtcctgctccgccgttctgggacgtcggggacaaaagtggaggagacgggagagcccgggcagaaaaagcaggacgcgcgtcccaggtgcccacctcttcgctttgaggcgggggcggtgggatggaatatgggtgcgcgaggtcggggctggtaactctcggaggggcacggcctccacgctgggagggatgaatggacgctgggccccggcaaatgaggcgctgtgggtccccaggaagtggggtaccaggctctactcccaccccggcctctgaaacgcttctctctcggccgctagcctagaggctgccagggttgggcactgttctcactcacacgctcacctctctcgggcagtcctcgagatatgtgaatggtggaatgaatgctctcactggggctgtgtcaggatgcgtttttaaattttctcaaattaaatgccaacccctcattccccaccccaagtagttggttcgtttgtttttagagtaactaccaaagcaacagcaatgttaaccgtccttga

SEQ ID NO: 176 - DNA, 206394 bp, Homo sapiens
  source 1..206394: mol_type = genomic DNA
gagtgagagaatccacatgggataagttccagggctgagcaacctctccaacaggcgaccagccagaggttgcttcctcctcatttccttcccattttgagttttctctgttaaacatccagccacattacattatagacacacttcataatttttttgattagttgactgacaagagagtccctaaggagtggattctgccagtgatgccattttctgtcgtttgtaacaaatcagtggcctctcccacatgacaaggcagggccacctctgggagtccgaactgagtctgctggttcactcatccaacaagcatgttgagaacctcggtcacttatggggttgagaccgatatggtccctgtccttatgagctttctgtctaaagtggagggagacagccagcaggaaacaaacaaatgaatgcaaagtgtgaaaagggcacaaacagagtttaattacggagaataagaaggggaatctgcatcttaggtggtcaccagaggcctccctcagtaggtgatatttaaactgcggcctgaaggatgagaaggcaacagctatgcacagatcaaaggggagaatatcctactaggcagagagctagttttcattgagaaaagcaaaaacacagtgactttttcagtgtttagaagcaggattgcatccacttatgtgaggagggcaatgcgtgtggtttgaagatatctgtaccctcctagagagaaatgaaataatccaattttaattacacttgtgaatactctggttgaaaaatcacatgtaggatcccgttctcctaagtgtgctttgtgaatttccctttgcatgtctttatgttatccttcccatctggactgctcgctactaacctcctctactgcaaaattcctgctgctctttggagccctggtccagccctgcctccctcaaaggaaccctctctgacagctccaatcctctgtctgggtgtcttctccgagcttctgcaccctctctatcttcctgagtgagctatcgtctgcgtattattttcttccatgagtacacgtctcactcctttcctacgatttaaggagagacatcaagtctttgtgttctagcctgcgattcttcacccagtgtctgacggctcaagatgtaacatttgctcaacaagcaatttcaaatcaggggagactgcccacctacctcaggaatactatatagccaaaatccaacagagcaaacaggattctttcagttttgaggggtttttttatgaatgaatttgaacagatggatatatagatgaatatatacagaaaaatgaacaaaagtcatgctctcctttaagggagtaacttagtacacattccatgtaaacaaaatctatagtaagatttcctcaaatagaactcagggaccagcagttatgagaaaattgccaacattaagaacaaattccaaactaccactccaaaaaaataaaaaataaaaagcaaaggtccactcatttttacagtacaaaaattttatttttttgttaggataatttaaagtttaaaactgaagtagacatattcattttacaaacaagatattctttaagtaagaccattaaaaacagtaaacaaaaaagctgtctttacaaaaagctctgtgcatagcaactttatactgtatataactgacaaagcaaaacaataaaatgaaactatacagtgtgaaaatgaaaccttactgtacaaaaggtagagaagttaatggtttttaaaccatgcatattgaaatgtgcaaagaaaaactgagaagaattacaacgctataacaaaagaaagataaataatgaagtaaattgtccctttaaatgaaaaaaatcttacacagctcctcttacaaacacaggatagagtttgtagttaccaatagaaatactcatattccaagtggcacaaaaataacttgggactggaatgattgaatagcaatgactaacgaggacagggtagctttgtttttaatttattagtacactaaaaataatccttacacacatttgtacaattaaatagctctgttgctgccagggttctagctgaatggtcaagatgtctggtatttagttacacgcatttttcggtgtaaagctaccaagaaattctacaatcattttgaagacagtactgcactcatcttcatgcaaaaggaaaattcacaggttctaaaagcaatgctacttaaaaaaaacaaaatttccttatgttggattggctcaaatccagggctaaacatgcttaattttgctctgccttcacttttggaaggtaacattcatattccacacattcttccccttccatcaatcaggtttctcactgggggactttttctcttatgtttccgtgtattttggcgctttaagccctgactatgagggactgtcagcagtagttataagcatgccaggtttctaaaaccttggattctcatgtgcatagaaataatataagtcatactgggtaattccagaatgggttaaaggcaaataagacagttggggctggatagatgtgggcctgcatcaatgggtcaaagagaaggtatgcagaattaatgaaatcatctaaaattggctcagatgcactcatgatgtttttccatgagtgctgcatctatttctaatgctgaaatcccaaccaagaaccccaaactaagtctgtgtatagactctattgtggtgctcatgagtcaataaggagaaccccaacgtggaaacaagtgacatctttattggcaatcccaatatgcctggatatgtctctaggattacataagctttcaagaatcaaccactgttagcagctaaggcaaggttcttcccctctaagagctagtcacaaaacgatgaagagcccatcaaagggctgggtaactgtgctgcatagaacgcagatgcccctaatctctggatctcccaagaatctggtcttgcctttcttcgaacatcagaagaggggattagggcttttaatatccctctcccacattccgtctcattcttgactagaaactgtcgagtggcatagctatgtttttcaagagagtttaatgccataaaaggggaaattgacagggagaggaaaggacttggatgttctaagactgactctaaagagtccatcaaacagagttatcttctccaaaccgtgttgctgaagttctatggggctgtgtacctctgtactgaaccaggcacccaaagcggagggagtggtggggttctggtgaggaggaattcccaaggggtcccttggttaagaaagtctgtggttttggctctgctagaaggtgaggtgcttctttccttgggatgctgaaagcctgagacagactcaaacatgggaattctctggactgctcaggggagaacgttgaaagctaataataggaattttaaaaagtattcacaagagtgtggactatttagaaatcagacggagctgggaatgaattgatgggttggagtatttgtgcatgtgctagagtgtctgtttctgcattagggtgttctgtgggaatctacatgttcttgcccttgggtcaataaagtgatggaaaaggagggggtgcaggacaggggataagaatctagtaagtaactgcagtaataatcacacacctttaaaacttgttactacatgtttgcatcattttcattttacatcaggaagagaaatccctctctcttccaaaaaaaggtcttaatttctacctctacttacaataagttacacatttatttatttaaataattgtaaaacattttaaaatttttccctttttttgttcattttttaaagagattaagctataagcaaacacacatacaacatttcatcattcaattcaggttgcgttttaagaaagtcttccgtgctggtaccctgttttgttcaatttttttctgcataaactaaattggtatctgaaaggcttcatagaaaatagaaactttcaacttttttttcctacaaagaaaaacaaatagtatccaaaatattaagcattaattgtttgccaattttttcttaaatattttacaaacataggaaggtggttttcataatgttcataacaaagaattgcatttctgctcttagcactgactacgtcaatgacatcttttgtccttgtcccaagagggtcagtttgtgtagccaccatcagagctataggaggacgtgggaccaagtaagatgctggctccttgcagacccaagggtgtccatcatgttcatgtgggggcaccactacacccccaaaagagctcctagtgctttcttcattattggtccatcagagtaagtagttttgtgctataagaaagcagttcttctttacatcgggggtacaacaagtccggtcatggctgcaaggaaagagtggcacaggaatgagacttggggactttttatgttcaaggctatgacacagaatgaggggcaggggatgggaatgatagagtctgatgctattcaaggagatggtgccctcagctgatatgaggacctgttctccaggtttggtctagcagacagcccattaaaggcactgaagccttatggaatcactgaagtacaaggaaaccttgatgaagttttgcctgggaggccaggagttatgttttgttttatatgggttgtataaatgagacaacagatgtaaacatgtaaactaaactgtaatatatgcatatttttttattcaactaagataatttccagattatactgctccaaatcacttagttggaacaggaaaggaaattccaggtgctgagcctgttgatttactagggcatcgttgataacaaatcaagctttttatctatccttcacttctttggtgagtgcattttttttttaattagctcatcttcctttggtgctcactgttcatgtctgatgctcattgcaaatgaacactgatcactggaatagaagacttcatttagtccctcagttcccactcttctttgttgaggtggaatcttgttctgtcacccaggctggagtgcagtggggccatctcagctcactgcaacctcctgggttcaagtgattctcctgcctcagcctctgcctcctgagtagctgggactacaggtgcatgccaccatgcctggtgaatttttgtattgaatggggtttcgccatgttggccaggctggtcttgaactcctggcctcaggtgatccacccacctcagcctcccaaaatgttgggattacaggcatgagccactgtactcagcctccaattcctactcttcatcaccctatatgaatggagtaatctaattctttctcccttcatcgggtcaaaaggattcggacaatgcctgtctgggcagaatcacttcccagggtttccctagatgtggcaaataaagcagcaccagcacaatgtggaaaaatcccacagcaaaatgtattcctcctgccttggctttcagaggataagcccgtgggattttcacattcttagaaaatggcagaatagtttccatgcatcagaacctttaaaatcatatctagaatttgatcctttgcattttactatctacaatgcatctaaggaattattcaatataatagaagcattttgctgagtgttgcttactaagcttccaagcaaatggctgaaattctctctgcttttctcaacccttccatctctctctcctctcttactctctctgccccttttttccacatcagctagtcctctcgggtaaaattgtcagctgtctatttccctgcccatatagcctttattgaatgtttgtgagatctggattaaggtcttacacagctagcaaagccttaattatttttgcctgtattactatatattgaatcaatgtaacttttcaataaaggcggttcaattctggacactccctgatgacttagagatatagcaaccctagtaattatcccagagtgtaggaggtttttttattttattttttttttcctggagggagctggaaaatgaatcagacacatagtgtgtaatattatctcaacaatctatactcatcaactggaagcagctgataaatgaggtagaaggtggaaccatgctgtatgtggagctctctggcagtggaattctgactcacaaactcctggctgggcacggtggctaacacctgtaatcccagctgtttaggaggctgaggtgggaggatcgcttgagcccaggagttcaagaccagcctgagcaacatgatgaaaacccatctctacaaaaaatacaaaacagcccagcatggtggtacatgcctatagtcttagctactcaggaagctgaggtaagagaatctcttattgagcccaggaggtcaaggctgcagtgagccatgattgcaccactatactacaacctgtgtgacagagtgagaccctgtctcaaaaagaaaaatcttcagtcccttcctttttctgggtgctcagagagataccaaaggggctcatgtaacagcagaggtgctcaaagatcaagatcccctgaatgacagaaaagaacagatttgagatatatcccttcctcctagtcctacatccagactgggtaggcctgatctctgctaggtggaaactgactttttgcttgtagaaaccataggcaacagacagaaagtaataatctccctttgaaccaggtggaaagtaggtatgggggtagggggtatagggtaaagagaagaatttcactctcattgtccctgaagacacagtgggctgccagagcacaagctctggaatctgcatgtctgggttcaagtcatcagacttttcctgtgtggccttgggtaaactgcttaactaagaatggtgataatggcatgacttggagataattctcttaaggcactcagttcggcaccttgcctatagtgctcaggatagttagcaagcctcaaagagtgtgggcagcatatgcctttgcagacaatgaagtctagagaagggcccctccccagcctgcgatcacccaggcactcagcccacattgtcaccctcccactgtgtatctctaaaaagatggagctccctgtccagctggtgtctgagatcccaggattttttgtttgtttgttttgttcagtgactgtgcattaaatgtcagcttggtttcctctctctctgtactcaagggaacttcacaatgttggacactgagcttccatgcacctggtctaaaacgaggaagagcataaggtaaggtcactgagggcatcctttgtcaaccctcgcctcctcccagccaggctgtaggaaatatctgttaccttgcctagttcttcacacaaattagtcaacaaccacctttggggatagctgtcgattttctatttaacagactaggaaactgaggctctgagataatggcatgcacagattgacaaggcccggaaagagctgaactagaactcagcacaggactggtgacatcatggccagcactcttccagtggctaatactctttaaggatttctccacacgtcacttgatattttcatagattttttgcaatttctttttaggctactgccctaaatcgacaggtagttctatttttttcctccccgacctactccaaacattttatcttttagagagactacatatggggtacagtggatactgctaaggtaactcgtgcgccgaaatctcaaatcaccactagagaacttatccatgtaatcaaaaaccacctgtacccccaaaattaatgaaattttcttttaaaaaaaaacctataaaaacttttatcttttagagatgaggtcttgctatgttgcacaggctaggctcaagtgatcctcctgcctcagcctcccaagtatctgggactataggtgtgtgccaccacgcctggccccttcttcttttaaaggttcaaatcaccagaggaatgtggagggaactgaaggattcaaatgaggtttgggaccttacagtgactctagaaatgaagctagagcctagagcctgtgcctacatgcaactcaccaagtcattgctcctataaacctatcaggaatgtgctgctcagcccgagcatcctgaggggtggtgaccagaattttgtgtggctggggaccctggagagggtcttctgtttctgctgcagctgccctcacagggaaccttactaagaccaagcaaggtttccttccagctctttgggctggctcaaacctgacttcagtaacagcacgggagtcttgggcatgcagcaggaagtggggtggggatgacaggccctgggagtctgtaagaaacttgtcctggccccattgtaggctcagagccaggtaaaatagagaagatctgagacaaccagctccactttcccgtgagagaggaggtggggaaggggtgatcagtggaagtcaagtatccttttttcctttaagtaacatatgtgctaagtggccaggaatgaggaaagggctgcatccatcctgtctgcctcccgtccaatgcagaggaaagcctgcacccctccttggtctgtctcaatctgcattttgccagtaagacttgctgggcctccactcgggttaaggtcgatgaataaaaccagagaacttaaaaagaggaaacatcaacactgaagaggtcatggggaagaggaaggaaagtacggtaaatattcagcaatcgttttcatttccctgtctcatggaaaaagctctgggcacattccctaaggatgggatggaaaccactggtctttgatgaaagatgggcaagtggagacacttagctacaggctcagcctatttctctaggaattagacatctgggtgaaaatccctgccaaaaaatccatgaagtttccagatgtttccaactacccatacattgggtggtatatagaccccgctgctttctctagtgagaagtaaaataattttcaacaatgtttctgagtactgggttttccattctggttttgacagtttctctgtagagtcacttgacttccagaagacaccatcatctccagtgttgggatggctcaggaacctaacgtacctcccagagctctgctcagccacaagaggagactgacctctcacacgtgtcccaaaagaattaagaacccacactctatcatcaaaccaccaggcagatgccatccccaggacaatgcagcccatccaaggttccccatcaagcactgctgaccttacagcctttgatccatgagggttaatgaaacctcttccctttttagttttacccaaccctgcttgttgtaaatattttcttgtcaagaacatgagaggagcagcctaaaaataatgtgggttgccagtgagccccagtcctcagcagtttccaatgtgctcttttgctgtctgctgccctccatccacaatgagatgatttttcatatactcatcacatttgtgttatgtcatgccatattatattttagaacattgctcaaaaatgggtttgatggataacttttgttcttagaaactatgacttttctattctccacaaccccctaatcaggcacctgctatcaatttgacttgcatgtaaccagaattctcagaacttgttggttgctcctgctggctcctgtccatgtatgccaagaggacatgatggcaagcggattaggtaagcagaaagcaccatgtggtatcccctggggtgactgggcattttctgagagatagcagaatggccttgtggacagcatagggctgggaagtccagacactcctcagttgtattaaccatggttaattccattacctgcagagtttgctgatgtctgttttccctgatcttactttttaaaaaaatttgattattttttgagatggagttttgctcttgttgcccaggctggagtgcaatggcgcgatctcagcttactgcaacctctgcctcctaggttcaagcgattcttctccctcagcctctcgagtagctaggattacaggcacccacaaacacacccagctaatttttgtattttaagtagacacagggttttaccatgttggccaggctggtctcaaactcctgacctccaagtgatccacctgccttggcctcccgaagtgctgggattacaggcatgagccaccatgcctggccccatcttgcttttagatggagcacttgcctagctgtagaagccattcatgtcccatgataagaacagcaaagcatctctttgcaggtaaatggctggagctatacaatgatgtgctgtttgctcttactttgccaaccctatggtacattgtgtatccccaaaatagaacccttgcttacctctgaatccatttccattgccgctggagcaggcaggtgaaggggagccttggggcctgatgacaggggcaaaggcactcttctgtttgacagcaggaaaaactgaagaggaaaatgggaggatggaggatgtgctggaagacccaacggtgggacttgatgacatgactggaaagcaaatgcacaatcctcatttagaaattaagatcttccttcagttcacacatttggcacacatttattgagaaattgttaatttccatgcattgttccagattgcagggattaaaaaaaaaaagttgaatgtgacaacattcccaccatgtccagtgggaggaacagacacataaaacaactaatatggtaatgacgctattagaggaaggtacccaatgcccaagagatgcagacagcaaagggcacttgtgcttgggagagtcaggaaggcagcttcaggaagtgatgttagcacaggtcttcattcacaagcagaagcttggcaagagagaagactgagatcaaacatgcctgaaaaatcatcaaatctacccagcaatggaaatcgctttcacaccctacaaaaaaagtcctatttgggagctatgtgcctcccccataactcctaaggctccaggggtttggtctgtagggttaacatcttctctgagagtgccatctctatgggccacttcctcattaaatgtaaaagtgtattaacattcagaaaaccgtcttcctctcccgtaatttcaagtgctcttgggaaatatagctgcaagtcggcctcccctgacataatgtttagaaaaaacaccaatattagtgatattaacattaaaatgacttaagggaagacaaaagccaagcattataatttccaagaaaaaataaaagcaatttacataatgaagtaccccacctcttaatgtcagatactccaccaagttatatcatgcaagatgataattttatcttctatgttcaacttaagaaaggagtaaactagagtacacaagggcaaaactcttaaatatagcaccttatagtatagttttaggcacttgtgttagcataattcccagaattctgaactgtccaagtcacatgacttgacaaaagtgttgttggagcctaatgaccaagcccagcagtgctatttcttgctttgtattttcaatggaccacctgtccttcaaagtaaattcgaaagtgaggacaagggcgacacttatgactgaccaaccaagtacaaggtgaactgaaggtcaaatgttctgatgtccatggacaactccaccctcatttcccctccttccctataaaaatatattttgggccacgtccacccaattgcctgtataaagcacttatatagcatacttcccatatgatgtcttttatagccaaactaaaatccaaagacttcaaaagaagagctttctctaaaaacatcttatccttaaagtagtcttgatttaaggagctatgcatctgagtacatctgtctttcctcatatatggataaaaagaaaaaaattggaaaggagaacaaagttctggaagaatctcatgtaatacttgaatatgtaaatgaataaaaacactgttgggctaattcacataataaggacacagggttaagcatgaggagtgggtcttattcatggttctgagcaaaatctcttctagccttgggtttggcattagtgaaatagaaaaaatccaaaagcaaaaaatccccaacttttcattttctctacggtacagaattagaagccaaagaaaagctgggacttaggaggccctgattctaccatggtcccccaaatggcgccttggtttccctgtctacaacagcagaacctcctctcagacatcatcattgaagaggtttttacaatgtgaatgaggcattcacacacactccattccatttatattcagcaaatgactcactagtacagataattattttctaataacagatttcaacggaaagcagggcccattagatcaaaaatggttcccttgcagtgggagaggaaacacctcaagctttactaagtgacgtgaaggaattgttgcagagttgagcaagtacatgcccgttttaaatatttcttacaacaattttgtaaaaatgccaaaatgcattcaactgaatttaaaattcgatgcaactataataaaaatgctgaaaggaattttaatttgtgcatttcggcaaacacaattactatgtttatctgtttcataaaacaacaccgtaagagacaggaagttttgtttaaaaactttttttaagtagtaagaaggcacttatcttcatcagtgaaatcagcattgtgctagcacagaaataggcagacaaatctttagagcaaaatagagttcagaaacagacctgggtatagatgggaattaatacttaataaaggtgacatttcatattagtaggaaaataaatgcatggaaaaatacactaaccatttgaagactaagtttagagtactttctcctgctaaacaccaaaataaatctaagtagattaaagacatttttaaaagcaaaattgtaaaagtgctagtagagctgttaggatggttagaggttcacaagatagatttgccacataatgaaaaacttctgcaacaaacacaaaaaggcaaatgacagattaagaaaaatatttgtaatacttatttagatatgttcatatcctcaatagctcataagttaattggaaaaagaaaaacgccccaagagaaaaataagcaaaggacacaaaaaaagaaaatcaggaataaaaatgaccaagagagatccatatagaaacactcaaactgattcataataaaatgctaattaaaacggtaaaaagatcttattttccactcactaaatagaaaaacttaacagggcggggaaacatataataatctttcttttctaagggaagaattaacctctctggagggtctttggcaatatatataaaagtattttaaaatgtgtacatcccttgacccactaattcaatctctagaaattaatcccaaggaggtagtcacgactgtgccaaaaataataggttcaagggcatttttataataatgaaaaattggaaaataacttaagtgtcccacagtagggtacattatatttagcctatacaatagaaggctatgccaatattaaaactaacgttgtagaataatcacatggaaatatacacctcttcagatgaaaaaaaaacagattacataacacatactaagccccctttaatttttaaaaatacaaatagcaaaactctagaaggatgtgatatatgcccaaaattttagcaatggtatctctggctgatgggattatgaatacccttaaatgtattgctttcacttgtccgtatcttcaaagttttctacaacaaacttgtattacttttaatacatggtaggagaaaccagtaaaggctattacattttaaaaatggaaaatctcgatttctttgggaagaaataatacaatccttagcaatagacataatagtgtttaaaaataattttaactttcctctttcatttaaggctgtactacttataaacaaagttgtctattactctaataccaacccccacctccaaaaaaaaaaaaaaagcaagagatgaataaatcctcacattcctgggaaacacttggtgattgtagtcaacttttgaaagcaaacaccactcctcatatctctgttccccattcttatgacctgggtctgcatcactgaaggattttatgcagcccagcttcatatctgtgactttggtaattttactgctttccttccaccctctctttcattgatcttatggcagaatctcattagttgtgcatcagagcagacactgcaattttcaaaatgtatctatccatgactgaaaggctatcctttaaaaattaacaatggttacctctgcacagacacagagtgtgccatttttctttcctcctttttacctatacgtgcttttcaagttgtctgtaatgagaatactactattttaataggctttttttttcttttctgaagaagtagaaatatatcagaattcaaagaggttattcttatggtgggagtacgctttcttttaaaaattatttttatacattctacattttctgtaataataatttaatattttacaatagagaatgtcttagtatttatttttgaaactataaaacaattgaaccccagagcatggtctaaggctctgaacatgatgtaggaatctatgaggacaagttggcttcctgcctgtatggattctgtcccaaactctgcgtaggcttggtggctattctgctttggaagaagtggtccctatgggtgttacaggcttgttaaatagacaatcttttgggactgcagagagaaccattttaggaaagttgattgcatgtacttccaatcaagaatttctctggacatctatctctctatggatagaggccaaagtaaagaaaagtacgtctggcccagaaatctctgtgaacatggggagttaaggaaaaaccacttttctttgtaggaggattgattggcttgcatagtctcagctggaactcaccgggcacatatcctcctttgcatcaagccagtgcattttttggagctaaggggtctgtcagcatttcattataatcccctattgtcaggggtttagaattcagccataaaaacttgcactgagctggaacttggcacactgctactgccaggaagtgaagtttgtatgtaaaattgaaaaaacatctgtttggccatttttgaagtagtgcgagagcaaaaacagtaaagatgcgggtttctgatactctacgttggctgtcatgcaagtcaaacttgactaagaagcttggctctttcttacttagtgtctctggcaagtatttgctccgtggcatggtccagccacatcagatgcattttaaaaaaaatcatagaattgtgttttcagacacaagcaactgaattgacaaaatgttttcccccgggcttttctttttttgtatttcccagagaagtaaagacttggctggctagaaatacaggtcaggtgctattgtaatgaactccactgggtattcagtatttttggagtaagtgaatttgattgtaatgaatgcactgtttggaatttcattcctaggctgcaactcgttcagaccctccctccaaaagtgaaggtgcaaaccaccacaccagattcaataggtacagggaggaggttttctcccgtctctctttctgtctcccagttgggcaggttgccttcctctttttcctattctgtgtctaccatctcattttaatgggtaatttgaagatttggggtgttattagttttcttgtggcagtgggtttgggtgatcatgaaagaacagtagaaggaagtcgtcactggtgggagtgggaaggatttctctctaccaaatgaattatttaggaagaaatattaagaaattcacacctaactgtgcattttcattcatctttttttcctctcctttcttctccatcctcttcactaccacactacatactgtattataaaattgatcatttttatgtacaaaaacaactattatgattcaacttcattcatacctacatagattatgattgaatgatatgaaattgccacttttgtagatcaaaatggtcaaatagagggaatttcctatggtttagcctaatattacactataaatacattaaatattccttaataatttaaaaacgtggtattctgagtgtgatgatgtgttctagtcccttttttactatttattggctatgaactcttaagtcattcaataactcttcatctcttacaacggataatgataaaaatgattgtatccatgtcacaaggttgttgtgaggctctgactggactctagatgtcaacatgctttgtaagctgtaaagtggaatgtaattgttaattcatcttattgttgtcactgttatatcattgtttacacaatggatctcttgccactgcatcatgtttaggggttgttaaagatgtggtctctttaccacaccagacaccacctccaggaggaagcatgggaaagacctctccaacatctcagtaacagaaatagccacctttcttctgagctactttaaaaaataatgtgtggacataaaatcttataacaaatagtgtttctctctttgctttagcctcttgtaaactcagagcaaagtaaatgactcccttgaatagaccaaatgatattcatgctggccctggcattttctaatttcctgaaccatatttgtttcttttagctcagtttcttgttagactctgttttatattttcatactatctatttgactgcaataattcccccaaacactttttggaacaagaatttccaaaaatttgggggaatttgtttctacctactatggggtagaaacaaatcaagcaatcatttatttctctagactgttatctaattaacttaggccacctgacaagacacaacatagaactcttgtctttgcagtaagaagattttcattgcactagaagaactgacctctactacccttcgctgcttggtgctatatctttatctcaccgtgtagtgtagagtgtatgcattgaactgataatccagaaatagctcataggtgtgtctccccagggaaccaaaagtccaaagactgtgaaaggcagcttctgtgacatgtcaattctgaagctatggtggacgtggctgcatgctgcccttgacatgtccttgctcttggcacaagggaaccacactgggtaaaaagagggcaaggtgcagagaattgcaacaagacccagcatttcgagaacactctactcaatcacttcagcctctccatgtcagcttgtcccctggcctaaaatattccctaggtaggtttgaaaaatgcactctctcaggctcctgggagcattgtgtaacttcccggcatacctcccaaagcaacccaaatggggttttcacaacttcccagagcagggactttgctgctagaccacagattaagatgaagaggttctgtctcaatatatcacatgattgcacacagtcaacttccacctctctggaggtactgaaaggaggggaaaaccaggttgcaaagtcaaaaagcagcatggtgtgatacacaaaataactcaaagtcatcaggactgtgcctaaattattaccctgctctattctagctatgtgatcttgattaagtcagaaaactgcagcaaagccaaacttccttgtctataacatgaagaaaaagttcttatcgaaaagttcttatggagattaaataaaatattacatctgaaagtgcctaagagcacacatattgttaacagaaatggaatcttaattccttgcttccacttacacaggccacacatgctctttctctataaaaacggaattgtttcaatccttttctttccccaaaaggccttgagtaaccacgtgagccaaagtccagctaagggaaaagaacgaaaggcaggaaggatgcttaatcaggaaactaggctgctccccgacaacttaggaagatttacaaatgcaactttctcccaaaaggcccaatagtaaaacccagagacaaaaaagcatggagagccaagtgatggagaggtcacttacttccataaggagagccggtgggtgagccatttagaaatcctggtgaacctggaacacccaagttggccatggggacattgctgtagccattcatactgttgctggaggtactgtaattagactgttgaggcgtggagctggaagagtatccccgcggagagatgctgcttgtgttgcggatgtacccttggcaacaaagaaaaagcccaggtaaatcaacaggcgtgcacagtcaggccacatgtggctagcacaggtcctcattggccccagactgcagaatgtcaccagctgccccgggcagttgtaggaagtgtgcagtccatctttagcttttttttttttttttttttttttttgagatagagtcttactctgtcgctcaggctggagtacagtggcacgatcttggctcactgcaacctctgctgcccgggttcacgtgattcttctgcctcagcctcctgagtagctgggattacaggcaccctgccattgcgcccggctaatttttgtacttttagtggagacgggaattcaccatgttggccaagctgctcttgaactcctgaccccatgatccaccagcctcagcctctcaaagtgctgggattacaggtgtgagccagtgcgcccagcccatcttcagccttttatacctttctctctcttccccatctatgtaaggccatgcccttgatactccattcaaacctgcactcagcacctccagcttacaccaaggagcgaatggctaatagcagtgtggagttccctctcccaaatcatatttcatatgacactggagtccagtgagatatgattggtgtcactgagaaaacattctgtggtcaagttaggctgggcagatgttatgcactgtagccatttcttgattcatatacagaaggcctagagaataaataaactggtttaactttgctagcctagtgtttgccaaatttaacatgccatagcatcttttggcggggcctggaggggaacggtatcttcacctctctggggccacttgtattctatggaacacagttttagaaacgtcagttccaagttgttgccacaccctaggtgcaagtggggatcaatttcattcaaaaagtgtggatgagttcccctaaaatgtgctattctctgacctaggactttggggcatcagcagtgagcatgggggacccagtctatgcctgggacgggggaaggagtgagaaaccacagctcagaaacatcgtatcatatgtcctggaataaaacactttggattactgtctctaaaactatataggaaacaacccaaatttgtcaccaaatgaaaaagaatttgatatttgttctatgggcctcatgtctacagaaacaaaaataataatatgtcctgtctagtctttttttttttttgagacaagatctcactctgttgccctggctggagtacagtggcacagtcatggctcactgcagcttcaacctcctggactcaatctatcctcccacctcaacctcccaaatagcagggactacagatgagcactaccacacctggctaatttttgtattttttgtagacacagggtttcaccatgctgcccaggctggtctcaaactcctgagctcaagcaatctgcccacctcagcctcctgaagtgctgggattacaagcgtgagccaccacacccggctcacctactcttttgtaagaactctccctgggcaaaaaaaaaatgaggaattctcttccaacaaataaaattagaaaaaactatcccattgttaaggacctcattaggaacatttactccttttaaaaatgattcgtgacagatttcgacttagcacttcaataatcaatctcaatgcaaatgtctttacacggtctgcttcacatgtaaaagcacagttgtctttatatttgtttgttgttatatatatgaaataatacaaaatagaagttaccaaataaaaccaagccattcactcttggctaccaggaagagaaatttgggtatcataaatgataatggcaataatcagtttctttccagtattcaatctgataatcacaataacagaagcataaatttcttttaaattaatacctgtaaacctattttctataagcccaaacccttctaaattgataatacccaatccttttttttttttttttgagacaggttctcgctctgttgcccaggctggagtgcactgtcacactgcacaggcagcctcggctcatttgcagtgtgccagcgcaccccactgctcactgcagcctcgacttcccaggctcatgtgatcctcccacctcagcctcccaagtagttgggactacatctgcccaccacacctggctatttttttatagagatgggttttcaccatgttgcccaggctggtctcaaactccagggctcaagcaatctacctgcctcagcctcccaaagtgcagggattacaggtgtgagccaccaaacctggtagtaatactcaatcttccccttaaatatttccagacattctacctggtacctaagaagctcaaactctaataaagtaccatctataatcttgaaataacccaatctatgattgtattgcctatctgtggacacactctgttggaccattatgacccaacctctgactctgtccactccagcagaactttttaaattagacatatttggattttgactctaagaaaggtggtaccttgattatttccttgtgttgactctgagatgctgaccccaagctggctgccataggagttgattcccatcatgccactgtgcgctggggagctagagagggctggaagctggctgggattcctggggacgctgtagagagcttcagcaatgtctgcggctcgcttcaaaatgatgtcctacaaaacaacaggttaatgtgagcattctatccagcataaagtgcaaaactcaataaaggataggatgtcagtatctcacctggttattgtgtggtgtgccataaagagcttccactagatctgcagctcttttcaacagcatctcctggaaaataagcgaggatgggatattgtcaaaggcaaaatccaagatggcaaacaaaagaaaattataggcaaaaatgagaaatccacacatccctcccaaaatgtaagtaattagccaagaggtcctatatttggtttgacaggtagaatacaattgtacatgtacatctctctgtaaatacgtatctatctgaaattcacctctataaaatggctctataaatgattgtgttaccaaaacaaaaaacaacccaattgagagtatagtttattaaaattattaaggtcatggaagttctattaaatgctactttcagcccattctgttttaaaaatctggttctctaattaaccaaatattcttaaaatgattgatggatttgagtttagctgcttgccaaggagttgtccagagtactgaaattatcttggcaacgtctgctgcaaaattttattctaataaagatgaattctttcaataatatttccccctgtacactttaaccacagagaattagtaatcacgaatccctttcctctcattttgccttttccacctcctgttttacacagccttttaaattgctattaacctactttccagatatcatctaatttaatggtggggctagggatttttccaggaggaaaataaaggtgtgatgtagaagcaactctggtgcataaattttattcacagtatgcaaaagagaatatggcattttataatttgtgtgtttaaagtgcaaatataaatgtgaaaatttaatagtttctcatcagctgaatgacaactaataaattgatgtactttttaaagaaagctaacaacatgggccaaattcataaagtaattttcataaggaagttcacttgaaagtgatgtatttcatagaaattttatacagaagcatttttctcctcattagatacctacgtacatagtaggccctcaataattaatactaattgtggattaatgagtccttgcaattatggttaaatagaaacatttaaatacaaaggagtggaagcttatacttttaaccaattatgcagttatttattttcataaagttggccatgttttttaaactgaatactcctgtcgtgtatctgtttaatcagctcaaatgttcatatttcctcagagattaataaataagaccataatatatttcatagcagatattttatgtgcatctcgtatctaaagcttagccaaatttcaaggcctaattaattttaatgggatgtaaatgcctgcatttgtctaagtttcctgaaattctacacaaatggcttcacatgtcaatttccaaagcacattaccttagctaatctctcaggatctccaggatgcctagggatgaccttctgcagtctctggaagccatagtctatggtgggttcatttaatgctgaaagagaaaagtcctctttctgagttggtatcctggctataaagcaaaccttctaattaattcttccacaggtaataagaaggttctggatgcataatggatgtaatcagttagggtttttgctatcgacattggttaattcacatataaatttggaatttatagtacttttatagtttcctattagaataacatttcaaaatttcagattataattatcatttctgctttaagtatacataaacttctctgctatcaaataaaaaattaagcaaccatatctcaatttcttatgaagataataaactacttttatattattttcctttctcttatctctttcttaagtaggactgcactgtctattcttctaaatatctatgaaatattcttctaaatatttttcttaaccagtctcttatgtatatttatacatatataaaccttctatgagcttattctcataaaacccactttatgcataatacgcttccacaattttcaattatatttaattacacccacgtctggtaactatcagccccccaccccacgaatactacaaattttatttcaccactatgttcccgttaagacagggcctggcacatagaaggcacttagtgtcagtaattataaaacgagtgagtgaatgagtgaattaatgaatggcatactttagcatttccactattctaaagagttttctgcatgctgcttttattctttctccttcttccctttcatttattctttaaaagtttcttgtttaaatgtcatggttttaaaattaatacatgattaaagaaaaagatacaaagaatgaaataatcacctgcactgctgttatgcagcaataaacacagtaatgtctatttcctctttaatcttattttttatatatatgttgctattattctatcataacaatgcctcttgtaaaaaactattacaaacattaaatatagaagtaaaaaattaccataaacccacttaagacatgagctggattaacattttttgcatatgtctttccagattgaaacctatacacatacttaaaattattcagagacataccgttcacactgttacataacctacttttcatccacttaacaatatatcataaacttccccaagatcattaactattcttttataacattattttaaattcctgcatatttttctatgacatgttctataatttatttaaatggcttcctaatatcaggcaattaatgtgatcctaatttctcactattataaatatcgagcaataattatcctttgtgcataactttaattatttcaattggaaaattctaagaattggaattactggaccaaaaattatgatttatatttcaggcctttcagacatacggtcaaatcactcctcaggagaatgtatgagtttattctccctccagcaatgcgtgtgctcattttaacttacatttttttactcaccagtgaggttgaagaattttttcttatatttgctgatgttaatttcttcttttataaactgcgtgttaatactttctgcactcttctttcacttgtaaaaatactttatatgttgagatttttaatactgtggtatcatgttgcaatatcacatcccaatttgaccttaagtattttatgtatagaaaaaccacctctattccaagaactggtagatacacacaaacacacacacacacacacacacacaaatgtatatgtacacacctatgtatacatatatgaatgtttattatttaacttatctggattttactttgtaatgtaacattaagaatttacctttgccacaacttaactgtatttcacaatttattgaatggtttctatacatatattctgttttattgatctattctgggtaaaagtcaccctattgaggttgtaatacatatttaatatttgatagggtaagtgtccttccagaaacacacaatcttttaaaactacattttctcaactattttttttttttttttgagacagagtctcactctgtcacccaggctggagtgcagtggtgcaatctcagctcacagcaacctccactgcccgggttcaagcgattctcctgcttcagcctcttgagtagctgggcttacaggcgcgcgccaccatgcctggctaaatttttttttgcatttttagtagaggcagggtttcaccatgttgatcaggttggtcccgaactcctgacctcgtgatccgcctgcctcggcctcacaaagtgctgggattacaggtgtgagccaccgcacccggccttctcaattattcttatccatttattctttccagtttaaccttagggaaatttcaaaaaaaatttcagttgcattaaacctacagctagagagaaaatggatggctttgcaatagcaacactccaccttcttctttagatccctcagtaaactgtgctgctcatcatataggtgctaaattttttgtttaccattttaattttttggtatttcactttttgtttttactgtgaatatggctattcattaatcatattgtccaagagttttattagagtctagaaacacttctgtgttttacacatctgtgcaggaagtctatggcatacagatgaagacaatcagctttagagttgagtagatctagggtctgaattccagctccacaatgtatgtgaacgtgagctgtttaaaatccattttataggttggctgtcaaaatcaaaactatttctataatgtcctcagcacggtgcttggcatataaaatatctttttcttttttcttttgagacagggtttcaccctgttgcccaggctggtctcaaactcctaggctcaagcaatcgtccgccttggcctcccagagtgctgggattacagacctgagccactgcacctggcctataaaagatcttaaccaggccaggcgcagtgactcatgcctgtaatcccagcactttgggaggctgaggcgggcagatcatgaggtcaggagatcgagactatcctggctaacacggtgaaaccccatctctactgaaaatacaaaaaattagccgggcgtggtggcgggtgcctgtagtcccagctactcgggaggctgaggcaggagaatggcgtgaacccaggaggtggagcttgcagtgagccaagatcacgccgctgcaccccagcctgggtgacagagcaagactccgtctcaaaaaaaaaaaaatcttaactgaaagtaactgttattttgtagccaaaacccctgacagatatcattattttttttctattacttaggcctgtacattcatatcatctacttacagtgatcattttgtctccttttgatagatgcattaatcccatttagttctcttaatcctattcttgtattggctaaaacttcccaaacaatgccccaaaatgacaataaagttggatattcttgtttttctctgaatgggaatgacatattataccaccaaatatggtgttggctatttgagatagatattatttatcatggttcaataagggttcaataagggttatcaggacttcttggagttttagaaaatcacagtcacatgaattttctcttttggccagattttttatttatatatataatatatatatatatataatatataggatatataatataaaaatatataatatatataatatataggacatatataatataaaaatatataatatatattatatgtaatttttatgtattatataatttatatatataataatttttatataatataatataatgtttatattatattatatatatatatatattttttttttttttgagacaaagtcttgctgtgtcaccccggctggagtgcaatggcatgatcttggctcactgcaacctctgcctcccaggttcaagcgattctcctgtctcagcctccctagtagctggaattacaggcatgcaccaccatgcctggctaatttttgtatttttagtagagatggggtttcaccatattggccacgctggtcacgaactcctgacctcaagtgatccacccatctcggcctcccaaagcgctgggattacagacatgagctaccgcgcctggcctatattttatattttctaatatttcaaaattaaacattaattcatggaagtaatgtatcattttcttggtatatatctaaattcagatataaccattaataccagattcaaccattaataccagattaacatttccttaacacaactggcacaaggattaaatcaagttactaagaacagtgcctggcacttggtgagcacgcaggtatcagttattgttattgctgtcaggaatttatgtgtccatattaataactaggattgtgtgcatggctctgtccaactaatgatttttatttcatatgagctttgaaaactatattgagaagttttctttattttatcctatgctctataaatcttacatagcatggacagtagctcttgctaaacacttgaaagaaccctagttaacattgctcacactaaggtcaccaatagcattttagccaagccaacaggaacttttccattcttaaccccgagttaacatttgagaccgctcatattctccacttctagaaaccctcccacccactggcttcctgaacttacactgcccggcttccttcctacctctttggccatgtcagactactttgcggactgttctttctctgcctgtcttgtaaatgatgctcctcaagatggttgccaggcagtcctcagctttgctgtacgttcccctgggcaacttcatcaattctccatgatttccacatgcagctacatgctaatcgtcataaatcttgatctctagactagatacctggcctgagattcagctttaaatatccaactgttggctagaaaattccacttagatggtccatagattccccctacccaagatacccaagctcatgagattttctgtgaattgtaccatcatccaaatgattgactgccaatcagaaaccttgaattcattgtttctcaatatcattgtattttttctagaaaaaatcatccatttcatcaagattgttaatgttttagcatagaatctatattgtatttgtttaaaatttctaaccgatctagagttcccctccccctctgcccactgaaatgtacacaaatatatgtagacatttaaattatttaacctatctggattttatttcgttgtgtaacattaagtacttatctttgccacaacttactgtatttcacaattttgttgtaattttctgattagtcctatttataattttgacttcctttagctccaggaagagtatcttaaaatttctaggtaattgagtactaaactgttaattgcttattgtagccaactgccctggattttaaaaggtgtcctgcacagtatgtgccttttggaatttattgcatttttgtgaattaatacatattagttttgtctgcattttatgggcaatgctttaatgtcttatttcatctatctttttgatcactttaacacatccatttttgcttctataaatttgtcttcccacattctcatttctaatagttttaaatatatatacttttctagtgatttgagagatatacacactttttgttgttgttgttgagacagggacacaaagtctggttctgccacccaggctggagtgcagtgcacgatcacagctcactgcaacctccacctcctgggctcaagcaatcctcctgcctcagcctcctgactaacttgggctacagacatgcaccacatgcctaatttttgtatttttggtagagatgggttttcaccatcttgcccaggctgatcttgaactcctgagctcaagcaatccgcccgccttagcctcccaaattgctgggactataggcatgagtcacagctcctggtctgtacatactattttaatttacagaagtgtctttagacttctctgaaaatattttatttttcctaattatttgaggtgttgagtcgctccatatataaggaattttgcttgccttctatcttcccacctctttctctccacttatacatttttgttggcagtttatcatttcaagctgatttactattcttagattttctatgttctatatttttagaaactaattttcatgtttccactaagtctcatcaccatattaacaagaattttttagacactctatatttaactgctttctcggccaaccaccaatcctgcaatagcacaacttttcccatcttgcattcttcattgattcaattctcctgcagtcaggtgctatcaataagaataagagttaaattctgtctgggccactgaaataagagagtatctttttgtctttctcacacataaatgacaactgctctggatatagaatagttaagtacactctcccattcaagatcaactttctgcttgtgccactggttctcactcctcaagttggagacaggggagcctcagggtggttgttggtgtctcccccatcacttccttgccctgctgctctttcctaagggggaatgaggaggccagctggaattcgcatgtccaccagtacgaccctgtgtgcacatgccagcacaatgatgcaaaatttctgggatactaatgactttagcctagcttcaagcattattaccagatttcctttatttttatgttttcctgaaagtatcctctaatatattttgggggtgggggccgattaaacacttgcactcacaaggccatcttacctagaaacacatgtaagaatagccgtatgtttaagtagaattattctgtaaacttttttcttccacttagctttataatgtcagcaatttgggaagactttttcttaaataatgtgatttttagtggtggtaatatgcaatagtgaaaatcattattaccaccattaggacgtactgaagccttactatgttaagggcactctgctaagccttttaggcacattagctcgttcgattctgattgtaaccctacaatgtgggttttatccccattttcaatgcagtcccaagtggtaaaggtgggatctgtgtcctgcttctctaactccaaagcctgtgctcttaacctttcctgctgcagaaccagagatgatgatccttccatccccctctgggcatcctcctcagcttcaagagctacagatgcaagagcatgatgggcatcctcctcagcttcaagagctacagatgcaaaagcatgaatgaagtcctgcctgtgttgcctgactttgtcactgagaccagaaggagaccccatgcggaatcaactagcaaacacaaacagctgcctggtgctgcagggcaaacagacttgatgatgaaattctcaaaattcatcattgcctaattttttttttttttagaaatatgcaccattttgttagccaaagtgcagattttcgtagagaaaacaggaaaattattgatatgggtacactcacaacgtgctaaatacaaactaaacagataacccataaggcagaaaatataacccctccccgactccatttctgcctttgtccctttccatctgcatggctgtcccccaccctggcaagtgctctgcctctcccaagagcatttttgggggtccagccaggtagcaccaccttccttatcccttagtccttcctgctgctcagagaggaattttctggagctgggctctaatcagtgcacagaggtgggatggagatgagtttttttaaaatataatttatcacgcatttgcacccattgttctcccaaccagattgcaaaccactaggatacagggtcatgtctagtttctcttgcctgccctcccctccccagctcccaaattagacatggcagagtatctttactacactgggctggcaattcatgttttacactgaataagtagataaggcagaattgtctatttttatgttgttttttggcaggtccctgccagacttcataggcataaactatgggatacatctcgtgtgcatccaagtgagagagaggacagtaaaacacagttacctacacagacagggaaaatcacactcacacatacacaccgacagaatttcatttaatcaagtgcacattggaagtagaaagcatgaagctgaaagtactccagctctgtttagccaacactaaaccataagagggacctcagcctttaacacatggccgggtttgacaactctttggttccagactgacttcccaactgaccagttgcttttgcgtctcttagattcagcttcaccttgaatcccaacttcctccctccccctccctacttccctgggcgttctctggcttttcagtcctggtatgagccaagcaaagctcaattagctaatgaggtgcccaagaccagcaccaagactgtctccaagggccaaccaggccattaactgccatcatcagtgttaatttacaaccttgcctaccacatggagtgcggggatgctgtgaagttctgccaaccttttggctgacagggatacagagaagtgctggcaaggcaaaaacagagtaaattaaaaatatgcttcaatctataggctctatttatctatgtctttctttagtaatataacattaaggtaaaaggtcatagccccactgaaatataatttatatttaccttttattaaataattatggcatggcatgaagttaaatattacagaagctaatcaagagggaattcaagagagaaaactcagacatgagaatttcgtctttgctatacatagaatgtcttaatcctccactgggagtcattcgggtttgcttaaggagtttaataatacacatttcaactgccacagaatctaaatcccatttggatcagccttgaaaaactttcatcaataccttgagatttcataatatttctcttgagagcctggatctcatgtgccatttctcattttgattgcgggtataatatatgagattacttacatatatcttggacccaataaataaatataaactataagcaatatgtgaatggtttcttttttaaagtaaatagtatttaactaaaaatatctactgggaaccactctttaaaaaaaaaaaagctggctggtgctcaatattaattttcccaaaggattagtgcgatataaaattctatatggttttaattttctttccttaagaggaggcacagggagcagataatgcttaccccatcttatacttctacttctgtttcacaaaaatgaaggggacactggctaacatggaaagggggctctttgttagaaccctgttcagcccttaacaattacagccttgacactgcaggctggaggtcatttatgctcttgaccagcaggagcactgattgcaaagatggcaacatcaaggcctggttgctttttttaaaaaaaatgtgagagaagatgatgatgagtgaggcaagatctgagttctcaattggctgccactctggggatgttggcggatcacactgctggcctcggttgcagctttactcaccagtgagtcttcccttggatcctaggattaccatggaatctgtaaatggtcatcaggaggccaataaaagtagaaattctaagcctagccatgtgtttgtgcatctgtgcattatctgcagaaagggagcttcacttcatcagatgtgcacacagcccatggtctcctaagggtgacagcccacagaactagaggatcactacagtcctaactctaaattccaactttcttcaagaataaggaaaaccactgaaaggttttctttgcattgtaagaaagcaaacaacaacaacaacaacaacaacaacaacaacaaacccttaaatctatataatgtgactgccatataaacacaagaccagaagacagacactgactggcaatggaagagaaaacatgctttaacaatacctgccacgtggctttggccaaggagaattactctctgttgacagcgtaggaaggcatgaaacacaatctggctttgggaggaatttagataacacagacgagctcctgccctcgtgccactttaggacgtctctgtcctctttccttacatagtactttcttcccacatgttcattcccacaaagtctgtcttccatgtgctaggatttgggttcccttctctctccctcgtccttccccttccaatttccttgtctatttgtctcccttctgccctattcctcatgtgtccaacatgcaaaggctacgttaaattcacacttaaatgctaagtttttcattgcatatgatggtgtgatgggataaagctggtcctagcttgggagctgccttagttcccaacactaacaaatgacacaaccttcatcaggtcacttggccaggtgaggctttggtttatttctctgtgaagacaaaggattggggtaaatggcttctaagacccctttcaagctcttacattttatgattctaaggctatcactgatttggagcagtggctttcttctctgaggagtagagggtggagctgaagtcaaggctgttgaattaagttgtctttaaccttggctacattgaaatctctccccacatccatttgttttaatgtagcaaaagttcagtgtcaccaatttaaaaacaaaaaggaacaaagataatataggaacacattattaagaggcggtacctgcctttgtggacacaggaacaagaatacgaggagagaaccaacagtgcacaagtgaaagattagactgaagcctctgatatttaattttaaatgaaatattaatttaatatttaattacactttggtttccagaaaaactgcagcagcaagacagattgtttgaagaagggaataatatacatggttaaggagacaactgtaaaaattaaagataaatttcaagggtaaatctaaatgccacaatggagcagttataaatacactcttgctctctgtaatgtgtatttagaatattatagccgagtgtgccaatccattaaggggctgggatgtctctagtgaaacagcagccccctattctggggctaacaacggagacatcatttctcagactcagctgaatgatgtatctgaatttcacaagaggtgggagtggagacaacttcagtaaaagtgcaggctaccaggggggctattgactcaacctgtctccagtttgaacaaggaatagttgtacttgggccagtttctgatgtctgaattgggtatttttaactaaaaatcagattcatttcttcaatgggaatttttttttccaggataacgctatatggggaaaaaaaatgcgaagtggatgagctattaacatttgaaatccagtttgcacatctgtgcagcacagctttatgaaggcaggccccacaattcacacacagccttggggaggaggctgttcagggtatgatttgggggtgtgtggaaaaacctcggcctctgatttttcctcccagctgctgcctgttcttgccttaatcctgtcgatgaatactttctcccaaataatgaacagaaaaaaaaaattgtttttttgccaaagtagaagataagaagtattctgggagagggggttagttagcatgaattatctggtttcttggtgcatctcaactagcaggttgtctatgtagacctctaagttctcttgcacaccttgtcaagcacctactctgcatgtacctgggccagctgggacacagtcaatctcttctgctcctttggtccaccttttattttttatttatttatttttttcttacaagaacttctgggttcttttaaaaaattatttatttatttatttaagaaacaaggtttccctctgtcgcccaggctggagtacagtagtgcaatcatagctcactgcagcctcgatctcctgggctcaagcgtttctcccaccttgggctcccaagagctgggactacaagcccatgccccaccagcctggctaactttttttttttttttttttttttggagatgggatcttgcctgggttggtctcaaactcctggcctcaagtgatcctctggcctcagcctcccaaagtactggaatttcaggggggaaccatggtgcctggcttctaccttttaatacctgcttccttgtgaccccctgtccctctcctgcaaaggccatgttcttgggctcccttggccttctctgtctcctgcaaaaacctgatttctaatctagatcgagatattcagggcatgatgtggtaggtctttcaagatgaatccacattttccagaagacagacaaagaagccctgtgctggtccaacagcaaagagggaggacgctccccagagctgcatgtatcctcccaccagatgcttacaacagtgaattgtgcttgtgcttttatatttatatacataaatacctttgcatatgtatgtaattttatctttctaatggggtaagtatatcctcatttttaggttagaaaaatggcacaaagaaaagttgcttttcctgaaagttggaatgcaaatccctgcctcttcactctgtcatcagctctcttctatacaacagactgccccagcgccaggttctctcaagcttaataaaaatgtggagttcatatttctttgcctcctgcaacttcagttatttgtagagaggataatttctatgatttctaaagaattcaaggaacttcacaggctctgagtgtagcacatcatactgactggagcctccccttcataactcctgctttttgagtcttctagaaagttccacctaagagcaagcattactattgtgttcacagtgaaaggacccagtctcataagaaccttcccaagggtagagtgctttataagccaaaaagtctctgcaacagcctcataagcagaacttaggcctcacaaactcatttctttgtttaaaatatacattccctaaattagttcaaccactgtggaagacagtgtggtgattcttcaaggatctagaaccagaactgccatttgacttaggaattccatgactaggtatatacccaaaggaatataaatcattctattataaagatacatgcacgcgtatgtttgttgaagcatgttcacaaaagcaaagacttggaaccaacccaaatacccatcaatgatagactggataataaaaatgtggtatatatacactgtggaatactatgcagccataaaaaggaatgagagcatgtcatatttgcagggacatggatgaagctggaagccattatgctcagcgaactaacatgggaacacaaaaccaaacaccgcatgttctcactcataagtgggagctgaacaatgagaacacatggacacagggaggggaacaacacacactgtcggtgggttgggggcagggagaggaagagcatcaggacaaatagctaatgcatgcagggcttaatagctaggtgatgggtcgatctgtgctgcaaaccatcatggcacatgtatacctatgtaacaaatctgcacgtcctgcacgtgtatcccagaacttaaagtaaaataaaacttaaaatataaaaataaaaaataaaataaaatacacattctcagaccctctcaggagagtagcaagaaatattcccatattgcaatctgaaaaccagggcccaggtaaggcgtcttctgagacccccttcatgctcaccagccacggcctatttcctgtgcacctctccagagtaacagcccaagagccaaggcatcatctgccaagtaaaacaagacaagaccaaacagatggccttggtatcgtgttttgtaataaactgtacagtactgggaagtagtacaggttaggtgttaagagcagaactttggaataagacatctaggattcatcataccttggtgaccttaggcaagtgacttaatttctctaagtagcaggatctcagctatgaagttgagatcctcatagaactgtcatcacagataaaggtggtgatactcggagcctgtaggacagagccttgccttacgtgcttaatagatgacagatgtgattactgaactgctgtcatttttgcttgttattctgtcttatgatagaacttataaaagacttcttaaccagctgtctaatgtgtagtccaggttctgcaaagaaccacaggaacaatagtgaaaagctgtgctcatttacccccatgtcctcacacactgtgttttgccctggattctgtggttggtgcagattttacaattagagacaatgacaattccacccctaaataccatgctctgatatcctctccctgcatactcactgccacctgaagtcaagacagccaagaagtccctgaacaaccagtcactgtggttctgttgggtgcccctactaggattatttttctgcattgccagttctctctggaagtctgcgcggaagacagaggatctcttctcctctcctctccgcctaggctagcatacctcctccaggtctcaaaccagtaagaggcaactggactttccctaatgagccctgttctcacgtggctctctcaattgcgcagaagcaagttgcacgttagcaaaccacggttggtggaaaattgacctgcaaagtcacatgtgcaaagaaaatgtgttatttttcagagccccgatgttgtttgtgctgtggttggcagtggcaaccatgggggtctggctaattaaccaggtacacctaataatgggcttggctctgtcatggtggtgcatccttggatacagaaaatgtcaacagttggactatggaccacagagtgtgtgcagtgggacaggggtggaaggaggaaaggttctctggagtctcccgcaggactctccttctagaaagttctacataagagtaaacactactattgtgttcctggtgaacggacccagtctcgtaagaaccctcccacgggtggagtgctttataggccagaaagcctctccaacagcctcaggagcagaactcaggtttctcaaactcatttctttgtttaaaatacagattcccagaccctgtccgaagagcatgatttggcattgtctggaatggtgccaagcataattcttatgatcagccaaattagggaaacacctttgggtaacagcataattggcaccagagctttacagatgatggaaatgaggctcagagaggtcagtgaccggatgaaagtacacacaagcagtggaccacacggccagcccccaaaggcagtgcttccggctggtcctcctctcgggacccgtcctgctcacagcactcactctgcaccttttaaaaccctctaggtttcaagttttgccttttcctccagaaccagaatgactttttgtccaccttgccattggaggtgagtggtttgtctaggcctatagcagcctaggagcactgtcctgcagtgaagcactccaggcgtccagagtgcgtgggtcagtgcttcagggtggctggaaagacaggagggctttgtctttctcctcctagggaagaggccatggctctccaggtgaccagagtgaggactcagctctgaggtggaacagcccatcagcaggtgcctgtggaagccactgatagtggatgaagacgaaattggcttttcatgtcagtagctgccaattcaatgggaaagacaggaggccaccaacctatttcctgtgggctctagaaccctccatggatgacatcagcttcctgtctccaccaacccaagtggtacttcgctcagtaacctcggggtggaagtttttctagaaagtggccagactcctgagccatccttgatagcatttgtaattttggatgatgctatccttgatagcatttcttctttatttgtgaatgaacaaggatgatccagccatccttgatagcatttcttctttatttgtgaatgaacaaactcctgagtccctcccctcctcactccgactgcccccgaaggcccttccttctcaaaggcagtttctggaagaagcaccaccaactatcaggctggaaatactttgtacctgaaaaatcaagtttactaatgtgcactgtttcagtatttaaacgtgtgatgctatattgtgccatactttattctttaaattttaaattttaaattatttaattttattagatacaagtaagcaacatgaaaaaaatttaaataacaacaacactgagaaaccaccattgttaataccttggcatgcaggattctgtaccctactagggttgtttgtaaaactactcatttttcatatatctaaacattgggtcatatcatgcagactattttaaagctcctttaaaacccatatcacagatgcctttcatgtaaataaatatccatccatggcattatttttaatgtctctaaaaaagtgtagaagatgttccattatttgtttaatgaatcccctaatgtacaatgaggatattttcaatttttcactataataaactcccatgaacggtcttccagcaaactcaattatttcctaggcagacatttctagaagtagaattgctgggtcaaagggcacatacatcttcaggtgttctcttatcaaatttacattcctgcagtagtatcttagatagttatgacacctacccatctccttatagctccatcacccatgtccaggggtgtctttgaaacactagagataccagaagctctacatgcagaaagtgtcctggaaaaagacccactctccaactgacttcagggacagcccactctcctggtttcctcctaccctgaccactccttctcagactccttcccaggttccttctgtcaactttaatcctgcatgctggtgttcccaaggtgccatatctccactctttcatggcgatctcatctggtcctatggctttaaatcctgtctagagtatcctgcagtagtatcttagaaagtctccattgtctttgaatcttgccaacctgagtattttcatttgtttaaaagaaaatctctgtcaacttgatagggaaaaaaaggtgatcttgttgccttaatttgcatttatttattagtgcagttgggactttttattataataggtttctttgtttactagtcttccttcctgaatttaactcttgatgttcattgctagctttctatttggatatttgtcttttcctcttcaatttctaagatacctaacgttctcctctttttccacaatgtataacatagcagttaacaaacagtaggcacaaaataaatttttgctgaataaaggaataagtctttttatacttaagataataggccacgtagagcaaatatgtggtctcagtttgtccttttccctttaatgcctggcatattgacacacaaacattttccttttacgtaatcacatcttttgcttgatggtgcctgtctttggcctcaatgttcacaagtctcaaaatgataattattctttaaacctgtaatcttctgaaatgtctacatttttaataaaaatatttaatttgaatacagtttagtttatatgctatgaaatttaaaatctaactttttcttttaatgcctaactagttggcccaacacatttgttaagcattccatcttttctgcgttgacctgacctggcttccctcacctactaatacctaagtatttatacccttaatgtgtgcaaagtgtttgttttttaaatgttctcttctgttgcatgacatttctatatgttcctacaaagccccatattcttttaattattgaaacttaaaataggttttaatgtctggcagggcaagggcctctcatttttcaaaatcctcttttagcacctttccttcccaggtgaacttttgtaaagttttcccaaacattttgttgctattttgattggcactgtgttaaatgtattcattaatcgacatctttacaatattaaatcttcccacctctccaccagctggaagtattttgtccttcctctgaactcccttagcacgttatatcttaaaaaaaaatcactttctaaactatacccacccaatttttcaactctgaaacatgagtgtcgtcccctccttcccctccccaaccttcaccccatccaatcaatcatcaagttgtgtcaatgttacctcctaaattttatccacttctgcctgtccccaccaccagcactctgctccaagctaccatcatttctggcctgggccaccccactggcctccaagtgacctccctgcatccaacctggcttccaagccatcctctgcattgtagccagaatgatcttttaaaaggcaaatctgatggtggcaatattcccaaagcttcccatggcgcttgaggaagagctgaaaaaaaacaagccttaatgtgacctggcccctgcccacctttgcagcttgaacacagcctctcttaaactcattccttctgctctgttcataaaatatatcccatgttcttgtctaccccagggtctttgcacatactgttttgtctattctaaatcctccccatcaactcagtttaaggaggttcaattcccctggcatatgttcccagcatcctaaacaactccttttagtcctcatcaggtttgcaattccttgtttaagtcagtctccatactgataaggctaatggtaatgacacagaagtgctgggaagggaagggcgtggtacctttaaatgatatggaagtggggaagggaagtgctgggtagaggaaggcctggtccctggctagggctccaccccttggcctgtgcccatggacctaagttaggacaggcatttttgtttacctgcccaaatgttgcatttcccaagaccaccctggcctgtcatgcccccatcctgtgcctataaaaaccccgagaccctggaaggcagacacacatcagcggaggaacacctgggtggctggacatccagaggaacgcaccgacaggcaccggcgggccactgaccggcagaacgacacagaatgtggctggggcagttggaggagaacctgggctgccgagaggcccggggaaaaccatctcccttctggctcccttatctgctgagaactacctcctctcgataaaaccttgcactcattctccaagcccaggtgtgatccaattcttctggtacaccaaagcaagaaccctggaatatgaaagccctctgtccttgtgataaggcaggggtctaattgagctgagtaacacaagccgcctacggaaggctaaactaaaagagcacctgtaacacacacccactggggcttcagctgtaaaatttacccctagacactgctatggggtcagagccccacagcctgcccgtctgcatgctcccctagaggtctgaacagtgaggcactgaagaagcgagccacagccccgtcgcatgccctgcgaggggaacaaggggacttttcccatttcagtaataataagaataatataaataataaaccactttttgactaataagatatgggccattctatccactctctatcccaggtgctttccatgaagagacctggctgtaccagcttgtgaaggcaggtggtgaagttttcaggaacgttgtgagctacttgagtggtagcttgaaatctgccatggtgagagtatttgaccgtggaaatcagtaaatggtataaacccatgatttaaaaaagaaaatctgcttcttcctgaagagccagttgttaaacctttgccagcccaccacagttgccaggcactgtatcatttagtcctcagctctgtaggtagcccattttatagatgggggaaaaggaggttaagtcacttccccaagattcaagaacaattcagaaggcaagccacactatgagtccaggtatctaattccagagcatgagcagttagtgtttatgtcagtgcattgtaatgtcaggaaggtgggagacactggtttgacttgtctccaatagcctgagcatagagctcaatgttgagcacagagtgcactgctcaataaatacacacgtcatgcaaaagtcgttaatgtctcagcacatgaagaaaacagagatattttacgacttgctaaaggagcatcagaaagacaccaggcaggatggccagaggcctgcatctttgttctaatgccatctttaattcaacaggcaattactagcaaatcacttctgcttaggtttcagttttctcttctggaaaaggaggactttgactagttaatcttcatattcccttaatctctaaaattatttgaatttacatgtaacataacatctgttattttcacaggtgtataggctccccttttgctaggtactgtgtttccaagatctgtcaaccacagcctcctcattctgtctggcaaattcctatttcgcttcaaaaatgtcagctattgctacctcctctgggaagccttccctgattccccaaagctagtcactccctgcatagtgcccctataacccttttttattttaggggctgaatctagttattgtaatgtaactgtagccatctcccttttttttttttttaacttctgtcatctcccattctagaactgtaagctgatagaggtgtactgatattattgattttgtgtgtttagagcacgtgtttgttgagtaaataaatgggtgacacttctaccttcagaaatccatatctaattggtctggggtttgacctaggcactgataatttaaagtgtggccaagggtgaggacctcttttacacatgcacacacacgtacacaacacctggttccaaatgtctacatcaattgcgctactgattgagattgttctttacttcaatagagagttcaggattggctgcaatgtgtttgttatgatacctactcatctccttataggccagctccatcacccacatccaggggtgtctttgaaacaacagagataccagaagctctacatgtaaacagtgtcctggaacaagacccgctatccaactgacctcagggacagcacacgcttctggcttcttcttaccctgaccactccttctcaggatccttcccaggttcctcctgtcatctttaatcctgcatgctggtgttcccaaggcaccatatttggacttctccaccatatcatggtgatctcctctggtcctgtggctttaaatcctgtctagatgctggttgctcctctgctcaacatcttccacgtcttcccatccaaagtccttgccctgcctgactttccaacctcatctcccatcactctcttccccactgactccactccagccatactggcattcttgctcttccccaacagcaccaggctccctcccacttgtaatcttgctgtaccctctacctgggacaaccacctcccccacccccagattcatggactgccaggcactgctccagtgaacaccagtgaaccaaacagaaaacccagcccaagggagctcctgcgatggaggagggaatgtggatggagaggagaggaggatggagaaagaaggagagaagaggggatggatctccacagctggcgccatcctgggattcaggtcttcgctccatgtcccctcttcagagaggcctccctaaccagcctgcccaaccctccctcactctccttcccttacttctcactatctgaaattatatcacttattttctctcttgtctgtcttcccctctataatacaagctttatgaagttgggggactttaccttcctcccttctatacccgtgagcttagagctgtgccagcccatggcaggcaggtcataaatactagtttgaatgaatgaatgaactatatccctttggagctggaacagtaacttttttattgtgactgcaatagaatctcccatagaaccacagaaaataacacctgagatgtgcttatctcaggacagaaaattcaaaggctaaattttgaataaatagacccaaaaattacctctttccatctactgctaattgatagctagccagacattgacactttaacaagagtaggaatcagagcgcaaatgagagactacactatctataaaataatattattaaaaatttataatatgcctgctatattttcttggtttatatatttctttctctatactctttattttctctgtcaaagtataatacctcattgatcttcctgcttctggttgttcctcagttaactcagtctttatattaacaccatttctttttttgaagacaatacctttgagttactcttcgttgcacagaaaccctcaatgccttcttattttctgacaagtcaagtctaaactcccttaccaggctccttttttttttaactttaaaaaaatgtggtaaaatactcataacatacaatttaccatcttaatcatttttaagtgtgcagctcatttgggctaagtagttcacattgttgtacaaccatcatcaccatccatatccagaactctttttgtcttgcaaaactgaatctctggacccattaaatgaatccccaatttctcctcccttaacccttggtacccaccattagactttccatctctatgaatttgactactgtatgtactacataaggtttttaagctgttttatgctttctttccctcccatgctgatatggtttggctgtgtccccacccaaatctcatcttgaattgtagctcccataattcccatgtgttgtgggagggacctggtgggagatagttgaatcatgagggcagtttctcctatactgttctcatggtagtgagtaagtctcacgagatctgatgattttatagtgggttccccttcacttggttctcattctctcgtctgtcaccatgtaagatgtgcctttcgccttctgccatgaatatgaggcctccccagccacttggaactatgagtccattgaaactctttttctttaaaaattacccagtctcgggtatgtctttatcagcagcatgaaaacggactaatacacatgcctagcacatgtagggtaagttctagtttaaatacaaaatgcattgccacagctgtcagacaagcttttggtcctgcaggaatgtgctcacctcaccctgtggcctttgcctatgggattcccatagtgagaacattctccctttctctctttgcccatccaaattttccctgtccgtaaatatggtcttcaatttccatctcttccttggcacctcaccccattactcttgtccacactaagccctctcttcctgaaactcatattccattcatcggaattaccaaacatttcaaatttatgaattcaccagttgttctttgcaatataccgttgtctccttcaaaagtttctaaacttccaagtggggaagggatcatgtcttacgtgtcatccatacccttctcttagaaaaagcagttgatacaaagtagaaatttaacaaatattgactaatatatgatgtttaccttcttgaagttttaaaatactttgaattgctctccaacatcactaggcaactctcttgaatcttttcaagaaaatgtagttacagccaataactgtctattttttaatctgaccatgtggataaaagatggttacagcatggttccaacagagttaaattttcagagatgtgttcctgaaatgagctgctgtgatctcccagatcatgcagaagttgcttaagtaaaacactaattgagaagtgaaccttcacatcaccattcaacatctatcactcagctcactctttccacactagtaaaaagacctagaaaaatcaggacgattacaaagtgcagatactgggaactagcgcaaaggcaaaccagaagccagcctctcttggaatcgttttctcacctacctgtgtaaatgaaccttcctggggctcctttgcagaactgtttagatttataagataatgtcacctctaccacgcctgggatgtgccggggaggagtctgtactctgatggcatgaggggttattagctgaggaatgaacaggcagggaaataaaatacccattagacaagccatcaccaaggacataaggtgtacaacatctcccactattgctccccaggggcttctttctctctgctctactctaactggagtactcctagctccaaatgcactctgaacatccctgtcctgtctctgtctgtctctgtgtatctgtctgtctctgtctgtctgtccctctctctgtgtgtatgtctctgtctctctctctctctctctgtctgtctctctctctctgacccccaccttggaatttcctctcaactcaaccaatgtaggtcctttatttcctacaagcccaggccaagtccctcccacctcctgctgccaaccccaccctcacccctggaatcctttcctctgctgaactcctatcctgcttgtgatttcaaatattgatctggcaagtgccaaccccaacttaacactgtcacttatctttttgtcatgttttatatgatgatgaaagtcaaacacatccaatttagaacattttgaaattacagaaaaatattttttaaaaattaacatcataaagacaatcaatattaacatctggtatgtttccagtacctttgtataaatgtgtgttatataactagattttacatccataggcagtgttgtccttgttttttttctgcttagtattacagtgtgagcatatcctttttcctgtatcattcgaattttttcaaaacattttttaacggtggagtgacattccatcactttacaattctagatttctaagttttcaccattttaaataatactgcagtggatacttatcttcttaagaaacccatgcctgatttactatgacttttatgcttttttacccttggtgtttgtgctagtttcccagatcaaaacaatctttgggcaaaaggaaatcagagtaagcctgttgcctctgcttacctcgctccatacaagcatagtcccaaacaccacttggagaccatcaaagaagttgtccccgatgatgatgaccatggctcctcctgtggtccagccttcactcgggctaatggctttgatgcagggggtagctaagaagacaggaaagaaaaagtcaggtttgttctttcatgggtgtccaactttttggcttcccaggcccacattggaagaagaattgtcttgggccacgtataaaatacactaatgctaacgataactgatgagctaacaaacaacaaacaaaaaaggtccatgtataatttttgtgatatcccccaccacagataagaaaacaaatccttgccttcaaaggattggacacaccacaaataaaaagtccttgcattcaaagggctggacacccgtatttggttgaagcctagaattctgcggatgggctgcttttgaaagctgctggtcattccaagaagttcaagctgagatttgttgacttgccatcattccctaactggctgttggttttcaccgagtcattaaagcctaatgagttgaccattatgtatgaaaaagtaaaacacttaggtaattgtgcaaagggtgtttgaaaaactctgttgtttttgcccatatttttataagttgatcacactggaaatgtgtaaatcccctttctctccccacctcctctgccctaagatgttaagatttacaaggcctgttaatgggccagagagagagagggggagaaagcaaaatctatcatagttgaaggcttttttcagctctatcaagagacaatttctaatcactctactaactttgtaggaaggattttccccacttcttccatatgctccaggcctctggactttatatcccaacaggaacccaatatggttttcaggccataactaaagtcaatccatcactccatttccaaagttgacagggtcaaaggtagaggagaactttggcaggactccaaaaacatgagccccctttgaacagccagtcaatcacatccaatcagtcaaaagaaactggatgggttcctagtcctgaactctgggattttcttctcccctttcagtgcccactgtgggagaattaacaccactccaaattctttactgattcaatcattttctttcagttcattaattcctgtttacaatgatacaagatacattttcagggctgagttagggtgggaggtgggggttgggtggtagtatataacaaaacatcacactaaaatagtagcctagtttgaccaacattctgtattataaggtctttctataccagtgagttggggagtgcagacagaaggggaataattaaaatggaatttacttagatttgtcagttatcttcatcgatatactttaattttttggacaacttgaaatttaacagttaccggtatttctaattactttaatgcacttggaaaactacccagaacagaccatgatttcttcttgtccaagcaaacaaaaatcaattagtgtcagtttcattctgagcattgttttgttttgcctacaatctgtttaagggcacatgtgacacttattcatacatgtctggcactgcaatgttcctgtttaactaagatgtcataggcctatgtttgcctgaaatgcccgtctcacaaaaaggaaaacacagaacaggatggaagagagtgggaggcatgaggacttggcacgggctggtagacgtgtgggccttacagtggagcaggctggagtctgtgtttacaacttcgtttaaaaaaaaaaaaacccacattgttctgtgtactttctctgctctgactccaagacataaatttgaagttcgaacaaggaaattcgtggagaatttcatgtgtctgctatgctgagcgcaggcagccctaccttccgatggatcgagtcttcttgctctccgtccatgcttggagttgttatgaacaaacatgttgtcagaaacagccaggacgtgtccatccacattcaccgttgttgacaacacaacctgcatatttaaagtaaaaaggagaaagggggtgcagtggaattagtttcacatgaagtagcaaatgcaccaaaattctgttttgccacacttccatttggcaaaggggagatgggacagaacttgggactcaacagagttttctccttctgtaattatgtcaaaactttacagaaaaagtggctgcccttcatccatgcattgtcaagaacctttgctcaaagcacacccatgtaatgaagtggagaaaatgaccatctgcctgctggttccagaaacctggttctctatcaaaagacctggaccgccaccgccagtggagcctccaccacagaaagctggtgtgccatgtggaagctgagatctatacgccagctggaaagtcacttcttcaagctcaggaatgggttcttgcacttcagacaggtcctgacatcatgcccagcattgggatgctggctggtgaattgtctgtggtgttgctgcccagtagagagtggtggcagcgatgcctcgacttttgctgagaagataaggttgccataattcagtgttgaaaatagaggatgtgtagcatctaatgagggtgaggggagaggtggtgtggaacagtggcagaacatgggtttggagtcagggagagctgaattcaaatcccaggcttctgtcccctaacttgcaaccatgatcaaattacttcaccttttctaatctcagtttttcttatctgtaagatataaataacaatgtgtatctcacagtgctgaaatgaggtataatgagatataggcacacatccctagtccaagaatctgaaatccaaaattctccaaaatctaaacctttctgagcactgacatgatgcttaaaggaaatgttcattggatcattttggattttggatttttcagattagggatgctcaaccagtaagtaagtacagaatgcaaatattccaaaacccgaaatcagaagcacttctagatgcaagcattttggataaggaatactcaacctgtaatacatataaaggattcagcacagtgcttggtgtgtgccaaactgggatgagtttgcgtcctaactgctttgcccatgctgggcttgaccagaccataagacagatgacattactcacacacagaggttctcccatggtctaagctcggggggaggtcctaggaggaggcagataggaaataggtaccaacagttataaggcatggtccctaacctaaaagagtttattttctggctggagaatcatagttaacacaggaaacaagtagcacaaagactggtatcaaatcgagctccagcatatgtactgcagatcaggggtgggggagaagctcaaagaggtggatatcagcaaaggctggccaagcatagcagaagggagtggacctgggtggagctcccaccgaatcacttgacccagaagacgaaccaccctagacatgggtctatttctcagttcacatcagttacgcatggccattattattgagaaaaaaaaagaacttattatatacatactcacaaacatgtgtagaccttttgaggaagggcactaaataggtacaaaatgaagagtcgtgtttaaaaatgactcttcctgtctactcccaaattaaaacagttgatattctacttgtaattgtccttccttacttattaaatggagggcagggggcttgatcctgtcgtatttttttttttttttgagatagagtctcactttgttgcataggctagagtgcagtggcaccatcttagcttactgcaacccccacctccagggttaaaacaattctcctgcctcagcttcccaagtagctgggattacagatgcctgccaccatgctcagctaatttttgtattttcagtagagacagggtttcaccatgttggccaggctggtcttgaactcctgacctcaagtgatccacctgcctcggccgcccaaagtgctgggattaccgaagtgagccacagctcccagccctaccttacctctgaatatgaaggaatgaggcagcattttaaaaaccttttattatgaataatttcaagcaaacaaaagaaacaggatagcataatgaatccccagtacttaccattcagcttcaagaattgtcaaaatatcgccattctcatctcagctacagtagaccccttatccaagaggtctatgctctaagaccccagtggatgtctgaaacctcagagaatatcaaaccctatattatgctttttcctatacatacctatgataaagtgtaatttataagttaggcacagtaagacattaatgacaataatatttgaaatagaacaattataaaaagatattgaaataaaagtatataaatgtggcttctctttttttctctcaaaatgtcttattgtactgtaccttgggtaactgaaaccacagaaagtgaagcctccaaagtggacgggggaactactgtttaccaccacccactcccaaccccctactcaacaatgataataatcacaggtttgggtttttttgtaggtaaaatttacatacattgaaatgcacaaatcttagctgtccaatttacactgtgatcaagaagtagactatttccatcttcccaaaaagtcatcttgtgttccctcccagtccatcctacccccaccaccagcaaagcaatactcttctgatttttttctttgccctgaagagttttttgatgacatctttttaagttatatttttagcataataggtttgggaaaatccctaaaacccatgagtccacaaatcatctcatatagtgtcacatcttgaacatggtggtaacatatgcaaaattttacatgaataagtgtcagtcatccaacccaacagataattcactgtgtttctaatatgtgacagggcccagagattcaaagaataaacttaaaggaacctcagttgtcattcagaaaattatcaatataattgctcacaattcaggggtacagcctgtctagcgctgtgtctgttttcaattgtgtccatgttaacatgttagaatctggggaaattccttccagaaagttcctatcatagtggcaaacattaagatggcggcatctatcactccccgtaagtgctcacgttcttatcaaagtgatctcagcaaaacacaaggtcatgttacagtcgaagggagaggcagagcctcatggtcgcaaggttaagatgaacatgaagattgtattgcctaccccccgaaaataataggagaagagagagaagaaagaatcaaaccactcttataaattgtgtgtgtgaatgcattttcaaagacataactgtcatctctggaaaaaacaaaacagaaaacaaggagagggtgctttgggctttaattcttccattttttttttttttttttttttttttttgagacagcgtcttgctctatcacccaggctgaagtgcagtgcagtggcctgatctcagcttaccacaacctctgcctcccaggttcaagcgattctcctgcctcagcctcccgagtggctgagattacaggtacctgccaccacacccagctaatttttgtatttttggggttttaccatgttggccaggctggtctagagcttcttaccttaagtgatcctcccgcctcagcctcccaaagtgctgggattacaggcatgagccaccgcacccagccatgggcattaattcttaatgagctgtcctaggcacactaaggggaacctgggccctgtctgaggattacgtggaggtaaagagccttctctctgaggctgctttaattcactccacaagctccttgtcatactgtccattaatactccccacacattcctgccacaaaatatggggctttcacaagccagctgatttcatcattgtccatttgggtggagtgagacttagttccaaagtgaacatttcccgaatgacataccctgatggttcagatgcacttcattattttctattaacaatagaaataaattttaatctcttgctggctcacgctggcctctcatgacagctagggaattaacctgaattatgtcagtgtccataaaatttattacaagattttaaattatgtccaaatgtatgtgtgtgtgcatgtgtacgtatagatatgaggcaagttccaggttttaatattccaaatatctcagatggtgaggtagctggaagagcctgccaattcaactgaattttcaaaatgtgatggatttaattcataaactccacaacaggaaaccagacctgtttggtggttatttctatacatagagacacacacttaaatactgacttttacatacatttgctttacttctggaagaatgaactacattatacaggtgaagatatatttggtacagtcaaaacttcaaatttaagttccttcactgtttactgatgaacagtgacaacactgatattcgtctatttggagaagttaagatttctgaacgttttaggaccaaaggaagtggaatgcgcattccaacatcatcttactcccaggccttccccttccacaagccaacttctttcccctagtgagtatttcctgggtcacgaaggctgacccttcccatctggaatcaatcagtcaacccctgacaacttcctgaaacacctcactccatttcctgttctctcccccttctcgttttccccctggtttgcttcactcttcaaaactgcaggccacagcagcttaatgttagagggtcaggcacagttagactccaaaacactacacaaggacacctttgaccttcaaaaatctttacatcttagctaaacaaatcaaggtcaacatttcttaccattaccttgttaactatttgtatgcatctctgccaagggtcttctgatcatataaccatcaataccacttattcacctaagatcaactgatctgctttaaaagaagcaaatgtagtatggataaaaggtgccattcggaggtgcctgaaactgaaaatcgccagcattatattagcaaacatacggatagtaatccatacaaaggaacttctatgcctcatcgtctcctgtcacctagacctgataacgtgtcttttctaaggctgtcactctattggcactgccattctgctggcatggccctaaagaatgccaattaggaatacagatgtccataatttgtgtgggatggacccccagtttctgctgctgacactggtgacagttttcatttatttcttagagttgatacatctgtattacagctcaaagcctgcagatctgaaaactaagtcatggtaaatgacagctctcctcaactgatatattgcaatgcaaaagcaacaaccaatttatttaggacaaagtacctttaacccaagtttctgagagagaaatcaggatcaattgaaattgcttgcatttttttctaaataaaagtggttttcgccttctgccattccctattttgctttgatgtgatctctcatttttagtaacaccaactcaacaaacagaccaattggagagtgacggtggtaggttccattttaaatcatttaattatatggcaatgttagttggttatacagaaatagaaacatgaataaaaagtctgtatcttcccatgaaaaatacaagaaagttttaagaacggaatctacaagtacgttagcagtcttctaccagttctcaagaaaaccgatcggctttctcaaattctatttttcttttcattccccaaaagttctcccatgtccctcactccaataatttatacaaagcaggagctgagttgtaaaggagccctttcctgctagtaaaaggccacagtgggggtcacccttcaggtggacacatccgttaatctgcctgaacagctaattttccaatagaggagttatttctttagttatcagaatgatagcatgtgccatggagacttttaccaaactgacttattcctaccctttggttatttttatagcccttctctaaaatgtccttggctttttggaacaccgtgtgtgtatgtgtgtgtgtgtgtgtgtgtgtgtgtgtgttttaagtacttatccttctcaaaactctaactgtatgatttagttgaattacataagccaaaggaatggccagttgggccctactcccagctaggctttttcagctcctacccaggtgtttctacaaagaccctaagtctcatacaaagaggctgaaagaaaaagagaagtcaaaatgaaaaatgtgtggaatcaccaaatgatctgctctttgaaacagacgacaattccaatgtctgcagtcactagagaataattacactggtcagaaacctccccgtatgggccagagtctttgctttgaaaacacaccaagttctaccattagtcagacacagttccccaccctttcaatgagggtcatgcacctcctagctgaatgtggggcctttggtagtttaatctcagtaaagctataacacatcgcatttatagcacactccacattgaagactctgataccctacttatgaatgtgcatacactcagctaaataaaatggtctcgaaaattcctgttattttgccaagagtgggaaaaaaaattctttatgacattttacatctggaaatggaattaaattcatgaagtgcttttcccttataactgttcggttgccatatatgttatttcagctttcccaaagcataactgttatgtgggattttattttccacctgtggaaggaggaaagggacagagaaaccattaaagggacagagaaaatcaagacagacttctggctatggcgagcgaccaagctgcagttccatattgcaaggagaaatacacgtcgggtttttacacaatcccgaattctcatcatggacaaggtgaatctaatgacacagttttgtctaagcctccattaattcaatccaggctaacaactaacaaatgggctactgcagtttgttctgccctaccactttattcttggcacacatattttcaagccagatttaaggcccagattcttctttgttatgggactccagagtctccaaaattacctttaaacacctaccccacaagcatggattttgtcattttctttaaaaggaattcccagaattctcagcaatggctgtttcatattcccgaaggctaaattttctgttcagtgaagaatcaagtcccagacaggagaacacagagttgactgccatagagacagatgtgggaggttctgggttgctccagcagagagaagggactgggcatcaatggcattactcctgagaagacgtgctcttttctttttttttaaaaaaaaatacatatttttaattctgtcaagtttaaactgatatacttgatgacaagaatataaactaaaccaacactggtcaatttactcagtttaaaaaatttcttttaactattttacttttttttttcttgtgtaatttcaacttttattttagattcaaggagtatacatgcaggtttattacacgagtatgttgtgtgacactgcagtttgagatatgaatgatcctgtcacccaggtagtgagcataattcctaataggtagtttttcagccctctcctccttccctttctttccctgctagtaatccctagtgtctattacccccatctttatgtccattggtacccaatgcttagcatccacttacaagtgagaacatgcagtatttggttttctgttcctacatttatttgtttaggatcatggcctccagctgtgtccatggtgctgcaaaggacatgatttcattcttttttgtggttgtgaagtattccatggtgtctatgtaccacattttatctgatccaccattgatgagcatctaggttgattccatgtctttgttattgtgaataatgcagcaatgaacatacaaatgtgcatgtctttcgggtagaacaatttcctttcctttgagtatatacccagcaatgggattgctgggtcaaatgatagtttgattttatttttttcattttaactagagaagatactttcttaaggaaccagacagcactgtgtttccatcagtcactgggtatttattgagacccctaggcgctctgctacatgcaatggaagtttataggaaacattgtcgcagccttaaggagctcaccctacggtggacaaagcatagcaaacactagacataatcagaaaatattattgcacggtaatctgtcattgaggattaaactgtggccactgtgtactctaggggcccaacgctgggaagaatcagcataaattgaaggctatcacagccattttcatcaagaaagtgagatttaagaacagaccttgaagaactgggggagttacacaacttgagattactgagatgattattctggcacctaagaagaattctaattggcataaaggaagtagtatgcccaagagctctccgttggtgtattttggctaatttggctttagagtaaacaccttctagagcttacttttaaaaacccaattgagaaatccagtggcaattaaaaaaaaaaaaaccagcttttcatgtcattgaggagtgtgaagatcattcatctgctttgcaatactgaatgtctcttcatcttaaaggccacagatacttgctactcccaccctagctcattttattccattgaacccattacttttcccaactaaaatttgtgccaagtgggatggttacggtcaagggcaatattttactagcaaaagttttgagagccacaggggagccataacatatttgatgcagttctttgtttggcttgggcattcttgtctaggaagctctagccccagggacaacctgaatcacctgtggcctatcaaaaatcaggagcacacaggccctggaagcagctgaggaactatgcactcttattgcaggactaagaacactttgctttccaggaagttctgcattcgatagtcctggaatgggttcagcggcaggtttgtgtccaaattagagtcccttaaaatatttgagcatttagattgtgtttccagctaactgcagtctgacatatcctctcccaaaagtttcccaggcaactactggttttcatttctcaccttatacttttacaaagagctcaaaactcatttcctgggtgagtcagtcaagatttctgtcatcctgattcttgtccccattcaagacaccaaaatttaggggtggaggcagcagaaggttctaacagcagagaaaagcctgaagtcactccagagagccttccccaagcttacatcattggactaagagaaagatcctccgaccctccacagtttttttttttttttctgactccaaatagataattatgatttcttaactaggactatctggtttgttttatcatcagataatggactcacctgctgatcagagaggccataagtcaagtgatttccattatgtgctttaaaactgctgctcagtagcactccggatttcaaatggtagatgagatcacagagcagctggagcagctctcacactgaaagatgtgaactgaagaaacctgcaggcagctggagctgtattaaatttttaccatttggagttaatttaaactctcgtttccctctccaacgggtgtgagagaaacattcaacattttttatttaaggaaaatagatggtggtgccattaaaaagttttatataagagctgggggtttaaaaatcataaggggttgctggatggagcttggctcttttccaagacatgagtagccgtgccctttgctctcacgtcgtttagtaaacccgactaatggctcgtgcccagctgtgtgtacgaggtgtctttgtcagagccattcatttgccccatcgttcttctgcagttgtcgcatccagcatgttgcagcaacaggcacgaggcctctcacatgatccaaccaccctgtggacgccagtcagtcccaacggggcctcacttcctttctccattcccatccggcagatctttctgcccttggttcccttctctcccacaccgggcgcttcttcttgctttctcacaggcctggcagatgcgccaggtgtgttttcaaaaagctccaaccccttccctcgaacccttcaaatccccatcaagatgcccttccagcaggcccatcctgggcttgcatgcaacctggaaccaactcagcactgaaggcttccccagcctgactcctggaatgatttttctttcattagaaatgtgtctgtctggccaggtgtggtggctcacacctgtaatcccaacaatttgcgaagccaaggcgagtgaatcacttgagcccaggggttcgagaccagcctgggcaacatagcaaaaccctgtctctacaaaaaacacaaaaattagctggttttttgtgttgcatgcacctgtagtcccagctacttgggagattgaagcaggaggatcacttatgcccaaaagaccaaggctgtagtgaaccaatattgcaccactgcactccagcctcagtgacagagtaagaccctgtctgtaaaaaaagaaagaaaaagaaatatatctgtctttccatatctactgacatatctcttgaggccaaggatgacacgacctgcacatatatctcagtcttctccctagcatgactctgtaaattaaaaatgattattctggtggacctaatctaaaaagggagtaatttagggggtaaatttgagacacccaagggtctctcatgaaagttcagcaaattgaggtaagcatctttatcttaattacaagtaagctgtcgattagagtgaagttcattaaaaactaacctgcacattgtgcacatgtaccctaaaacttaaagtataataataataaaataaaaaataaaaaaagtgagaaaactaaaaaaaaaatgattaggcaggatgaagagaggttggttaatgggtacaaacatacagttagaaggtgtaacgtctaatatttgatagagtggggtgactacagttaacaaccatgtattgtacatttcaaaccagctaaaagagagaacttgcaatattcccaacgtagagaaatgatcaattctcatgatgatggatgactatggataccctaactactctgacttgattattacacattcaatgcatgcaacaaaatattgcatgtaccccataaagattgcaaacattatatatcaataaaaaaaatttaggctgggtgtggtggttcacatttgcaatctcagcattttgagaggttgagacgggtgggtgaatcacttgatctcaggagttcaagaccagcctgggcaatgtggcaaaaccccgtctcgataaaaaatacaaaaattagccaggcctgatggcacacacccgtagtcctagctacttaaggggctgaggtggggagatggcttgagctggagaggcagaggttgcagtgagccaagattgtaccactgcactccagcttgagcaaaagagtgacatcttgtctcaaaaaaaaaaaaaaaaaaagttaatgatttttgaggttggactgtgtcaaggatctcaattccagaatgctactacatctgaaacgacctaatatacacgcttgtgctgcccacaggatagagaacaccccaatgatcatgtatttttaaaatgaagtccttttgaggcagagggtaaaaactcagcattcaggcctctaagcttcccagtctcaagtagatctgctgacatttgtgtcctataataggtgatgctgtggaaagctcagaaaactattcataagagcatccacacttactgttactataatggtgagtatcatttagctccacaaacatctatacttgaccaagctgctgagttccagcaagcaccacaaacacagctggcactgtacggaagcccactgcttccaggaaagtcacctgaatgtcacagagaagcagacttgagctatgcaaaccactcatttattttttatatccttccactaggatgcaagcccctcaagggcaggaattttatgatttgctctctgctgtatctccagcacctaggatagtgcctggcacacagaatttcatcagtaatattggctgggtgcatgaataaatgaatgagtacctctatgttttcactatgacttggaatagacccagccatcctatctatgacagtgaattagcaacaataagctctaaattattgtcaattcctagtgatttttagaatgtgaatgtgggaaatgaccgtgtgcctgacttcctcttcctagcttgattttcttttggattttacaactgccttcactccacccacacaagcagaaagaaataaagaatgggattcattatgtcttaacaggcctgtcagcttaaactagacatacatttcttttcttttccttcattgagctgttaatctgggtgtttcacctaattgttccatttcaaggagggcagaagtgattttccgcatgcatgacccatggatttagatactttgaggagccctggaaatcttaagtttgttttctcttttttccttttttcttttgctctcttaaaaatttatttaataataatccattattttaatcaattattttaataattaatctatttatttaataataatctacagaatgcctgccattatgctagacattggcaatacatacaaaaataaataaaacatatcgattgccttcaagcagcacacagtctattggacagacaaacaagaactgcaagatgatgtgataactggcagggtaggggcctgcagagaagggtgtgtcagcacagacccaggaaccaacagctccatttggaagagtcagaaaatgcatcactaaggtggtgacattcagctgtagccttaaagcatgaaaaggagtcacaagttggagaggggtgaagggttcccaggcagaggggtgaacatatggaaagcttcctagatggaacagaaatcagagatgggtgtgtggtgagcagcaggcagatgagaacttctgggacaggcatggcaggttttcctggtaggcagaggctgagtggccttctcagccatgcctttttaaatccaggctttgtgtccatggacagttgatacccattttagtaggtgtatgtatttaatttttatggatacgtagcagacatatatatttatagggttcatgagatattctgacacaggcatacaatgcacagtaatcacatcagggtaaatgcggcatcctcatgacattttgtctgggtttttttttttttttttttcctttttgtggagaacaaggtctcactacattccccaagcaggtctcaaactcctgggctcaagttgtcctcctgcctctgccttcctaagagctgggattacaggcatgagccactgtgcctagcaccctgacatattttaagaggtaactctggcattcatgctgaggacgggttagacaggggaggaataaagacaggggctacagccgggcgcggtggctcacgcctgtaatcccagcactttgggaggcccaggcgggtggatcacgaggtcaggaaatcgagaccatcctggctaacacggtgaaaccccgtttctactaaaaatacaaaaaaaaatagccaggcgtggtggcaagtgcctgtaatcccagctactctggaggctgaggcaggagaatggcgtgaatccgggaggcggagtttgcagtgagccgagatcgcgccactgcactccagcctgggcgacagagcgagactccgtctcaaaaacaaacaaacaaacaaacaaaaacagaaaaaaaaagacaggggctgtggcagcttttgaggagagaggtggatttaatagatacttaggaggaggcagcgacactttgacaatgaaagaggagggaatgaatcagggaacaagcagtgagttctgttttgaacacgtgctcattagtcatccagggaagatgcccagaaggaagctagcattatatgcctgcagctctaaagaagtctgagaatatggatacagaaatcatccaggaacagagagcatttgaagccaagagagtggatgagagatcaccaggaaaagtcctaagtggacagatccccactgttaaaggttaccttacatgaaggatgcctattgggctttaaatgaattccatttctttagactagaggtccatggaagcttgagatatttcaagtggtctggagacccctgaaattttaattaaaactttaaacgtagtatttcaatgggatacagactatagcttttaccagattcttaaaggggtctgggccaaaaaaaaaaaaaaaaggttaaaaagggttaaaagggttaaaaccctttgtgtttcagtattttttatgtcctataatacttaggacttgaatgaaattaaagagaggattggttcaagcttgaaaataaccttgatgtaacaattttggtctgattggatgatttttgtaaaaagaatccaggttccaccagtgtttgggggtaagggaaggaggggggagagttttatagagttcaggatttgggtagaaatttttcatatttctattccattcagatcaaatcctcacgaaagaatccttcatattaaatttatgtttgatcatatcacaaaagtagagaattgaaggaattgtgtatatggctctaaatgattgtctttgtccttctgagtgagatacatactctaggaatttctgaaagtcaccatccattcagatgactgtcctaccaccatgagtatgcactctctctggttttgtttcatatttggaacctgaactaagtttcttacttgactatgatagcatattgctaagcctgtcttcataataaccttctctatgagagagctttcattgaaggttatattcttagtagaatctaagtacagtataaaaattgccaattcttttgtgcaccaaaggacactatcaagaaagtgaatgacaactcatggaataggagaaaatattttcaaatcacatgtttgagaaggagccagtatcctgaatatataaagaactcttacagctcaacaataaaatgacaaataatgcaactaaaaaatgggcaaaggatttaaatagacacttcctcaaagaagatatacaaatgagcaataagcacatgaaaagatgctcaaaatcactaatcattaaggaaatgcaaatcaaaaccacaatgagatacctcttcacacccataggatgactagaatttttttaaaacagaaaatcccaagtgttggcgaggaattgacaccttcacagattaccagtggaaatgtaaaatggtgcaaccactatggaaaacagtttggcagttcctcaaaaacttaaagaaacaattaccatatgacccagaaattctgttcttagttgtatacccaagagaattaaaaacatatgtcacacagtgaaactgtgcacaaatactaacagtgtcattgtttgtaatagccaaaaagtgagacaatccaaacgtccactaactgactaatgaattttaaaatgtgatatatccatacaatggaatagtcaagctgtaaaaaggaatgaagtattgatacatgctatcacatagaggaactttaaaaacattatgctaacagacaaaaacagacacaaaagccacatattgtatgattctatttatgttaaattcccagaatagacaaacctatagagacagaaagtagattagtggttgccagtgaatggggagaaacaggaactgggagacatgagatttcttcttgggataatagaaaagttctggaattagatagtggtgctggttgtacaacactttgaatgtactaaaaaccactggaccctgcacttttaaatggttaaaatggtgaattgtatgttatatgaattttatctcagtaaaaaatgcaaacaaattgccagttgactttagctctacccttgaaataagacaatcagagaatccacaaagtctaaacaattctttttgcccttgtctttgcaaaagtcaaatactttcacataggatgagaattctatatcattttgagatcaacaatatttattctatgccaatgaaaaactcaggcaccatgaaaaccccatttaagtaaataactaaagaagtagaggaaatattagcatgcatttgctttgtgaatatattcctaaactttgggagaaagaaaatgacaaggcattctcctacaatggaagcctcttcacatttacaagagtatcctcaaattctcaaatttaaaactctttgaaagtgctggtagaaagtaggatggaataaaaatccaaactgccaactctcttttctctgcctctgtatcttctagaaataaagctaagctttggtcatggaggcactttggaattcttttgaattttactcttctttggactgaaattatttacatttttatttggaatattgagcacagtgaatttccaccatgcacgaagttcctgtttgatcccccaagaaggctggttttatttctgtttttcttcatacaagaaagtaggcccagaagcggtggctcacacctgtaatcccagcaatttagaaggctgagtcgggtggatcacttgaggtctggagtttcagaccagcctggccaacatgtcaaaacctcatctctactaaaaatacaaaaattagccaggcgtggtggcatgtgcctgtagtcccagctactcaggagggtgaggcaggagaattgcttgaacccaggaggaggaggttgcagtgagccaagatcataccattgcactccagcctgggtgacagagcgagactccatctcaaaacaaacaaacaaacaaacaaacaaacaaaaaaaggcagggaaacagcctgcccaagagagaaaaagtctccaactttttaaagggaggctggtaatagtgttaagtattgtaatgaaaaatgttcctgtcacagcaagattgatagccatgatggggttaaaaaatactactactagtttttttttcaaagtaactctcagtagcccttgtgtatggccatcttcctgttaactcttgaatggctctgctcctaaacatctgtctgattgtggcctaaccacagaagctctccagcaggaccagctacataatttgtagggttcaataaaaaatgaatgtcacattccttgttcaaaaattattcagggtccgatgtggtagctcacacctgtaaccccagcactttgagaggcctaggtgggtgaatcacctgaggtcaggggtttgagaccaacctgggcaacatggcaaaaccccatctctaccaaaaaatacaaaaattagcagggcatgatggtgcacacctgtagtcctagctactcaggagggtgaggcatgagaatcccttgagcccaggaggcggagtttgcagtgagccaagatcacaccactgctctccagcctaggtgacagagtgagaccctgcctcaaaaaaaaaaaaaaaaaaaaaaaaaaaaaaaaaattattcagaatttcaagaagacaacagcaaaagataaacctagcagctgcaacgtgtcgcatgcccacagtgtgctggaaagagtttgatcaaacaactcctcccggctcctggctccgggctttaccacctacttactgtgattaggggcaagttatttaaccttccagaacctcgcttgtctcaggcgaaacatgaggctaaggttccccatctctctcatggctgcaaggatttactttttgaagtctcaagcttgcatactatcgtttaacatgtttttaatttttctatggaaaaggaggtgccacatctagaacggggtgtgagtggcaggaaagccatttggtgaattaaatatgggtccttcaaagctcaaggaagggggccgagaggagctgctcttgctttcgtctccagcctgatacactttgcctcgctctgtttttattagctcgtctcctcagtacatcagtggcaagggtgatgaaaccggtggcagatttaactgccaggcagctgggtcaccgtcccgtgggtcttgttgtcacgctgcgatcttaaagtgaccacgctgcttgggctgctgccttccagaaggctcagagagcgaccactgaatagttaatcggtggaaaagggaagacaggagctgttgcttgcagaaaatacagagaagctgctctgaaaaatcccaaggtggctgaatatcaagaacatggttcctgctgtgggcagctgtgtgtgcagtgggcagcccgagggctgaaaatcaaatctccagcaccggttggtgcctctccccatagggctttggcaatgggggcagaaagcttaaacactacaagatgaagaaactctcaatgctagtggctgagggtcatcgtttaccattgtcttttttattgttaggagtagcagtgaatagtaatttttaaagaaaaagaaaataaaaagagtgagaaggagagagaaaacaggatgacttatttaacaggaaagatctgcagggccccttacctgaaaccgtctcatgtcccttgggtttcctgctgttttcaaacaattctgattgcacttgaggaaaaattttaaaaagaatctgtgaagagaaagcgatgtgttacatttttcagtaaacatttttaaagggagaatatagctgcattccattagatttgatttgacagcgattctatttcagatctggggaatttcaacctgccctgcctgtgaaggaacactgctgaccctctgcaatttgcaaatttggatgttttcaatctcaagcccagcacccgcttccccatcactgtgggggattgttaagtggttcacaaggtgggctttggtttgtacactggcccccggagtttgtagagcactcgttctggaaaatttttttaaaaaggcttcaaatgcagcagtgacccctgctgtacagaaagtcttgctccagggttaaaaatggcaggacccggccccagaatcccagggcgtctcgtctgtgtggctctccactggccccagacaccttcatgctcatacgtgaaggtggcctgatatattcaactaatgtttacaaaatcagaaaatgatatgttatcttccaaagacaaagtccatctgtgcaggtatatgccagagtttttatgattaataagaagtgtgaatatcctctcagttcatgtatagattattcagagaaacatgaaagcacagaatcatggtctgaggttagcatttgtcatatatatttcttgaagccaatattctctcttaaatggcctatctgtgcaattttaaaattgggcatctttcatcaggcaactacgttaaccaagaaaaatggcagaagtggccttttcagcaactcacctagttaatgtttgaaaatttgtttcaaaatacagtaagtttttcatttatttcacttgcagagtcctttcccttaaaaaaaaaaaaaatccagcttttgcagtgttaaagtcccaggtgagctaggcctatttccctttctgttactatgacaacgaaattttaccgcagtcccaaagtcccttcagaactctcacatccatgtcttgaattagaactttaaaggaaaagatatacattttcctcaggatttacaaacaaaaataagtagaaatcaacaatgcttccaaaaattctattctaaagcaatggttggtgaaatgttctcattgcgacgttctgatttttattttttgtttaacaatcacacaaaagaattagatagctctccaattaaatgtatttatcactttaaaaaactgatgagtagataaacagtaaatgataaaggaggagagaaggggaattggcttttcagagtattttctgtgtttgaggctcttttactctgtttgctggaaatatttggccacatgctcccatgaataaggttgagtgtgaatttgaaagcaacagctaaatatttttttcatgattttataacatctgcttttcacttctctctttcaatcttttatagggtgggtgggaggttgggctttgcttcctgtgccccggaggtgttggggtctttatggaagagacctgcggaaggataaggcagagaaaatgttgtgcgtggctgtccgacctcagtgttcaaattcacaacctgccgctgctttctgaacggcagtagcatctctgcccgggtcgtcagagtgcgttagaaaggagaattgcttttatgtaagtaaagactgatcagaattcaaacattttatttcttgaagggtaaacatcccctccgtttgtacactcgtagcagagtcagccacggacactcacaatgcttgcaaatattgccttttcccacttgtgtgtgtttctgaacaatagcccccgctgcaccccacactggccctcaaccactcccagcggcaatttacgacttacatttttcccctgctaaacccaaatggagggctttttctcatttagtccttgatttctggaaagttttgccacaactgtgctccttgtaatgtgttctgtgtgtgttagactacccccactccccgctccaaaatgtatctggtgaaaacattaatgttcatgaaggcattattatatgaatggtgtggtaggtggaaaagtgcaaaagagataaatgtttacataaaatcaaattgatttagggaaacatggagcctgctgaaaggctttattcattttaaattaggacccttaacagtgatttggatggaaaacacctagtttgactctttgcttgtctggggggctgaatttgtaacctacacagccccgtgcactctgaggacttagcactgggttcacgaaggagaaggggaggttaagtgggaggaggaagagggaggtgagtgagagaagacagagacagaaagttctcttgcattacatagtatcttctaaaagaaggtattgctacttctaaatggcttgcaccagaaattatggcctggattttttaatatatggatctaaaaattaattaaaagaaattctggggcttactgacatctccatttttttttcctcttactttaactggtgtcttctggttctccgccctccaccctctccatccaccatgctcagggtcttgatacaaaaccttcactaatcataccatccatttagccacggggtaacttacagggaacaaattctctccaaatcccctgggtctagatccctcctgaagccagagctgcctggaaaatgtcggcactctccactaagaaacgggaaacccagataaattatgagattcagaccaaatgtgcagattatcaggatgaaatctatttccactttctccaaacaatgttgacaacgtgaatatcataaccacggtgcatgctacacacgacaaagcttctgatcccattccttaagagcgaacactaacaatcacaggtttatcctcatgttacaggatgaagaggatcggaaagaggagtcaacatggcaactcaaaccttcagatggcaatccggtccctaggtcagtggggcaggagaatgtaccagagcattcctttactctacagatccattggaaatgccccaagggttagccttgacctgtggctaccaactgaccacaggaccaagttacctcacattcattctctcttaacgaaggagttgaatgggatctgtagggttctttctaacattaatattttatgactgcaaagaaaaatgtacagagttgagaaccttccttccaaaaagggttacagtggggaaagaaaccactgaaaacaagagaccatgacttattgaaacctgagtgggtgtggcagaggtgggagtgagggtttctgagacgtaggtgaaacccactgagataaaactgtgaaaaataaataagtggggacagctgactggtgggaaataggacatccagggtgacgccgtgcccagagtgggcggtgccctgaggctgatgggcagattgttgggtgagttgcactgtccctttaggaccctttctctctgcttctgaggcagggagggtgcttcaggaatatcacagatcagagccacctacataacctctaacaatcctgcacggtccagcagctgaagggtacaggggtcacggagtggagggaaacacagtttgctgagtagccactctgcccaatacacaacactgtatttcattctcacaacaaccccatgggtgacgaatcatcctacggctgggaaaaacgaaggcctcaagaatttaagaaacttgccaaagatcataagcttgtaagtggtgaacacaaggattggagcctggatctttgtggcaacaagctccatgtggtgttgcatgtttcctgcaccaatgacactgtgaagattgctgcacagctgggtgaatatactagaaaccatcgcattatacactttgaatgggtttcctttgtaatatgtaagttatatctcaatacacctgttattaaaaaaacacttcaaaatggtctaaaaatggcacacacacacacacacacacacacacacacaacaggaagaataaatcaggagaaaaaaaaaaagtgaaagattcttgcttcttgaagagactgcagtgtcccaagttgaaatcagtagtcaaagatagacatatggaaacatggaactaaatgcttaatattgaaaactgctgaattcatttatttactcatttgatcaatatgtattgtgctctgtgtgccagaaagttcaggcacagtggcaagcaaagtccttggccccaaggatcccccgaccaaactattcaaatacgtttctccagattctgaaatgagtctggagacccctgaatctattactgaataccctcctttccaatctctaacatactggaatatcctgtactattcaggaatacagtaaaagtgtgtaggtggcttccacatgtcttccgccatcccacccatctcaaacgagatgcacaaatacagtgcagagttaaggttccgtggtggggacaggaggcttgaaatcacaggaaaggtaactacttaatattcttgccagactctggaattctcatcaatggtctagcacaaaacccagcacaatatttctccaggatttatggaagaggccattcaatttacctccaaattggaatacaagatctagttcctccttaaaatttttaatacaaaagaagtccataaggccaggtgcggtggctcactcctgtaatcccagcactttgggaggctgaggtaggagtatcacgagatcaagagatcgagaccatcctgaccaacgtggtgaagccccatctctactaaaaatacaaaaatcagctgggcgtggtggcatgcacctgtagtcccagctactcaggaagctgaggcaggagaatcgcttgaacctgggaggtggaggttgcagtgagccgagatcacgccactgcactccaacctggtgacaaagtgagaccccgtcagaaaaaaaaataaatgggaattcacatagaaggaatgtgaacttagtagtagttaacagctaccattatacagaacctgtctgtatacaaaataatatgcaaaatgcctttcactctgaaaacttagttccttactcccttaaaaaagaatctaattctgcctaccctggaaacaacttctgctatgataatggccacattttatacatcacagggatgagaacaccccaggctctccaaagaccaagagaggggatgctgtatctggttctctttctctgccatgatggtcacataagcaggctaggtcactaaaggctgagtcaaacgtacagttgatatggcctcacagaccacatagggacttaaacacgtgtgttcattgattttgcagaagacactttctgtctggattagctgttaaacctccttgtttttagcccaataaattaaaatacaattgagtttcattgtttgtgcatgcctctgaaaaggagatggcccatttcccttaaaacactctcataccatttctgagaactatgcaatacagggacaggctgggtcatagaatcacatttgaaaggaatgggcagttgcctctcttcttccaggatcctctccacaagtttacatcctttgggcgattaggcaatccaagctctcacaccagactgagaagcctactgggtggccacacccatgagttcattttctcactctgagaatggccctcatagcaactcactctgcttcgtatggtaagaaaactcgcaagtgattgctttccacttgagaccagagaaaatcttaacggtggtgttccagttgtaatctagatcttaactggaatatcttctttgacccttccaacaacagagaatattctttcctccttcaagatcccccagcagagtctacacccaggcagccctagggaaggtgaaggttagcagtgggacccagccttggcctggagatgaagtgccctggatacatctattggttgttgaggtgttagcccaggctacaaagggccctgaagcttttaagatcttgtgaagactctgactaaagtccacaagaatgaaaagactccaggaggtcaagctcccaatgggctcttgttacaccctacagtaacttggtgatgacgcatctgagaacacttggcttagtatttgagatctgcttggcaagatggtggctagcacaaaagcccaagaagattcaaggaaaggaaagatgacttaatagttttgacttactggcttctttaggcttaaacgaaatgaagtttaaactcatttttgtaagctgatgttctaccgaatccatttagttaaacaatccctcaaactgtaaaaataaacacatgaacagaagaggtatagaatctttaatctccacagacattcctaaggcagggacttattaccattaaggcttgttcacccagattatttcaataaaagcccatttaagatctgaaaaatttaactttacagaaatgttttaagcaataaattttcttatttccaactacactcaacttctcaaattcctcttgcctaaaagactatgatgaaacagtaattataattaataatagcctatattcattgagcttatattatttgccaggtatgatttcatgtaatcttctcaactttgggaggaggaaaattaacatctccaccttacagaggagataaacaagattcagaaaggttaaatgacttgcccaagtcaaaacagctagtaagcagaaaaaataagagtggaagtagtctgtctgactcttagcaaaatgctggtctgttgggagcttggccaagctttggaaaaaaaaaaaaaggctgaacatgttgccacgcggcactgtttcacaggacaactgccttactgatccacatgggggatcctgtcattgtcttcctcttctgctggaataagagtggagtccttcatgttgcaaaataaaacaagcaaacaaataaaaatgtctaccattcctatcagggagtgcactctctagaagttctgtgactattttagaggacgcaaaggaaaagataaataaatctatcagatattcagaaaacaaaacttctcaagaacccaaattgtccaaagagatggcatagcccaaatagcttcagccttttggaaaaaaaaaaaaaaaaaaggttactcaagtgcatgaggaagattcaggaccatttgtctatgaagacgatgggagggaaaaagctgaaaatcaaacgtggaatgaaagaagttgaattaaatcttggaaaacattttttgggaatcaagtcaccaaggctaaattttggaagcatttacccaagggacagagcaggatctccataatggagatttttaaatagaccagcaagctaatgcctttggtagcagataatttcagtccaatatgcggcagctaactggggtgtccataccaagcccacgtgatttcatagcttctacagtggcaatgatgatgatgattcaatttttactgtaaaaattagggactttcagtaacaattaaagaccttatggccagacgcagtggctcacatctgtaatcctagcactttgggggccgaggcagtctgatcacttgagatcaggagcttgagaccagcctagtcaacatggtaaaacccagtctctactacatatacaaaaattagccaggtgtggtggtgcacacctgtaatcctagcgacttgggaggctgagacacgagaatcacttgaatctgggaggcggagtttgtagtgagccaagattgtgccactgcactccagcctgggctacagagtgagactctatctcaaaaaaaaaaaaaaaagcaaaaaacccaaaaaaaacaaaaaacaacaacaacaaaaaaacacttttcaaggccaatagtgaggactagttattcatgcaaagtgtttgggtaaatgcctggtacaaagtaagtctgcttcttcaccttttgctacacatacgtatgatcccttcccatgtattgcccctttctcccccaccacattttaaaacagcccattttccagacaaaattattccagaaggagctgtcacgaatttaaatctggtcctctctgccctgcttatctctccaatattaatatatactacactggaagaacttcccttaatttttaagagagagatagtaaaagaaaaaaaaaccacacatgtcattaatccactctcacagatagtaggggagaaaacaacatcaaaaacacaaaaaatggtcgatgggagtcctcattcctgttttcagtaaactctggccagcaaaaaattcagagctacccacacaatatgctggcttctgactggcaacaggccccatcgagtcactttctattccatgctcaagtccctggaagtggcatttcagtttggcaagagctccttcatcactcaacacactgccttctgagtagaatctgctgcattcatttagacatcaggaaggagctacttcccccactatgtaaatctgactccctgactccataccgatagacttcatttcaaaggaatttcattatttcctctgaagggaatgtctcccatagcccaagtggcaagcagttgactgtaaacggctgctgaagtgcaaaaacaaggggccaatttgattctccacttatttctgattggtaactacagtttctgaggacctggggttagatgttgtgaggtttttgtgtgtttgtggtttggggttttttttttttttatccccccttctatattcagacgcatcttcattctgctgaattctattcctcgacaccatgaggctcacagggaaaaaaatctctgaggaaaagtccttgtttttgtactcagataaaaatctgacaccattaatgaaaataataattgaactctttgggcttgaattggaatgagacacacactaagagcatgtttgtaattctaattgttctcacaaaatgtctttggagggctctttgcaaagcacaagtttccatcctttcctttttggtaaaagaaacaacccatgtcctcttctttgcccttatcctttcctctgtcttctcatccagaaaagaaaaaagaactcagcaaaactgaatcatattatggacttccttgagaaaaaaatctttccgtgagacttcagaatcagaatacaaatctatttcccttgccagtaccatgactctcgggtgaaggagagaaatgaagttattagtcagccatcagcttaatgggtcctcaccgtcccatttcctcagcaccccttccccatccttcccctccccctcccattctctgccctcccggcagagctcatctatgctaggctgagcagtgaacaccaattacacccagagccctttgctgctgcctggtccgctggttttactgttttgccagatggttgaggccaatgtgtaaaactctctaccctaccattaattcataactcggtaataactttcccacgactccaggaaattgaaatggagtgcaaatgtggagatttggaaagggaatcaaggttggacaactatttcacacctgccagaacagataccagtgagacaaaaagaaacccttatttacccaggctggagcattactttccctgaactaaggcagaatgacgcatcatgcaatgttggagaaagtggcggacaaagttcagagtgtgggcttctcctggcatcattttctctctgcagttttcagctttctacctatcgcaactatgggttcactctccaatgaccttgagattgtgcatctatgtaatgttatattcttatgacagattcatagattagcagatatgagtgcattctcttgctaagacaggacaccatccaatgtttgttagcatcattaaactaaaactgacttttcacctgctcccataccatatgcagctgcaaatttctaaattaaactatgaagccatgcataaatttacatatattacagactagcctctccatttaacatgcaaatgtactccaatgtttcagaacaccttctgtcgctaattaatttgctgaattataattagactaatcctgcataattaataagcacagatttttttttaatttgtaagcagcttgaggagatcattcacttccttctataaactgctaagtaagtgttaaaaaaaatctggaaagaacatgtgtgaaaaggtatgtttgatgtcgcatacaaactcaaactagcgtggaagatacagaagtcagtattgataaaggtacatatttgaagccaacattcaaacaatcaaaaaaaaatcatatccagaggatggggtctaattctccctttgtctccttgtatataacgttttattctttgccttctatccgtcggatcttccaagatcacagaggcgggaaaggattaaagtaaccgtatgttgtattaggagagataatgatattaacactccactgtatatcaaaacactctgtgcatgctgggtgcttataagctcctttgatggtatttggaatcattttcattttggctgccaaaaacacccgagatccatctagtggaaacaattaagttccattaggactgtatccattcggtaattattacaatgaagggtccctctttcatgctggagagtggagtctcaaagaaaagtatgcatctgtgcactgaaaaatgtgaaaactatagagttttccaaccaagcatcaagcttcattttgactcccaaaaataaaccaggatcagcagagctcaaggtttgggtaggtcacttgttagaaaattcagagcagggtgggaatctggaagggcaagggaagcttagtggtcatgcaagttgaggaagactccagaaagaaagtaggaaatgcatgttctggcaaggagaagtcagtcaaccttcaaagagaggagaaatataattttagagcaaatagagagctccctggcccttccactcagcaaagtcactatactatcagtggccaaaagattaagtcaaaaagatgaagccatttgaaatgtgtttagctttctattaattcagttttttatagtgagtctataaaaagaaatttctgaagaatggaaaccattttcccaggctcattactgtcttaaatacaccttctcaataccaggcagccaaaaaaaaatttttttttaaacaaagctacaagataagctagcttgggagttgagaaagttgaaaagtacaccagcacctcggaggctgttggccaaagccgggagcagatgccaggggtactgtttctgcttcttccctgaaagatgttcatgtgagctgccttctcttctccttatctggaaggagaacccagcaacctcctggggctatctattgcaacaactaactcaagtgcaaaaaatattttgaaagcacctggaaaaggctgtcacaggttttcagagttaagcaatgctattacttgggtagtttggaaacataacacttttggagagtttttatatgccaaaccatagcttttgcatcagtacccatctaaagagattaaatggttcaggaatttttttttttaagcctcaaggaaaaagagctttctgtgtttctagtagtttcttgaaggaacatgacagcagctggaataataagactaataagaggccaaaattattttctctcaaaagaatacacaaagggtcatggaaatctttaataatgtcctcacctttcaggaaaaatcatttgaaagtattatgcttttctttcagattcctcatatcccgttttgagtggttataataggaggcctggtttctctgtagtcaggaacatgtgcacgtctgtttttataaagcaagaaagtgcttaatggctaaactcacagggtgaaatggaggctttcgccacttcctccataaagcactggcctgagactagagcagaattgagagtcagaaaaagctaggcaggtccttcaagcaagtcccacctattgacaggcaagaggttttgctgaagttgggtttggggttgtgttttgtttggctattttcttcagctttgcctacccaatttcaaactatgtactagtgagagcaggtggagagaaagcgattgtgacccacgcagagttagttagcttttgagtaattcctaatcagctatgagggagaaagaaatttggtggcatttaagcaataaggtgtaaagcagttagttaacaaagctgcactttggctaatggatttttttttttcacctaatatacacattccaggaaatttctctaattttatattttggcaggaggattttcctccattcacctcacttctagtttattcttgtgattcagtctctctgcctcctcctttctcacctatctttgctctctcccaagtttccaaattctgaatgatgtagtgtgctttttttatgtgctacctaaaagttggtgggggtggggagcagtaaattgggaagaagggatgactgaaatagagaaaccgagatggtaattacagctaggctcaattttatctgaaaactatggtggcttgcctccatttcagccatgaagatccacatttacagtacatataacctttgtgccaaaaaaaggaaaaaagaaagcacctgtaggctaacaggtagcagttggtacctatggaattatcattggctattaacactgggtcaggtatcatattagccactttcagatgcatttgccaaacccatgtaaaaatataaaaccaggtatttcaatattctgtcattccctaagcaaaacagattttcttatattactcatagtagagtcagccgactttcattagaatttttttaactttctttttttttccttaaagaagaactaaacctagatgatataaaagagaaactgggacaaaaatcaggtcaagaatttgatacaaaaggcattcagataaggctaataatattcccgagtgtagtcaacagagcagacaatgatcacatcggtctaagctctacccaacccctatatctgtacaagattccaggaatcaggaatcagttatttgttctttttgtcattcaaactttattgagcctaaagcctctattaactctatgggaattatcaactttttggaggtttccacatcttagtaccaaaaatgaaatctttcttttaaatataccacaagagaatgttatctgtttcacgtttctttattctctgtaaccccattgcattttgtgctaactctggtcatcttgcagaggacactacctaattaatttttactttgctcctaagtagatgtccagaatctcttctttcattttctctttaaaaaattgctcctcaaacgaaacgtctcatgggagaaccagagcttacaccagacctgagcacgctcccattgagaacaggcgcagcccctgggcactgcttctgtgcacctggaatttctaatctttcttcccatgccatatcacattattgctcagaaatatgctggattcttggaacaaggtgaaactgagccaccttgtttcaaaaatggaggctaggcatgaaatctcccatctcatttggagtcactaggatttctcactccaggttcaaagaaaggctcaatgtaaatggggcagattcatgggactcccataaatcagccccactttgctgaaaaccagaacctgagtttatgttgaagtttcaaaagtgcttggctgagcccagcccaaacttcaactttccaaataacttccaaactgatgaggctgtttttgcttaaaaaaaaaaaacaaacaaaaaaaacacctggttttatgtttcacaatgttttataaatctgcatttataaatctgcataatttctaaaaattagcatttattttaggtacttattcctacctttcatcaaatgacattgattctcaaagcctggtgtggtagaaatgtgtttctacacagtacgtttacttaagatcatataataaggatgagtcaaataagaaaagctttcttgagaaaaagaatgtggggcttttagatatctacatagatcctaaactttaaaatagttcagccacccatttcctctgccagaacagatatcattattaagtcaacacactcacatccatatatttcataaaaggcagggtaacaaaaaatgtaaaagttgcatctagtccccaaaagttgaaactttcagtgtcactggctctgtcaccttctactgcctttgaaaggagtgctgataaaccaaatgagccctctcaagctctttttggaatgaggcagagaattaaataaatgacaaaatgttttaacatcagtggtgggggaaaggcctaattgacacgctcagtatccaataatctgcaaaagccagagaccattttactgacatgattctttctgaccctggagtttagagttgggtttgtggtttctccctacacagtgaataatggaatacaactactaaaggaaaaaaaaaaaaaaattcatccgttggagaatcagcagctgacctggaagtaaaacatctcagcccttcactcagaggccacagagcctgttctgctttctcagggagttgccaggactcaagtgagcagcaggacagggtccggaagcatgggaaagagacagccacaggtccctcgggaaggcgcaccgtggagtcgccccagccacgctgggagaaaggccactctgtgcagggatctgacatcaggctctccctggcaagcccataggcaggataaccactcccagaaatggcccagagagtcctgtggcccaacaccatgataaggaaatcatctagtttcatacatgagtcagaatttatgagctcctcattcaacccaaattgaagctacaattccaccattcctcctggtagaactctgccttgaattaagacagaacctgaaaaatcaggcccggtatttttgttttctttaccatctctcagcttgccagggtgatcacatcaaaatcatgcagaacacacaaccaggcaatgattctattgtaaatgtatacacatatatgtctataaaaaagcagatttcgtcactcctagtgataagcctgcttcaagttttgttttttttgttgttgtttgttttgcaatacaagttctaaactgatcaaaaggtgttcctatctccctgctttgttagccagggttgtgggtacaggagcattttttattcaagtttgatagaattcaaccaaagggcctagtgagggccaggtcatggtttttcacaatttgtcctcatctggaagtttattattctgttaggaatattttctaacccaagacaacaataacaaagccttttttagtaggcaaagctaggccaattgactttgatcatttttttaatgataaagcagttagcagattaattttgttcttagctcttttaacctgggctgaatgtttatgcttctcctaatgagatgatgcattgaaaagtgaagataaatgtcatctacttttcatgtgatctataaaattaatctcccatgcttatgttaataccgataatgtaatgtaggaggcagtgtgacctagaggataaaacttaagaggaaggcactcatgttcaattacagtttatattactgacaatattttcatctctctgtgtctcacttgcctactctcgtccctcatacaagtcccctcacatatcttccctgtaaaattgggtaatgcctctgagagatgctgggagaattacttaggtgctttgggaaacagcttaaaacaccttttagaactttcttgtgaaatagcagatattgttaatgttcctaccgtaaaatcagcctctggtaagtaaccatgacacacttagcaattgtcttcctactcagtaaaagtgatcctccccagagctcaggcaagtgaccctccacccacagggttctgtttatttccagaaaataaattacacggaaggagggcgcgatggatggtaattaagtcaccaagttagggagggatcaatgcttacactttagaggttaaacgaaaagctgattacatcaggaaggaatccatgttctgtattcagctgtaaaataaactgggagttttgtgtttggtgtctgaaacatctttggaaacactaaatcaatttaatatcaataattgccagatatatgctagattaaatgaaccaacacagatagctttgttcgcagagaaaacagggccaaatggctttcattagcatgactaatcccgaagttctgtggtttgatgatcagacgtctaaacctgaattttgattcttgcaaatatatgatttggcacaagacattgcaagtccagctatttctgtacctttaacatacatgctgaatatcagagaagccaggtgacacttaaagtgcctatatagctacaactgtacccactggtgcccagaaacacaccagatgcacagaaaataaggaaatcactctaacacaggactgagccttttcccagacctgtttttgggggctttggaatcacctgctttggtcctggggagacagtcttaacaggagtttcaaaagccagtgctgttctcacagctccccagcagctctgtgaccctggtcattttcctattgttgggattacagaaccaagcggggcactacactcaggagcctggtggtattttcacctcagtcccgagaatatttttctcctttttttggaaattctgacatcttttcccttgtaactcttgcaattttgaagagttatactcatgacatattttatccctaaatagtcctgagaacttcagaaaacccggggtgcacagaaggagctgagaggggtcatcagagtgacttgtgaggacaaaaacagggcaatgggtcaagagtcttgggctccaccaagaacctgaggtgccttacagtaagtgtatcatgcagacatacagcaaggtgtgaacagagcacctgaaaccttgcagagggggctccgaggaaattatcatttgtcagcctttgtttctctaattcctgagtgtatgctctcaccccccaacccaccatcacattacttcagccaatcgtcatgaatgcacttcggctgcctttgtgcagtgtgtgcgtgcatgtgtgtctacgcatgtgtgtgtgtcaaagccaggaacacagaatcactctttggggcctcatcactgggcagccgagcctctggacagtcttcttcggaggtctgtgcaaacttcgggtcagagcagctgcctgtgagtcacgatgggctgtggggcctcaaatcccttcacagccgatctggggcaaaggaaaaagcattcagctttttcattttcataataggaagattttttgcagagcccttatagcccgtgtgggggaatgctttttaaaggtcaaatgtgactgtccctatatttgggtttggaaattcacagactctgattataaatattgctgaagtgcgactgatatgtgcaggtaccagccaattccttgatatgccctcttttgtctatttctttgctatccctcagcccccaagtcccaataggtgttctaaagagtcttgcctcaaacacgtggtcagctcgaagggcttaagggaactagagaactatgagtccttctaccgggaagcaagaccaccaggtgagggctctgtgtccccaggtaccagtgggccacaatacaacatgggagggagatctcgttgctctcgccgtatggtggcctggttgagaagtcgagggtttctgtgtattctctggccctgaatccaaggcaggctggctcccccactttcactggtgccattgggaaaagagagtattttggaaacattgtgtcgggcctgggatgtgtctcctctcacccccacctttctaataatcttcccaagttggctaagaaataataaactattgcttagatgagatgatgatcaagtctctaaggaaatagctcagaaaggtgaagactcttgcctctgtgagctggacatcggttttatacttcgacaatgtggatgtatctttgtctgtatgcatcaccttctctgactcacagtgtgcagtactgagggtgtccatttagtccagaaagtctgcatattgatcccatctctatgacactcattgattcctccatatgttccactttgtcaaagtccaggcataaaaactcccagaagcatgagtcctctccacattcccaggctctttcctaagagattttactaccattcaacacagacaggagttgatttctcagcaagactttgaaagtacattcgagagttctattcatcacctttgaggcaacgtaaattcaccaaactgccctgaagatctgagcaaaggatctccaacagatcagattatccccctggaatgaaggaggaggtccacatgatcttttccgggccagcaagaggattcagaagtccaaggattccgtagatgaaagagagtttcaggattgtgatggttagttcttgtcaacatggctgggttctagcacccagttacttaatccaacactaatctaggtgttacactgaaggtacatctacaaactggttgactctaagtagagggattacccttgataatgtggatgggtctcatccaatcagttgaaggcctcaatggcaaaaactgaagtttcctggagaaaaaaaaaattctgcctcaaaactggagcattgacttctgccagggtttccagcctgctggcctgtcttatgaatttcagacttgccatctcccaccccaccccaccctacaataagccaattccttatcttgtatatatctagatatcatgtatttatatatctagatatcatatatatttatatataatactatcgtgtatgttatatatattatatacacatcatgtatattatatatcatatataatatacatgatatatatacatttcctattggtccttttctctggagaaccctggctgattcaaggaccaacaggaaatttccactctagagagaacttctatcactatagaaacttgaaaacacaaaagaacgtaaaaccaccaaataatgtggtcctttctgctagggtgggcaactcctgctggagttcctggtgcacattaaacctcacaggagcttccctctgagtgttagaagaggggacaggggagaggatggcagaggagtcctgtgattggcttggctatggccttagaacactcttatttgtatatatcatgctaaaatgtactcagttggaacttaagtcctaaacagtgtggggtttatataatattgttattatagtgcagaaataattaaagtgtgtcaagttttgcattttttaaaaatcttctctgagaaatccccgacttttctacaaggatttcataactctaataagaaagccctgtcatgaataaaacctggcccacattgcctcaggaaaagcccagaatgtatttactccacttgattaaaatagaaatatatatattataaaaaagtccatcagataaggaacacggcttgtctcctctcctatcctccacacaaaggtagccaaaactttgcgaatctgtcagaaatgggtttcccctaattaaaagggaaaaggaataaattagaatctggtaagagtaaaaggttttttttaggttgaattcatactgaaaaaaattagaagtacagctagtgtggattcctgagacatgtacccactctctttagactgttgccatctaaggtgcacacgctggatttccacatgctgcaggaattgaagaacctcttagaaacctggtcttcataaacttaaggcttatctgggttagctgcaagagacagcaagagaacccatgcagatctttcatatgctcccatctgactcattccctgtcctcttctccccacgaccattcctgccccaacttggcccagaaaccaaatgtgaattttctatttcccacctcagcactagtccatgccaggacaccagctgacaatttcttggttttattgtcaatagctgtaccatgtgatcaattactgtcttcacttagaacgaagccagagcccaagaatatttatattctaccaatacgtgcctgttacaagagaaggaaatatgagttattaagtttaactttttatgtgaattcagagtttaacaatggaaatatgtacaaagaagctttaaatgaagtatttaccaacattccttatacatgtcaggcactaggctacatgggataatgattaataataaaatgatttttaaatgaaaaaaaaaaaaaaaaaaaccagggaaatggagaggagaaaggaactagaggacacctctttccaccaggaagtggaccaggcttggccaaactacaaacagaccagcaaggagttcctacttgctacacaggagggctctaacatgcagaatgctttcgaggattaaacaaaatctcatgtattaagtgctgacgcagtgagatgcctctatctccacactcaataaccaggagttgtattatattattataatcagttcaaaaagaactatgcagacagatttcaatggaaagtaatattacaactaataagagtgaagaatacaattaatgcttcctcagtgttgagcagtgatctgctcatgttgattcatttaaatactcacgacagtcctgtgagatattatcgcatcaatatccctgtcttacacagacaaggaaactgaggttaaggaactttcacaaggtcacacagctaccagatggtggagacgggatgtgaacagggcatcctggctccacagtttgcttgtttaaaacacactgtcctaatccaactcctgttagagagagaagtaatcagtgcaaattttttccttctgaaaacattttgtcagggtctatggtgacttagagcacttagtacgatgcttattgagagcagacactcgacgaggctttttattgtgggcttactctgtttttaaggcaaggagcttctctatttcaagattttttcactatgtgccttcatttcttcctatcgggtactttttttttccacttttgaaatcttccttaataaacatgtgtgcttaaaaaaaatcttctaagttctattcctctttcagagcacacacaaatgctatctcccttgtaagtcaggatcctttggtccacaatgactccctccttgggacgtctaaacacacatgagtaaggtcatgttgatcctggttgagtcttcacagtcttgttcttcacacacctacttccccatcactgagctcgccggcctggcacagatccgggtatcagtgggaaaatggtggaaatggggtagaaagggctaaggtttacacacaagagagggggaaaaacagaagggaaaaagtaagggggagacctggggaaggacaatggagaatgagggttatagactttagggtggctgatgcgggagccgaatggagaacaaaataatgaggcagtatcttatgaagtgaattttctataattacttcaatgttctttgaaaaatgcagagaaaaactagaaccgctttcaattactttcagctgctgaaatgtttgggtgtgacatcacgttgtggcagggacacatggacttctggctttattcaggttacatctccagggctcatccagaatcaggtatacttcttgaccatactactcatttgggacttagctatctccttcgcaactaaatgaggacacttgaggaagctggctggtaatcttatggtcacctgcactgtctcaagtagtgtaggaaaaacagttctggaagatctgaagtagagttcgttacttcatagctgtgtgactttagggaagtcactgaacctctctgagcctcactcatatctatctataagaatatctacctataagacaatacatgggaaagtgcattggcaaccattaagtgctacataaatgttaccaccgcttagtgccttgcagggactcattaaaatcttgttgattgatcgactgattaattaactccagccagcttccttaaaagtgtcctcatttagttgagaaagagatagctatggaagtcaatgacatccaagaaaatccactcggcttgacagcagcctcattcaagggacttttaggtttataaatgtacttgcaaacaaacctctttctgttgctcaatgactagctttggttgggatgatgagatctgccagaagtaatgagactgtcattttggctacctgtacatttgaggatgaaagaggcttgattccagaaatccaaatgaagaagttagggatgccaacctccaggccatctctggacacacagtaggcatatagaacaacactgaggattggattgagtcttaaatccagcaatccccctctatcactgagtatgatggactgcctggtaagattttcatgaaacatctcagagattatatggcctcataaaaacaaaaatgacttgaagttgaacagagttgaagcgaatgaaacttcaaactaaatttttattgaaattctccccattgtcagacgatattttcaatgttcatttccctgcctcagcccattttgccatagaaacttggatgttttcattgaacagcagccagtgaacactggactgaaggggcacactataaatttggaaaaataaataaatgcttcagaacttccacttgaaaaccacagctaaaaatgaaatcaaatctgacccaccccttttcttttaaattgtgggaacagactcagtctgcctcaatctttaagcacatataaaatttaatattaatataagcaccttggagatcaatgcatggcctggtctaaagcaattgtggagcctttgactcaagcagcaaggtttggacgacttgaaccagaagatagcatccttcctatgccatgttccttaataaacatgtgtgcttaaaaaataaaaagggaagaaaaattggtttatgggcatagagagaataattcactccaaattgctcctttgatgaatgtggacaaaaagaataaaatttgtcacctagctaatattaccatcaatattttgtccagctacattccttccaatttaaaaacagttcaatatcccttttaccttcaagtagcagcacttaataaacagtgatggatggtttttatttttgttcgcatttcagtcttccctgctttggtacaaggggactattttgcttgggggaaatgtagatcttccatctttcgtccattgacatgcacgcctcaaggaaagacggccatatttaattcataacgcccatcggctacacaaacatacaacttcccatcaattaggcaacacagagatgttgttaaaaatcaatgagcttattattaaatatatttttttcatgtagcaataatagttattgctgcactattgttattactgcaatgtcagctgtttaggcagctttcagagagtttgattggctttgatcttgctagcaaggcattctatgaaacaagggatctgggtgaggcttccctgctctgtcttctgccatattgagaagccaccaggagaagggggaaaatgtatgatgtagtggaacaaaccttggactggaggcagaagacctgggttctagtcccagaactgcacataactagctgtgcgaccttaggtaagtccttcctccattctaagccttagtttcctcatttataaaaatgagaggtttatgataagtgatcattaggacccctccattctaaattttcagactcttcaaccatttttttaactaggaaaggaaacaggttgaaattgatgcaattcagcaactctcaattgttcctcatcaaaagtctcttgattaaaaaaaaaaaaaagaacgggcagcgtacgggatgctactgaatctggagcagacattaaattgatccaaaacccaaatatgctcctatttgtgttttcatcctcgttgtgtgtttattaaaaataattttgatattttgacacttaccactacggcagaagcctcctgcctacaaacagagatgttaaaactgtgccagcacatgcaaaggttaaaaacaacattgcacagattttggcaactacatcatatgctgtctggccgcagctgatctgaactgagtcccccgtaattacaggagaaggtggaacaggtttgccgctaattggaaaattctgcaaatggcagcactgaagtaaattgacagtcgttagaatattagcaaaatgagagtactgattagtaaaaagctcagaagcagactttttttttttactgccagaatctactggcaaaattgataataaaagctgaacttaataataacagctgttatttgacctggtaatattttttttaatctgttgctgttcccagaccaataacacataaagaaggtctgtatccactgttgcaaaattatttgaataccaaaaggtatattcaaactcagtgaaggcaaactgtgcttaaaggggcagcccatcagtagcacgttctgatggaagtgcattcactggaaacgttgtgagttgttttgttttctcccccttccaacaggtctcgtaggcatgctggagcgttcgcgtgtcctttttagaactgggcctggattctatttccagtttgctttaaatctgtgactgctaaaaatgtcaaagttaacttatttttcattttaaagtggacaggaaggaaagtaggacattgctggactctgaaccatctatcagcgctgagctgttgatggtatttttcagtcactgcatgcagagaaatacagatgggaaagcattaagaatggacatattaattagacatgctgccacgaatctacggaaaagggaccgtagcttcaccacacagacttccaccttatggggacacacaggaatatgccctaaagacttccattttgggaactctgatccacagctggtgggagtataaattagttcaatctttctggctgtatggcgatatagatcaaaagtcttaaaaatgcatacagcctttgaccccgcaattctattttaaggatttgtccaaaaaaagagtcatggatatacccaaagctttatctacaaaagatgttccttgcagcattgtttataataaatacgatggtggaaaacaaatttgtccccaaatggataattgactatgatatacaaagaaatactacataattatttaaattatgttatagaataacatctaataataccaagagatagtctagtataaaaaaatacgaaacagtaaacataagattatcacatttttgtttaaatacagagagagataagagacaaaactggaataattaccaattatttctgagcggtaagttactgggccattttcattttatttgtccatattttctaaattttctaaaatgaccatacattgtttgggtcagaagaaaatacataaattaattttaaagataaaatctctctagagggttttggttgttttaagtaaaaattcaatctgtggcaatgggaaggaaagtctgcattcctgaatggtgtgctggcttcttgacttaaagcttcactgccttacatgatggaagtgcacctccctttgagggaaaaagaatggtcagctaagagcaaatcttaggactccaggtgaaggaccaggctgctgcttattgttgacttcatgtgcatacacacacacacacacacacacacacacacacacacacacacacacacacaccaatcttgtttttgatatctgttctctgaaaacataggtcagcaatacttcaggcctttagaaagacggatttccctttatgacttttgacttcatcctctgataattctgctattttattttgcccttattgtggtacccacaacctcatttattctgaaacactgcaggaagacatcattgccgttttcaaattttgtctctccaccagtcatttggaagggaagagagttggaagcacacgaatccaaattcagcccatggactcacaaaatagactctgtccatgtcgtatcacaagtcgagtttactgctaatagaggcggtcctgctgcatagggccctattcaccggtctctgcatgctcaaccaaagtgacacaatgtgcatggctggagctcgcacgacactccctgtacttgaacatcggccaggaagttgagtgagagtgtgacacttcagaggtgccttagagcacacgtacgtttgccggggcaatgacgtatgcatcccgtatcccatcaggtctgctttttgaaaaaatccttattaatatcctacggcgccattgccaaaaacacaaaatcccaaaggcaaatcccctacgttctagcactgccagaactagtaccaccaggctttgctcagggactgcgaactgccgcagttgcttctagcaaggagcaccaagcccaccccattagcttcagccacaggaccaagcgacttgcaagctgtttctcgccaggagtgtgggtgggcagcgggcaggatcccaacgcgacaactagactcaattgactgtaacccagaaattttttttaagtggcttttttggatggtggtacccaaggccccccatccttcattcttcctaacagttatgcatcaggaaaacaaagcgatggagggggaagtgggggtgttgctgcagccagttggtgccaaatacagttaaggatggagagggaggtgggattggaaagggggggaaaagcaagtcactttcaatcaagtgtcacacctttaaatagtggttaaatctttgcattatgcagctcatccctttacaacatggggttcccttagagaattccctgtttacactgggaattcctccagggccgcatcaataaagctgaacagatgtcagggtggaatgccagcggcagtggctgttgtcaggggtactggggagggaggcacagaacaatgagaaacggcatctgctacacaaagcccttgcgcgtgggtcaggttctgccagtgtgtagggattccaccctaccctttgtctgggcacattgcctttcttgtttctcaatgacaagggttgacacatgtcacccggccctatcaggagtgttatttgtttgccacttgcatatgcaccagtgttcctgaccttccccgcatctctgctgaatgcacccagcaaagctgaaactctccagccctgccccaatctatgatttcattatgcactttgagtcgaaagtgggatgtagatgtccttctttttaattaaaaacatgattgatgagatttaactgacagtaggaaatgcaatttaaatattccttaaagaggcactaaccctgtttgtgtggcaaggcttgcgtggctttccaaagttgcgaccggtgggagaaaggaaattaaaataaaagcccgttcaagtccgctcggctgtggaagggtggtaacgttagacagaaattgcagccgtgtaaccagaaacttctgcgcattaggagccgatgtgaagtgttgctcaggaatggcagtgttcagtgtggttagaggcagcagaggagtagagaagagtatgctatgaaatcatgtggaagcaaaacaggctaattcaccacatttttaaagcaacaatctgatcccaaaagacattatactaaaactctccctgctctgcaaaagtggttttgctcctcactgctgtattgctgaatttatctttggctcctctattgagctttccttaaactgtccttttaaaatttccattataagaaaagtccttagcacccccgatgctccaggacgtgggctgcagttctaaggcaaacaggaaagcaggcaccactttttataaaggccttctcagatttgttcccttagtgactgctaaattattatgggaaattatgtgagccacaggatatagcaatatccaaaccatgggaaccccaaattgtaataatcagaggcaggagtaagtttttctaatgaccaggactttgcactggtattttcaatctagaaatattggatgaagttgagtattagtctgtaccataacagtataacttaaatgccaacaacaatagcagtttaaattttattatagaactagatctctgttctctttcttagtatcatttacaagagggtttcgttgttgttgttgttttgttttgggatgttatgtcttccatggaagtagttattttctgagaaatgataactgtgaatttaaaaaaggttaatactttcctaaaagtatatataagaatagccttgtctacactctggaggcttactaaaagtatcatcttcatctgtgtttcatgcctaaagattttattctagaatttcaaaatcccttaaaaagcaacagataccacacacagtatagttcttctccacttaattcctattaaagaccgataaaaagaaaagcttttattgaaatgcttgggttagaggaaacgggattacaattggagctgatttttggtaagtatttaactagcaaaggttaattagaattgtaacaatgagatgtaagagaacacattctgatcgattgattaatgagatgtcagaaggtataagaatccacctttgggagaaatattaaaaatgaaatgtgtttgcaaagccatgatgtcttttctcttcatttattaacacaagaagcaaccgtggatgtttttccatgggtaacaatgtacagaaaattacgatctccaagttggccaaaagcagcaccaacatgttacccaagtctctaccatccaaaaatgtccccgacacccatacaagggaacaaagtttctagaagaggccaaactctcagcagccctccctgtagtgactttctatctcccctctattctctctgcattatatattcagattaatttaatgaatgactcatttcaaaatcctaggcttaaaattattaccatagaacattataaaatgcctattctggatttattgtttcatcaatctggtatcaatttcactattgacatgggcgatggggcgggggagagggtactgtacacgtttttccttcctcatttgactacactggtaagcaaacagatcttcctatttgtggcatagatgttctttgtcacaataaaccacagtatattatgtttatatatgtccttcaagcatgtcacaacagtttggcattctgagtggctctaccactgtgtacattaaatagtcatgtagttacattaaacagtggggagttcacacttcacaagcacttggtgttttaaaacagatgtgggctgtctgttgtcagactccagtgaaaaagcttagaagagacttggtgggaacataatcttcaaatagctgagggctccccaaattttccacccaagttcgctttacctccatactacagagtgtgggggtgaaaaagatgatgggaaaagaaagagaaaaaaaggaagaaaaaaagcagtaacttttatgtcttatagtacagagatctgaaaaaaaggattcagaattcggaatagtttgtggcatggaatattttgagcagggtgggctcgctggggtgtcgtgggatttactgacaggagaatttttgacagttgatggacagatgaattccgtcatggaagcgttagtggaaagcagcaaggccagatggaaactcacagcttgtctttaatattaattttcttttttttcaagagatcagaattccctaattccctaaaatgtttcaatgcatcttgaggtattatttttcagatgcctttctccacctattcttagtaagaatgttcctttgtgttaatgttatttttcctctcttactttgaaaaaaaaaaagcctagttttttttttgtctttcagtttttttcttgctctagttggacagctgttaaaattcttccttcatttacagccaatatagaagacaaataccttaaccgtgtaagatactaagtctaaatatgagaaatacatctgaaacaatcgtgactttgagctatgatcattgacagaaatcatgataagattttctttgtgccttaatgaaaggcataattcttcatgctttcataaggatggaagggaccactgtttttagggtgtccgtcttccgggcagtaagaaggaagtcaaatactctgctcagggatgcagtaaaaagaaccctggactaagactccagggctggattctagtcttggctctgctgaatggtgggtcacaagtccctgtgatgtggggggcctcaatttcattacttggaaaatatggctggtattgggagaaggacaggggttcctaagtcacctgcacacctctctctctaggatgctacaaaatcttccaaagcacaaagctcaccattcacgtcaaggagtcaaggactgttgctcttcttcctcttacagctgagcttcccagagacctgggaacccctccatggacagttaggaaatgggacagtctctcccttttccctgttgttctacacaaacttcactactgtgcatttttctatgtggtaacttcatgctcaagacaaaaatcaaaaactaaaaaatcagcaaccaaggatgatattccatatcctatccaaacaaagctcaaattctgcaaacttttccattctgtgatcttcttttcttagttcctttcttttacatcactagatttacttgagttgagaacattgctttaaaacttagagatatttcttctatgtttacatataatctattttcctgacattgtttcaagcttaatggaaaaaacttaacatgtgacagcttttcctagagtttcctgacacatcactctggttacatattgggtctccgtgtgcgtgtgtatgtgtgtgtgttttgcatttgtgtttgcgtccgtgtgtgtttgtgtgtgcactagtgtgattgtgagtcagtctgggtcagcccaaaaaaccttttacaattaatgtaatgaaaacatttggctaaacagaagactctaaaacaaagcaatgaattgtgcttattggtaaaatggaacaggggcttctctgcataagttcagagactatttctgtgtggctcaggagggttaagaaacaacctcaaacccctacagctccaagttcccatcatactctaatgtgtccctctatgtgaccagggacaaatcacttaacttttgttctttctccttatctgtgaatcagggaaagaataattaacaaagagaggagtttgagataaagctgattactgattgctttggagtgttcacagttccagagaacagaaatgagggccagtaggtaggatttaccagggagcagatctgattcaatatgagaaaaacctgtgaaagtatgatactgctcaaaatcaaaacagactgccttgttaggcatgatttccccatcatgataaagaacccattgtcaagggtgccataaagagaatttttgcatgacttagtaggctggagcaaatgatatctaagccccttccaatatattatacacctgttgattataaacacatagctagccaatagggtatttcacaaaaacacttggcaatatcatgatgaaagaatagactattagaactggaagagaccttaaggaaaaagagatacgggcagcccctacattctactaaagctagtggcagaaccagggttgctatgacttatgtttgaagagtattttacacaacagtttttcatatacctcttctgagcctcacagtagtcttctgaggtaggaattactagctgcgcattttactgatgcagaaaccaaggacagggagttgacgtgacttgcctatatccccatagatagcaagtggaagagtcaaggctggaactcagggcagaccccatgcaggagacttgttcctttgacacttttctttccaggatctctgaatagttctcacttagtcttagttatttcctgccacatcccagagatatgtaacattattagccatagaggttcatcagttaccagagatagaaagcaacctctgtgatcatttccttccatcttcattttaccaaaaaataaaaatgaaaaaattaaaaaaaaaaataaaaaaaaaaccacaaaaccaaggcttggagcagtcatcttcttagtgggccatccaaaatgaaaactttgatttctgcttgattcctcaaagatcttaaataggcaacccacccacttgatctggcaaataatgatttaaaccaggtgaatgcaagaatgatttcattcattgcattttccatgtgcctcttgagggaaggcatgtggaatatgtatatacagagacagacccccagccaccagtgcctcccccttcccccaaaacacggtagactagtaaatgtttgctagctatttgcaaggctgacagcagggattatttttcccatgtgccaaacaacttcatcctagaggaaatatttcactctggcaagatttaataacaattataaggatcctttttattgatagggcactctatgtctaaaacatattttcatgcattgggagtatgacatcaaatctcatgagtatggagagtggaaggcaactaatggcagcagtagtggctactcctctgcagtccctggggcctccccacccccaagccccaaagtgattgctgctcccccatcttttttttttttcgagacagggtcttgctctgctgcccaggctggagtgcagtggagcaatcttggttcactgcaacctccgcctcccgggttcaagtgattctcctgcctcagcctcctgagtagctgggattacaggtgcctgccaccatgcctggctaatttttgtatttttagtagagacagggttttgccacgttcgtcaggctggtctcgaactcctggcctcaagtgatctgcccacctcggcctcccaaagcgctgcgattacaggcgtgagccactatgcccagctgtgctctccctcctttctgctcatctttcccgtctgactctttttggggaatgggatgatagtaccacagattagcaaaggagtccagaaaagaaggtgcaatgggaaccatgactcctcctccatctgagcccctagtctgtgccctaagctacggaggagtgtgaaagacacgcagactgaccagaagggttcctcagcagtcctggaccactggctgctgtcagagagcccgacccacacccatacctgcccctacaggtgctgctcctcctcctcccctgctatataaaacctcctgctctcgctaattcattatttatgacaccctgataaacacgtggaaatgcaatgtggatgttcaaagggaaccattcccattcctaagatggcccagggttctcgtccattttagtccatgctgtggcttaataatggatcacttcttcagtcaacaaacaattacttgagtatctattacctgaagcactgtgctagaggctggaaatagaaaaccatgttcccgtcctcagggaactccctgtccagtgagcatgaacactgggggaaaattgtaagaggatgatgtactgagtccctagacagaggtgagcacagagagcaccggaaacacgcagggggaagcacaagccccatctgggaacatgcaatggttctcacatgccttcccattggaaaactagacatttaaaatctacctccagcaacctgtattctttaaggttttttattggtacaaatgtatggagtacatgtgcaattctatcagatgtacataatgcatagtgatcaagtcagtgtatttagggcacttagagtgtccacactgctcctcccagcaaagagaaagtcttcaggctgcagagtcctggaactacattgttttccttctccctttgctgtgagcagcattccaccagtacttgggattttcacagccttttacagtcattagtaaatggacacaatgtccccttggggcctatcccccttatggagaggctccatggagattaactgctgtcttaggtcactggggcagagtctaaccccagccccctcctcaggcggctttagagtgacatatatggcaaagtcattctggcaacaaaaactgaaaggcttgtctaactcgacttcagcctaaattggagattctgcacatatctcgtttccttgacagtaaagtgaggagtttggagtggccaaggtgcagagcagctgtgaaaaccggaacagccttcgttcctgcgggctcgcctacctccccagctagggcctcctccttccttggcaccatagagcttaatgagaattttccacgctcttctgctgttcacaggcctctttgcagatttttgcatggaatgaactacaggacatgtcactgatgagtgcgtggtgcatggtctacctcagtgcagtggtaacctcctggagctcaggatttccctccgtgaaacctatgtgaaaactagagcttattctaatgcgaaagttcccagggctcttctcccttcaagcctgagcacattgtctcaactctgcagggtctgaattgagtgaatagttaaatacttgtttctcctatggaacaaaattgttaaactagaagaaacttcagaggccacctagttgaaacatctcatttaaaacaaggccaggcgggatggctcatgcctgtaatctcagggttttgggaggccaaggtggaaggattgcttgaggccaagagttggagaccagcctgggcaacatagcaagacataacccctgtctctacacaaaaaaaaaaaaaaaaaaaaaagaaagaaagaaagagaaagaaaaaaatttagtcgggcatgctgatgcatacctgtagttccagctacttgggaggctgagacaggagaatctcttgaacccaggagtttgaggctacagtaagttatgatcatgccactgcactccagtctggacaacagagctagaccctgtctctcaaaaaaaaatttttttaaataaatgtttaaaacctgagggttcctgactcctagttctatgtccttttctctataccaccctgctagcacagaatcttgtacctggttcaccctcagaaaacatggtgactgctttagttccagggaccttccccatgggttaggtaaaactcctcgtcccttaaaacggcaactgtggaggttagctggggagccttgacaaccccagaaaaatacagttctccccagtataattctcagctgaaacatcaaaacactatcaaaggggcttactttgatttggaacgtcattttcctccctcccattttttttgttggaaatacatagagccgaataagataccagataatccccaagactgccctgatagcttgaggcctcacaaatgtctgtcagctttcagccagagggagaaaacctaggtgagaacagggtcccagttgtgtcccagactcgtggtctccaaccatccccggaaatgggctcttatctgaacagatgagctttatgaaagaggaaatctccatttcaaaaagtcaactccttatagttttctatttaagttatgctaagcacttgtgtatggctgatatttggtactctacggagataagagaaaaagcatagggcagggttccagctctggaaggagctacgagctaatggaaggaaaagacatagatgatagcaagctagaaatgaactcatatcctaaagtttataaacatctctttataacctagcattccaccaaagtgatctccctcatctctagacttgtaagagcatctcttacttacatctcccttcagacggccattgtcttgcctggtgagccagctcatcccttgggggcctcagtcttcactcccctgataagactagaagtttttgcaggcagaggtcaatgtatacggtttgaaatccctttggcatctagcacaggactttctacatggtaggcattcaaataaatatatatttgaaaattgtatagtctataatattatagaatatatacacaattatttatatattgaatatattacaatattaatacagtctataaattatattgcatataatctacaatatacattatataattatatatgatattaacatataattacatattgtatattatataatatataaattatattatgtataattatatatacatatgattatatgtacacaataacaattatattgtatatataattatatattatattgtgtatataattatacatgtatatgtatttatatacacacttatatagacatacacatatatacacatatggtgatttaattattacatgcagttgtatacacagttatggagtcagtggtatctgataagtggcctctgataagacaggataccagtgttcaggactgctcttgacaaagttgtttaaccctctgggctttagatttttcaaaagtaaaacaaagcaatggactagattttaaggccaaagggtttgatgcctgctcttattccatgggacaattattcaagcgtgaaaagattgttctgttgccccccccgccccaccccagactcctatgttccaagcttcttcaggccttgtgacctgagctacagttcctgtcacctgacttcatagcctgcatgattccaactgctcccccaatttttcagtattcttctgctatatcccccaagttgaactcaatacctgtattttatttcacatgagtttctattaagctatatctcccccattctatatttatatagtactatagttcagaccagaaaatttctagcatttcttcccctctgcaactccgtgggtagctgggctaagggaacccaggcaaagatgcctcccttgtctgcattttttctatatttttttctctggctcttggcctgaatgaagcatcttgcatcacctggttagagaagtaaaaagagcctccctaggtttgctcaatactgagggtgtctcttgtcccaagtaccgatacatgggaggaatggcatcattcacacagaaccaactatttctttcttcctctttctgtagacctcttctgcttggtctgtttggtttcgggggtacaatgagagcctgtggaatttgtttctgataatgcaatcctttgaatgtccctgaataataggtctgtcactgaaattatgaaaagaaaatgcagagttggagggaaggtggttctgattccagctctgttaaatttttactgctgctggagggtggctaaattgatcagcagagacagaatttatatttttggagctttagaagcactcaggactcctaaacctattgaaacggtctttcattctaaaggtgggagaactttttactattaataaagaatgctgaagtctggtttcagaatgagcaaggagttggaactggaaggactctccagggtggcagaacagctaccacctaggcagtctgcctgtcggagcaacaggaagttatcccagactacagccacttctctcactgcctggcgtgatggggaaatgccactgtcagaagtaatcatttctgataatgagttcttcaacttctagaatctcccgttaaagctctaaactcacttagaacagccaaatctcctatgcctttctcatcaatcactgtatgtggaatgaggcaataactaagaagaaaatcactttgggagtggggcatgggactgtgcacacagataagcaggccaaggagtgtgcatgggaaagagaccagcatgcaaacaccatgggagcaagacctataccttcttcataacggtatctctaatgcctagcatggtatcttaccccagacctaaatatgcttgctgagagtgaagtgactgagaagaaaatggaaaagtaccaaagacctccaagttttcccagcagtcatctggggtggcaggtgaggggcaattgtcactaatggaaaatatgtattcttctggactctgcagagatgtcatcatgtttatccttctcttccctccttgcaccttatctccattacccaaaccagctcctactcctaaactatcctcattgaatgacaacaccctctttgaccacctgtgcatcacgggagaaacctagacggcagcccagacaactccctctgcctccctttcatatccagtcaaatcctgctgattcaacttcaaaatctctttcaaaatcctcccctagtctcaacccctgctgctactgtctttgttcaggcctccatcatttctttttgtttttcaataaatgtattccatctatctgaggcttacaacatgatattataggacacactaagatggtaaaatggttactgtagtggagagggttagtctatcatctcacagagttacgtttttttgtgactagcacagctaaattctacttatttaacaaatatccctaatacaataatacaatttgattcactttagtcctcacacagctcttcttgcctgaattactgataatggtcccctagtttttttgtcctgcctccaggctgtctccccgatgctcaacccatgacccactgatatggtttagctgtgtctccacccaaatctcatcttgaattgtagcttccataatcctcatgtgtcatggaagggaccaggtgggaggtaattcaattatgggggtgggtttttcccatgatgttcgcatgatagtgagtaaatctcatgatggttttgtaaaggagagttcccctgcacatgctttcttccctgctgacatgtaagatgtgactttgctcctcctttgtcttctgccatgattgtgaggcctccctagccgtgtgtaacggtgagtcaattaaacctctttcctttacaaattacgcagtctcaggcatgtctttattagcagtgtgagaacagactaatacacgcatgctgtagccctagtcaaagggaagttcaatcaggtcacacttccatgtacagactttcagttcttgaccactcacatccaacacaactgcatttagaccagcatccatacacctttgcttggcctaggagtcccttgatggtctggcccctgccagcctctgcagcctcagtgttctgcatacccttaagtgcaccctattggaagtgttgcaacacgacacactccccttctttcttgcacatgcacaaggagaatatgttccttccccctgggctgctgttcctttcttccctgcccaggtaacccttcttcatcttcacccagtctgggcatcaaccactctggaaaattacccaggattctactttttgcccaggcagaaatagaagcccttcttataaattcggggcagaccttgataaacaatgaccttctgttttgtcatttttggttccttgtctgtttccctagctgcagagcagaagacaatgacacacaactttatccctggagcagggtttgatacatggaagatgcataataaacgtgtcctaaggccacgcacgatgccagaagtttcctccaaaaggcttaggtggccaagcattcattcattcattcattcattcatagagtcattctataggcctcctgtacattggacataggatctcatcaggggctaatccctaaggaacaagtttctaaaatgacttggttgttccttggcctgtcttgaagaaaccaaaaatgacaaggtgcaccgtctttcctgccgcatacctccaccccagcgcaagggctctgtggatgaatgaaaactctaacttgttatttctctggagagcaggcctcatttctctggggaagcaaaccagttctatggctttgagcttaggtgatgcctctccttttccagatgcccctcagatccaaaggaagcagaatagctccttgcttcctcttccccagttacagtgcctggtgagggatgggcccagagtcccactctaattataccctatttgactaggaaatggaattcctgatcggattcctaaatctccaagtgatgcgacatttataactacattaaaaaggaaatgcgctttgctgtgtgccttcactcaagataattgcacagtggtgacactgttgaggggcctgaggcccttcccgaaatgacagaacagaaccatgactcataaagtaaaggaaacagtggttccctccttgagcccctgaacacaagggaaataaatggagccttaactgaaagatgaatatatctcacagaactcccgggtttgggaactctgggagctccacagtctaatcctacgttgactctggctgcctcagcttttccttatctctgcaaaatgaggccagcaagggtgtggctttaatccaaactctaactatggttgcagacccctgggcggctgtgcgttactgcgtgtgagtcatccaggaatccaaatacacgccaaaaatcatgggctgaaaaaataataggtcttgcacagatatactcttctactattcaaatgtttgcagtcatcatcatcaccaccatcatcatcaataccatttattgaatgcctaccatatgccaagcacttctcaaatactatctacacattaacttgtttaatccttgtaactaccccatgaggttcataatcattattgtttctattttatggatgagaaaattggggtgcagagaggtcaggtaaacttgcccaaggttacacagctagaaagaagtggagctacaattcgagccaggcaatctgccttcagcacgttctgtaactgctacgtcatgctgtcttccccttttcagcgaatggttactaaaagtacccccataatcacattggaagtttgatcattttttaaaaattttgttatatttaacataggtcctcttttggtttggaaaaaaccaaaccactcaaggattaaccattcattaactactaattgggctagataaaaagtttacaagaggtgcgccctgataaaacatcctttctaccaatgctcaaaagtcgcccaccaaaaatcccttccatgagtttgaagttggtcctctccatgaggtccttttaaaatgcaagtgtccctaagaagggcaataaaagaagacattagtaccttagtatgaatgaggtttccaaatcattccttcattatcaggaaaaaaacaaagtaaggacatgagaaaaaaatagtattgaaagttgagggagggtggtcatgggagtgaaggaaaagaaggagagacaggtgccctgaaaagaatggaaggtgaccacttggggaggcagtcaggaaagtcaaaaataaacttggcctacttcacagttttgcctcgagctggcctgcaggcattcatcagtaccacacaggatgacagttttggtgaaatgttttaaatcaggtaagggctaaattgttatttctagcaatattaacctcatcacctttagaaatgaaaactgtaccaacaagcacgaggccaaggagatctgggattctacttgaggaagacaacactggcagcgcttgtcagtctcagtctagaaccgtattaatgaacatcatccgaagaccagcttctataaaccatggccaccttaatcagagcatctgaaacgaggtgccccactgagctgtttcctcctttaatcactcactgatgaataacagaatgttcgctagattacattacttttgcaaagacctctcttcttttaagctctttcagcaggctctcaaattccatattttcctaaaacaagatggctaccattactgatgcctacctcatattagatttacacacttttattaaaagtaatggaaatgtacaatgaaattggacttgtctctcaattccggtaaaaggctagaaagcacaagtgaagtatttgcttaaagaacgcatctgcaatgcaggggccctcagaatctaaatgcttccatgctcctgaaagttcctggctgctgaggcagatacccaggccgccactggccactgccttgagaatctcatccagtcgcatcaaagaggggacaaagggaaccattgctgcacctaagtgtggttgcacaggactaagatttactggagcctgactaaaaacaaaaagattgggtctccttcaaggaggaatgggttaaagtctgttaaactactgacccagggtcaaaggtttcccctagttgttctgtctcaggcatggaaccatgatctttgggtttgggcaaactttagaccatcttttcatcccttggtgcttcaaattgtaccataaatgcataattcacaggccagtaaagctgttaactaatgagttaaatcctctacagttttaacacaaattgatattaaaaaaaaaggaagcagagttttaaaaataagtacaattcaaaatgaaatgaagataaaagggcttctcctcctcctttttcatgagctgataccccagccaaggacaaagtaatgtttatagattttaaaggataaaaaataaaatctctgtatagctttctccccaaatgaaactcaaaaatagatgctgcttccctaatccttctgatttgaaaattatttggcatttttagaaattaatttttccaggcaattaaattagccagtaatttgatatcaccatcttatttcattatagagaacacatgctgaaatgacacacaacctcattttcatgtattatttttgcaaatttagtactcataaataggtgttggatcgacagtgccagcaactagaatcttccctgctggctagacgggagcctgaggagtggttatgtgagctggagcccaggcctgtcccagctgagattaccagctgggagagcaaaaccaagtcccacaacgtacagtccttttttctctgctccagaatgctagttggcccacccaattgaacatgataaatggtggcaccactggatggaatccaccccctcacttcccaatggccacctggtattttcatgatggctctgtccaaataatttttaaatactttccaagtcatccaactcagtgctccaacccttttagacaaagaggactctctgagaacctggaaattcacttgggaagggagagaatacacacacttagctagggcaaagatgagagagtttttagttctctgtagctaagggtatattgttaaattctaccaaggaaagaatgaggttgaagatgtcttttggctccatatgttcccaggaagaagggaaggcaccaagcattccccctattttatagacaggtatggaaaagcacagaaaggaaaagcagtgacttcaagactgtatgctaagagaaacaagcaaggtcaagatgaacattcagaattcgtcggaaatcatttttcattaatcatttattaaagattaatattttattaatcattttcaatcatattaatcatttttaaatttgaacatgttgaaaagtgttcaaaggggactctgttaaaaattacacaaaagaccaggtacactggctcacacctgtaattccaaccctgtggaaggccaaggcaggaggattgcttgaggccaggagttccaggccagcctgggcaacagagtgagaccgtgtatctacaaaaaaaaattatttaattagccatgcatggtggcttgtgactgcagtcccaactactcaggagactgaggcaagaggatcgcttaagctcacgagttggaggctagagtgatccatgattggccactgtgctccactctgggtaacagagcaagactctagtatgttcacatgcctgttggcctactgtaattatttacacatttttattttttgttggcctattgtaattattttattattttatctatttataaattatttattcatttatatagtatgcattttaaataaaaataatgtataaataaaataattacagtaggccaacagaaatgtgatccagaactgtccagggtgaacaggaacatgtactcaccctgtctacatggggattttgcgaagtggccaggcagtcattaggtaaggagctattacaaatcacttcaccttctggctcatgcccaacctgccctgctcactccttttcacagactttgctaatctcccccctacacttcatgtctagatatcctccccaatcagcccttcatctatgcaagttttatgctctatttcaaacccaagtgaatgtgcatctctcccacagggctctttctgccaactccaaatcattctacttttcccactttctgaattttcttagtatctattgtacatatcaaataacatagctttgaactatagaatgaggctttggggtttttttttcctctacttattctataagtattgggggttcttttcccaattaggcttgaaacttatgaaagtctgagatatttcttgtacttctttcccatcctcttctttcccatcacaccttattcaggatgttagaacagaaaaacaaacaaacttcacagagaccatttggtccagttacagatcaagaagctcatctccaaaagaaaggggccttccctaagaccaatagctctaacacagcctggagtaggggcccctgttctgtgcctccatgagaccatgtgtgcttcacagctctgcatacaccactgtggcatttcttgaccatggcgagtggactgtaatgcctcgtttacttagctgttcattcaccatattggaaagccctggaggacaggagctctgctggattgatcaccatgtcttcaatggctggcacacaacagacactcagtaaatgttggttgaatgaacgattaaaggaatgaatggaaacatgattttccttaaggtggtcatataggcttttattgcatttaattgcatttccaagcatttaaattaaagaagagagagaataagctcctcctcagagaagtcataggaaatggatggagtggttgattcctggcttctgctttgcctcccagaatgggtggtggaacccatttccattgatcttccagtcccataccgcagaggaaaaaagacactgaatgcagtcagggcagctgattcgggatctgacccttcactgagtctctgtgtcaccatcagagacagtgtcacctaagacactgtgcttagggcttcagattccccatcagcaataagagaaggctggccccaaaggctgtggagactccttctggctccagtgcctattggctccaaagcccactcactgagcacccctccaggtgaatgacagtccctagttagggcaacatcacacagagctggacactcaaatcctccatcgtcagagatcagcggcttagtagacagagcctctggttctcccttcggctgctaggaaactgagcctcccagcagcacattaggttgcatattaaacagatgggatgcagatttgagacctgttaaaggttgggctttccttttttttataggctgctgtcaaggtgtgttagtatctctttatttaaacaagctccttagtcttggttacacagtgcagagactcgggaaaaaaagtgagtagaataaataatctatcatgctagcaacataattataagaacatatgttagctcgaactagctatattctagtcatattaagggtatgtgtgggagagagaaggatggcaggagtgtctcaaaatagttcaggcggagtaagagtgatatcgggccacctggaaacccaaactgctttcctggagcctccattctggcatccacagcatcccagagggctgcccgttggtggcttcctgctgctaaatgcaccacctgagtctggagagccacagggcaccttgccgctctgctcagcggccccaccttcgcgcgcagggagatgagcccattcctacttcgttgggtgcatctctgccaggtgcagagagcacaggtccaaagagaaagacccccagaggtcaagggcaatgggtcttggctttcacaaatgcctcaagctctgaggcactaagaaaaacaaaattcacatattttgagggccttcagtgaagggaatcaatgcggaggaaacgtcgtgttgcaccaccgtttcccacatgcttatttggattgtactcaccgttcaaggctcttctcagggaaagtgcccccactcacttccagcaccgcccccgccccttcccccagggagccttcagaactctcatcgacatccctcccttggcacagaaagccctcgcggctccccaagcctgtttgggtcccctggttatttgctgctatggcaccccgcagtgctggaggacatggatactcagtgcacttttaattataccatggctggcttccccgaatggattgctgcctctgcgaaggtaggagctgtgcctaatttgttcaccacagtgactgcggctggctagggacctggggtctgtgctgcgaggactcagacgcagcgcgccaggttgtgcagccgctgtaaacaaggcgcccaggggctgcacgctctgggaggatcagagggttcgaggagggcacggagcgcatccccagaacagtgtgggctgcggcagacacaagaaaccagggctgatcacagcgacaagagcataccactctagcgccacactccccggagcctggctgggcccacagacaaggacccttggggacggggcttccctccaaaggtgctgggagttgctgccaggcattaaacagagggtcaagtttgtgctctaggaagttaattctgggggtataagaagggcctagaggcaagaaaccagcttggaagccattctattcaccaaggtgagaggaaggccctaaattcaggtgggggccttgagaattagaggagagggagaagctccagaggtattttgtgggtagcattatgtattttgtgagactctaagcattttagaggggcctaaaaattaataacctaatagagattttaccactataaaaaatgtatatactcctgtgtccaggcacataaaaaaaatgaaaacggatttttctaaagatagtcttaaaagactgttattttaacacattttctatacttttatatagcttattgatgtctttaaaaggagaagaaataaaggatttgaaggaaggaaaaaggagagagcttggggagtcatatgtttatgctcccaatagcttgagccacaagccatgtttaggggcacttgtccctaactgcagttgtgtctaggtttgccccttgaaagtctcattctggcttacatttaagtgctaccttctgtgtttggtgaatataagttaatattttggatgagactaccttctgtgtttgggaatatagcttgtccccaaggaaacactgctctcccaagaactgaggtgttagtcaggtacaggggctcacacctgtaagcccagcttaaggataagagttcaaaaccagcctgggcaatggagcaagaccccatctttattttttaaaaaaaggaattggagtatgaatgtaccttttgtccccccaaatatgtgtggtaccaaatgggcaggtgtgtaggtctgcacagggatggggagggagagcattattccttttttaaaaaaattgctggccgggttcagtggcttatgcctgtaatcccagcactttgggaggctgaggcgggcagatcacctgaggtcgggagttcgagaccagcctgaccaacatggagaaaccccgtctctactaaaaatacaaaattagctgggtgtggtggcacatgcctgtaatcccagctactctggagaatcccttgaacctgggaggtggaggttgcagtgagccgagatcgcatcattgtactccagcctgggcaacaagagcgaaactccttctcaaaaaaaaaaaaaattattattattataatgaagtataaatttaaggtgcacaagtactcttgttacatggatatattgcagagtgggaagtctgggcttttagtgtagccatcatctcaatagtgtaccttgtatcattgtatgcattaagtaatttctcatccctcgccctctcccaccctcccaaatctccaatgactattattacatactctatgtccatgtgtacaagttatttaactcccatttataagtgagaacatgttgtatttctgacccagaatcagcagagaaagtagatggacagggacagggccctacagggcaggtggggccgttgtgatggcgacattttaatattcacccaccatccactcctcacctaattttcattattcagcgctaacatttaaacagtattctctcccaagatgacacacaatcagaactgaaggtaatccagactattatatcaacagcattgatatagaaaacatgacatttgtgcttgtccccaaggaaacaccgctcatctagggaaggaagccagattgacgcattacccaccattgtgcatctaccaatatccatactgacagatcgagaatatctggcaagggccacatttattgctgtgccttacattgcttttaaaaccccagaatgtcagaagtgtacatccaaaagcacccacttttactgtttgaaagaaggatggctgtggaaattttatgtccagactgccttccagcctcgagacacctcagctctttgctaaaactgccatttcccccccaagagcaaatctttctttcccacagataatgaagatcatgatgctttgcatatgataatacagggtattctgcaaagtactttcatacacatgtcttcacaagagtttcagcaaacaaacaaaggctctaaaatacactgggtaggtgttagtcttattgggaaaatgacaaattgacatctaaggatggtaaagtgacttgggccagcatcccatctgctagttcagggttacagaccttttcccctcccccgcaggccacctcttcaccacttcccactgcctcccatccccactgcctgtggagcaacagtgtttggaatgggtcccttgagttatttaactacatccaaggctggacaagaaatagaggggaccagccaggtgcagtggctcatgcctgtaatcccagcaagctgggagcccaaggtgagaggattgcttgaacccaggagttcaagaccagcctaggcaacatagcaagaccctatctctacaaaaataaaaataaaaattagccgggtgtggtggcacgcacctgtagtcccagctacttgggaggttgagatgaaaggatcacttgagcccaggagttcaagatcgtggtgaaccatgattgcatgaccaaggtacaactggagaggccaatttcagcctgttagttaccaaataagatggtgtttaaacataggattgccctgtgatgcacagaccatctttagccagtgagcagtgtaactgagccctgccagatgggagtgaggaaggcaggcagaacgcaaaaggcaagcttccttgcacagccaagggagagggctcatgtgtgcaaggggtcagatctctttgctgcatgtcttctcatgagcctcccagacagataacaaacccgcacaaagatttaaactctccagaggcatcccggttatttctatctaaagaggaactgatggctgcagttcctgagcagattccaaacagagactcatacctggattctgcctgcccagagcctcccaacacaaacagcccagtctgctcagagcaggaaaaggtaaaagtaaataaacgtggtcttaatctctccaatagattggaacaatctgaaccaacctgtaatttcatccagacatgcagggagaataatttttaaagttttgctaaacataaatgcacctccactcattatgatttccccggcatttttttttttcttcctgcccctttctccatctgcactttattcaatgaacacatctgcattccttctctctctttttttggccagaaactttatacaaccttatcactgacacctctctgcagtttcaaattccagctttgtgccaaatccccatttcctgctgcttaatttccattcatttactcttgtttttgcttcttctgccattcccagcatggaccaactccagcccagcttcttctaattttttaaggaaggttccctgttgagtgctattggaatctgagcctccactccatgccagtgacgggccattgtttatactacctaacgacagttgccagtagaacggcggctttccctttctttatttccctccctgagtgtttacactaaggcccaggagaacttttccccacatatggtgacccagtaggtctagttttattatgactttggtagaatctgaagtagcctctttccatttctttttgacaggaaaaataaaatcaagtctggaagctttgtttacccagctctaagtgccaccatcagcctcagacaaagctgaacggctgctgtcaggacgagggctttgggaacctcataaggttaggctgagccaaaggacaatgatgcagaccccgaggggaggatgagctgaggctggacttttcgtaaagtggaggaatggccattccatttttctggtgctcaggaatttcttcaatatgttgggttgttctacaaagccaggagcaaacataaggttgtttttctggcttctaaggagagacaatgcttgcttaaagtttttttgagatagactgtctctctgtcacccaggctggagtgcagtggcgtgatctcagctcactgcaacttctgcctcccagtttcaagtgattctcctgcctcagcctcctgagtagctgggattacaggcgcccaccaccatgcctggctaatttttgtattttttgtagagataggatttcaccaagttcgtcaggctggtcttgaactcctgacctcaggtgatccacctgcctcagcctcccaaagtgctgggattacaggcatgagccacaaggcctggcctaagatatctttttataagcaaatgaattgtggtgtaaaaatgtaacggccatttttcttcccatagtgggactgattctcatttgttgtttgggggaggttttgatttgggttttctttttcctaaatccatagctcagcagccagctgtgtcagcactgtagccattttgccgcaaacatctttgccccaggtcctgatgtgtctacccccaagttctgttccttaccctttccctctgggtttcattgcctagaattacaactccagagtctcatgcaaaacatggcatccaaaatggaagggcttacagtcaggaatgtggaggtctgagaagcaaatggcacccaacagcaagaaaagaaaatcatcccaaatacttaaaggactaggtagtatggtcccattctatggatgagacaccaacagctcaggggcatatccaagggtaaacctagaccagaataaacacaaataacccaattcccagcctattcacctttcctgggttctggtcgggtgaactttgagtgtgtctatttccctaaagcagtgatcttcatgtatctaaggaagggaggagcagggagaacttcactggccacccagagaaaatgaacacccactctttgttactccagttttagggatctctgagtcaggataggcagactccacccttgctcaaagatgaaagagtcctcaacatcatggccttacttgagttcctgagtgaaggaaagtctattgtcagatgggcagtctatttctaaagaaatgggattcctatcgaagaaccaattatgccctcagggccagcggtggctctcttcacagagctcagcacagagcccctaaaagcaagcttgtaaaacacgtagtactgcccatcatcccaaccatgggaggcagagcaaaaccactgccttggaaaacaacctttatgtacacatgaacaaatagccagaataaatatctatcagatctcctcgggatattgaatgagggattaaaattgtagaggcgccattggttacatcaacaatcaatatgggccccagtgaaaatgttccagttactatacatttcctgctttgctgggggcacatgtagatgcgtctcacactagatgaattaatgaaagatgaaatggcccaccaaaactgttgtgcatattcaagagcctttggtctttgatgctgtttcgtctctagagcatcatcaaaaagcctcaagagatggagctgttggggtggtcagaattatttctcacagcgacaaatcactgctaaattctttagaaaaccagattataatatgtaattaatgaagtccacttaaaggtatcttccttatctctttcaattcccctgtgttagactgttaaacctgtgggtgagaataatgctactgatataaatgcacacacgtaaatataaaaatgtgtttatccatatgtgcataaaagtgttaagtatgtgtgtattcataagtacctatattgatcaatataaaaacacaccccaaggctctgctttcattatatgtatggcacatggtggggaagagctgtgtattgtaccctatattgcattgcacatatgcgtgaaaaagaaaaatcgcagaaagtaacaagtaaaaaccaaaaagacagtgtgtgaaacaagctagaatgatatagtacatatcatttatattattctttctacttttatgtgtcttaaaattttctataacagaaggcttaaaatttaaatgtaaaagataggaattccatttccctggtataattaaaataaattttacaatttgctatttatgggatatttcaaccaatctcactcacttcaaatatgaggttttttgttttttgttttgagacggagtctcactctgtcgcccagactggagtgcagtggcgcgatcttggctcactgcaacctctgcctcccaagttcaagcaattacctgcctcactctcctgagtaggtgggactacaggcacccgccaccacgccctgctaatttttgtatttttagtagggatagcgtttcaccatcttggccaggctggtcttgaactcttgaccttatgatccacccacctcggcctcccaaagtgctgggattacaggtatgaactaccgcgcccagccctaatgtgaggtgttaagaaaaaaatcaaataatcaccaacttggagatgactcctcataatgctggttttcctaaactgtgaatttttctttaacagaaatgaaatatgttttggaaggggctcaagcgccaggggcacctacagtagaaaatgaaccaaatagaggtatctattccccttcaggtggaaaattcatttgcccattattcttatcaagttaaaagctcattgttaataaaattatctttctggagattacagcttctccaaactgtccttaaaaaatgtgtaagccaaaccatattttccacagttgtagcatgtccttctaccctttgcccaactgacctgggcataaggaatacatatttattagagtagcctaatttaaacacaaataacaaggagggggccagggaggaacgtgcattctgaatgccacgtacacgtcttacttgttttcttctccattcaaacatgtattttgagttcatgtgttcctgtgcatgaagagtaaaacaaaaaagcaaaaagggggtctaaatcttgattccatatcctgtccaagacccatttccttgaggattgtaagcaatatgagtgcagggtgttggtagttgtggttctctgacacacctggttttgtgtggaccccagttgcaaagagggctgtcttggaaaacaagttcatcccagaataacaagcccctccagaagcaagaagtatcagccctgatgtaaatatgcggggtcccaagagatggcttccaacttccaactattatccagacatatctgaatctagcctctgaacctaaagccatccccctattacgggtaacaccacacactttcttggatccacacagcctgaccaaaattaaaaaaaaaaaaaatcctgcaagtgtgtgacatcaacatgttttcctcagctaacaggcttctctattcaccagcagccaaaaattttaagtggctcttaaacaaagacagtccaagcgaagaataatgatgtcaaacccaagccatagttgtggtgtgaacacaaaatctacaggacccaagttaaaaatgatttacagacagtttgatcagagtcagatgtgacatggtgtcttactggagacaagccagtggctatcaatccaaatcccctacaacaagttatgtcattagtcagaatcaatacattatggagacaattttctcttttgtctcttggcccagggaattttccaagttgagtttcatcaccagattgcaaggtcctcgcattacaaagtggctgacaggaatcacaaccactaactccctcatgtgctcttctggaggggcaggggaaaagtttaaggaataaatccaattagacatgggagtctccaaataacaagtccaaggcctttgttgtcaggtttatgttgaacttgtgtatcccgttcctgttgttgatatccctttcaagggcatcagtttggactctcagatatggaagcaacacagtgaagaggtccttagtgccaggtccaccccaggaattacctggtcaccttggcttagccaaggcacagggaaaatgactcattgataatggccaacttctagcctttggcctctgcatctcatttttctcctccctgataccagacagccccatttagctgcaagatcttcatgtacctgccctcttctttaatccctaaagaatggccatggcatttttaacataaaggcagttctgtaaaattcttcccgagtgccagcaggtgcacaatacttctttccatcattaatgctctcaaggatatttttgcaacaaagccccggtgctgtccttgtaggaccttccaaagccctcttacggggtgtgatagagaacaggaatgaaaacattcaaaaattaaacaaaatgagggtctcattttcctactgccatcaagcccttccaaaagaaaaattctctattcactcccatgtgcgactacaatgcaggatatttttccagctcactggtacttcataaacaccatttgttgtcatgtggttaaattaaaactgaggatatcaaacatcaaacagtatgttaatgtcaagtatgcttgaataaatagtaagagttcaattgaatggaatatgtggattgctagctaattaagcaagaagcaggtgtgaaaaaaatctaatttaggcaattttttataattaataatgtttacttgtagtacccttctaatggggctctagtttagcctcttgtgaattgctaggagtttactccagtattttaaaattataattgaatggagaattttatgggatatcaggtttccttgctgctgatgaagcactgtctatatagaaggctcctaacagtactttgtatcaataggatcaattagcaaatgatcctagcaattaaaacttaaaacacacacaggcataccccgcacctaaaggttctcttgcacaccccagtacaaggggagggagaagtgaatttggatgaaccaatttgaataagaatatcatactcaaacaatcattggataggaatgacgagagcttcggtgagtgtctgcaaagagcagcaacagagaacattctgttgggattagaaacaaaaaattaagatcatatctaaactgtcctggcaaattgcacacaaccaatcaattaatccaagtatacgtttaggattggttttctttccaaaaagccaaatggaaggagaggaggagaaaatgaccacagatgtgaaaacagacctggaatatttcatggacgtgacatatccaccacatttaattaaaaaaagaatgtatgagaacaatgtatccttctcaatctgggtcgagggaacaaaacaggactggattagataggacaactgtaatctctagagacagttccatgtttaatgggagcgccacatgtttgatatgtagggaagtaagtgggtgtcctggacacggtccactattcatcataataccacagccctgttcattcccagagaggagagttaaaaccatgaaaccatatgtagaatattaaaaatcatttaacattaaaatgcacattatgaaggcatgcactttggacaaggctacagtccaagagctctgagaaatctccagttcagtagataattgttgtaaaggtaaactgagttatctatatgtacctacacatgcggatgtttgcacacaggcgcatgcatgcacacacagagggactgtcatagaagcttagtcctcatctcttcaatgctgcctttcatcactctgttttccttactgatttctgtagtgaggtcaatatcaataattgatggagctatgatatctagagcatcagcacattaatttataattaaagatgagaaatatcagttcttctcccaccacccattatttggtattaaaacatatatatacacatatatatttaatacatagcagatattaaattgtttctcaagcagagtcagtaaccttactatattttcatggacttttcattgccactgaattaatcacagccctgcccctaaccacatagaactttatttcccaaaagagcaatgtttactttgctttactttgttggaactcaaagtacctattcagtctataacgattttgtgtaacatattttgttaagcaacattaaaagcgctcactcacagatcttggttagactgctttgcttatatgcagatttggggtgcttttgatctcatctagctcaccaacaagggcaaggctgagtctaaatccactgtgcatggaaatgctaacgactttggagattgagagtcctctatattttctcagttgccaaaaataatatatgaagtgaaaagtgaatgtagcaaacgtaagcatgcactcagggagaaatcctatctgtcaactttcagcaggagatgacagacagcagagatggtaccaactcagactgactgtgggtagtctgatccctgccattccaactaaagacaaaagggtggacaactgctatgaaggccaccagaagacattagggtcccttgctgaaggagacatgcctcacccatgaactcactgtagggccctagagtcacctcttgaggcagtcaccacagctctcccacagtgaaagatggggagggcatttactagaacagtaaacagcagattaagtagagcagagtgaaccccaacaatgtgtacctggccgagggcagcaaagctgcaatttcctctgccagggcatcagcaaagtgcgtcctgccctcggttatcctgactgcagttggcccctgcactctatgaacaaggaatctctcacccaactgatcatttggggcataggttgcaacagtgcaaggtgggagaagttgaagaaaaaaaaggacaggtaacgttcagccatccagccagaggtatgcatttgacccaactgcaggccaggctggctccttctcaaagggcaagagggcttttgctcaaggcctgaggctttagagacaaagcatctaaaggcttagagatgatccatggttttccaagtcagggatgaggctgcctaggcttttggagattttgattcattcacctggcaatttaagaacaggtgtatttggcataagtcgctcaaccctgctcctgaaggaaggaggggtgcagttgcaatgtattgcagggcactgcttttcttcccttcttttcccacaccatcccaagcctgttcctagaagctcctgggactcagaggaaatcactttccggactctaccctcatccacacccttgcaaacagcaatagcatatctacttaggcagaaagaaacggaactgtagatgcaagaaggtaaatgcaatctgagagatttgctgttaactccaaaggggctttattctattacataaagtataggacagaggtttctgaactgtctttatgaacaagcccgagttctttctcaaaatcctaatgagacaatgccttggcccatctcctctttgagttcctcagaaaagactgagcctgatcttcctgccttctgttgcaaaccttcttgccatctgggtgataagagagccagtaaagccaggcagcctgcatacctttctctccaaatccagatagccagcatgctggggtgtatgagaaggcaaggagaaattctccagactaaggtaacaaagctacagccacaacaagctgtggtgcccttcctgccacatggttggccagagattcttttctatagactgtcactagagggcctgcccagacaccatccctgaacatatataaatcctagagccaatgtcaacaatgcatagaagtaaccctggaaaagctgccatggatgctgctacaataaacggagagaaggaagctaatgaataaattcatcatcagagatgatggaatgaaatgcagatgggtctatgtatttgggaaatcaaaactccaactaatggtgcacacagcatgttgctacaggggaactaacatcgggagaggcaggaaaggaaaagatgaaatgtgtttattaaaccattgctaagaacagaggctaaggcaagagcttgaaaatctgtagctaagttttagaagatacaaagaaaaacggagctcttttttgggtagagaattggatccatgtacagatgctcctcaacatacaatggggttatatcccaataaattcaatataaattgaaaatatcacaaatcaaaaatgcatttaatacatccaacctagtgagcatcatagcttattactctaaactaccttgaatgtgtacagaacacttacattagcctatagttgggctaaatcatctaacacaaagcctatgttataataaagtgttgaaaagctcatgtcatttattgaatactgtactgaaagtgaaaaacagcaaagttgtatgggaacttgtatagtttctattgaatgcatatcactttcacaccattgtcaaatcaaaagatcataaatctatgtgtgttgggggcaagggtgaggatgcattgaaggactagtttccttactctgtctccatgaatgcagcaaagagtagcaattcagactgcagctctggagttgtgatgcctaggtttgagtttatgttcctccacttaaaactggggcaaatttcttaatctctcagcctcaggacactcacacgtaaaacaagggtaagaatagaacctgccaaataggagtgtcattgagaagattaaatgaggtttccagtagccaggtaaagcacttactatagtatgtatacttacagaatatatacacacaatatgtactcaagagtttgtagatgcatacaatatgcacttacagtatgcagcttacctgaaagaatcagcagaaaaactttttaaatgtccccaaagtataggctgtagtcagtatttttttctgcacataggtgggctatttaatgaaggacaggacacttcacagctacttaatctcggtgaatcatgatcgagcaattccatttgtggatatctatctccccagaagaactggaagcagggtttgaagagtaatttgtacaatgttcaaagcagtgcgattcaccattgccaaatggtagaagcaacctgaagtgtccatcaacagatgaaaggatagaaaaatatggtataaccatatactggaatagtattcagccttaaaaatgaaggaaattctgacatacgctacaacatggataagccttgaggacattatgctgagtgaaataaaccagttatgaacgaatattgtataatcccactcacatgaggttcatagagcagtcaaattcatagacacagaaagcagaatggtggttgccagtagctggggggaggggaaaatgggagttgttgtttaatgggtacagattgtttgtttgcttcagatggattctcactttgttgcccaggatggagtgctgtggcatgatctcagctcactgcaacctccacccccctgggttcaagtgattttcttgcctcagcctcccagcagctgggattacaggcatacaccaccacacctaatttttgtatttttagtagagacggggtttcactgtgttggccaggctggtcttgaagtcctgacctcaagtgatatgcccgcctaggcctccccaagtgttgggatgacaggcacgagccaccgtgccccgcagagtgtcagttttctaagatgaaagttctgaggctggatgatggtgatggctgcacaataatgtacttagcactactgaactgcacacttaaagatggttaaggtggtaagtgtattttaccacaaataatttttttaaaaaacttaaaatggtaaaaaaaaattttgattgaaaaaaaaaagaatctcagtgaatcacacaatcagaaagtccccttcaaatggagattaatggtaattgatctctggattctctcccccatattggagacaccttttcttaagacatctcaaagtgaaaccccgaaggaggaattgtctaagaagatttaggttcagttctgtgtaatgacaaactccatcaatgagagttaacaaattcctctctgtcccattcatgaattccttccttggtgtctaaaactggctccatttcttgcgcaaagcctaggaatcaggaataaagaattcatcaagccctgagagctagaaagggaagctgagatcaatcacctgtttcagaaaatagaagataatcgagactcttgtctccaggtttctcctgtgcttttgagaacaggagtaaaggcctgctgacgcttctgagttcctccaggtctggactccctcctgggagacaggaagtgcagtacccacatccatggagcacctatcccgggaggacactttctaaactgagatggtaacagggcaaagagtgtgttcaatgagagcgtgtttacttcactagagcccatcttagggcatagtaaatttatcgttgtattatttggaatttccttctcactcatgagtctcctttgaggcagggttgttcaaggctcaggtttggggacagatggatccaggcaccagtttccttatcacccaggctggagggcagtggcgcgatcacagctcactgcagctttgaactcctgggctcaagcaaccctcccacttcagcctcctgagtaactgagactacaggcacatgccaccgtgcctgacagcaatatctgtttcttggggttgtggtgaaaagtcaaaggggcgatgtgtaaggcaggcttagcacagtgcctgatgcatggcaaatgttagccaatattatttactatcctcaccacagagttttggaacagattttatgaccttcatattatcaagaggaaagggccacccagagaagcaagtgacttggttagggtaatgcagtctctctatgtcgttccctctgctggatctattctttctagtctgcttagaaagagaagcatccttctgacccagagaggcagttgcagagggctgcagccaggcagggctgaccacaggctctggtttccagatgaaccaggatgctgctccagattgcttgctgacatccccatcctaggctggtaccaaagcgtaagtgaaagtctgtcccctgctcttccattcgcttcgacaggagccttcatctgctccaccttctgggagcatgtgtcggtctcggagcctggcgctgaagcaggtgcgggcatattttaagctccagcaaataactttaattgagctctccttagacatatgaacccacagagcaattttttttcctcttctaataaaaaaagacccacaacaaaccagatgggtctcagtccctccccaacaccccctccccactcttcaggctcccctaataaatctcttaactctaaagaaattaccttccttgaagtgggtatgttattcggttgcatgactgtacccaagctgcctctgcgggccagaatgtgggtcagaaggatgcagcctgcagaaatgaggcctgctggttctggccaggttggtgcttgcattattgcttgtccataactttctatcaccccttacttccctgtgcctgctcccctcatgctgggtcactcactgctgctgttcttctccctttatgttctggtatctgcaacctccactttatttatttatttcatttatttatttagagacaggattttgctctgtcacccaggctggagtgcagtggcgcgatcacagctcactgcagctttaaactcctgggctcaagcaaccctcccacttcagcctcctgagtaactgagactacaggcacatgccaccatgcctggctaatattttttatgttttctgtagagaagggtctaactatgttgcccaggctagccttgaactcctgggctcaagagatcctcctgcctcagcctcccaaagtgctgggattacaggcatgagccactgcacccagcaaccaccactcttagcagtttcacctcaacaaaaattcccttcttggagtggaccttccaacacacctggctaatgtggaaaaatctagatggaattcctcccaccaaaagccagcttaactccttggcagcgtgtccagaaagagtgatgaaaaaataagccaatacctcctgtcaccaaaataaagttcagagacatcgtgggcaacagagttcagtctcattttgcagatccgtgttctctttaatgccccgtatgaaggtggcagcgggaacaagagggaaacactacagtgtgactggattccagaccccgcccccgaaaaaaagacctcaagaattgcccagggcaagagccaagcaccgcgctctgggttctgatttatgagcgctaaattattggtaggagggcccagaaggagtcgtttacaacagaaattattgcaggcaaatgttggttggtattttaaatcactcactaatattgataggttaatgcttgtcacacttgcttaagggtcacagggaagaaaaaaaaacacaaaactttatctttggcttgttactggctaagtataatgatagatacacctttttgtgtttttttttcctcgagctaagcctgctgtattatttatggttttctgagtcactggctatagcctgcatctggattttaaaaggttgatttgcaaaaaaacaaaaatagggcacccgtctagggaggctggtgggagtctgctctacagctcgagcggcccctccaagaaccctgggctgcaaggctgggcgcctcaggcggccagggccagatggccagggcgcattgttcccctttcggtggtagtcctgctgcggcaaataaagttaaatcaaaaggttagtgctctgcaagggggtggcagagctggctccagctgacaagagacaagcatcctggacagagagtggggactacgtggctgttccccggaatgcaaagggaagagagctagggtgcagaaatcaacagagaggagcatgctgacctggagcggggctttccaggcctcacgtcagacaggctctccctgacaacagcaatcacggatcacaaggtcccctccttcgtagaccccgagggagccaacaattacaatcttggtccacccatgactagggattgagggaggcaccatccctcaccttgggtctgagatgggaagagctgcctcagacttccttcagcaaacagcaccttcctttgggggtggctttggggtggtatattttggagggggatggggtgtggcttgggaggatcaaatgaccctcccctgtcatcagtggaagcaaagtttagaatctggatgggcagcgtaggattacttctaatgggcacataacagcttttaagcctgacacaaaatccttggattatttcatagactgtcagagcaaaaaaaggatttaagagactatggaaacccctgcctcattttacagaccaacaaaagggagtccagagaggaaaagtgatttgctgagggtcacacaggaagatgaggaagccgggacccacgcccaatgttcccgggcactgtgccccaagctcaaagtatacatgagggcgatggtggccgagtgggccacgatgtgtaaaatcacaggcaatataagccgtatttcaaagactaggggagacgatatttcatatgaaaactagcaggtacaatatgcaatacaatgcagtttggctttttttttttttttttgaaaatcacctttttcataaagcacatttgaacttgccttacatttcaaaataagtccctctctccccaactcccacccacccttgtcccactccaagagcgggagctttggtttcctctgcaggttctaccctgggctctagctggactgcacatttttgtattcctttttcattgagtttccaaagcacagtatttacccaggaggcctgcagtttccagggtatggaacacaattaggtgacctgcaaagtgttttttatttacctgagagaaccaggctgtccttaggtgccaactggtctctcaggtaaatatgaacttgggcagacttaaaaaaataaaaataaaaagctaacattaagatatgtattgagggatttttaaactctgattccatccttttagctagatacctttctttcccctgcccagcctcattcccctaaacagaatattactgaagccatttcagtgcctttgatcctgttctaatctggatcatatttacagggcagatcttctgtttcctaccacactggactggcttgaatgcacagttaagcaatatttttgacttccctttgaaaatttaggaggaggtgatatttccaaaggtgtgcaaaaccagcgatgaagcaaacttaactttttaaaaatgcaaactacattttaataaaagttaacttaaaagaaaacaaacaactctcaaatcacatttccatcctcaaatctgtctgctttgttagattgtttttcccccttgaagctagtctgtttttcttttgtttttctttttagttttttgagacagggtcacactctgttgcccaagtggaatgcagtgacaggatcatggcccactgcagcctccacctcctgggctcaaacgatcttcccacctcagcctccctagtagctgggacaacaggtatgcaccaccacaaagggctaatttttgtattatttataaagacagggtctcactatgttgcccaggctgatctcacaaactcctgggagcaagcaattcacccacctcagcctcccgaagtgctgggattacaggtgtgagccaccacacccagcctaagcttttcatttctattagaaaacctatagggctttctgctcatttccagaaaatgtgaggtctgagcaccacatctctatgagaattccaaatggaaacaatgcaaaagattttacagttcttaccaaacacgcaaattttagagtaggaagaggcaggtgagatcatgttgtctgactctgattttacggatgagctcactaagcaccaaggggaagtggcacaggtcacagatggagtgggcaaaaccagaccaggctccaggacccaagactcctcacctggtgctcttgccagcatctcccactgacttcctgtcatcccactgctgatttgagcaacgagtgagttcatcctgctggcctgaccatctccagaaagtaagagtaaatgaaagatttgatccaagtacactgtatctccttgtgctgactatagctgaaacaattgctggagaagtatcccagttatcaaagtgaaaacttctatccttttacctgattgggaaaagctgatttagctatcaattagtgcctagagccagaaaacttgataaaatcttagtttgaacttttaatgtggtgtggactaaacaaaaaactgagttagaattttgctcttcaattaagtgatttaaaatatattttagttagtattttaaaaactatttctgacaatatacaaatatagtaacaataaagacactggaacttggacggcaaaataattatgagtccctgctttccttcctgccaaactccccctgcccccccatcctactgtagccaaaaaaatacagttttccaagaactgcatttttctgacatcctgtgcattttgagatccggggagacttcccattttccacactcagcactttgagggccatcagggtcgaagcaccagtattcccagcagatccctgatagctcatccagaacaatcaagctaccggctgccccgcccctcttgttactaagctgacatcaatttctcaaataagcattaccttcagtggtggtggtgtttctaccagagaaacaaagcaaagagattaatcagagaccacaaagttaaagcagttgcaacctcggctcgaaatcccactcctaaaacaccatacacccaagtcagaaaaaataaaatgaaacttcacatcctggcctcagaagcgcctgttaacccaggaactactgcgctgaaaatcacatcctctgctcagcccgggtgagcagggactacaggggaaaatgaaagaaacgatacatgtttcaaattttacagcagtttaacatcatgcaaaactgaaaaggccttggaggtttcattctcgatgaagtttagttggtacagaatcaactgtctcagtaaaacacaccacaggcacataatgtaatgtagacagacactgaaagcaatatcagattcctttcttatcacttcttcaggataaaattcagatgtacatttttcccggttaaatagtgcgacaggattaagtagacagctaagcctttataagttgaataatatgctttgcaggttattaatatgctgatcatatacgctggctttattaaatgaaatatttgaaatgtacagagcctgatttcattttcagttttaaaaactgtgctataggaaatatttttgtataaacaagattctaagagtctttcatcttttgcttgcctaacccaaacctgcaggattatgttaaatgagtatttatgttcccaagcaacattttaaaaagttttattttcatttctacagtaactctacagtatcctgagaggtaaaaattgacacagtgcacacgattactggggagggttaataggcagaaaattatcccagaatctgaaaattctgtttcagcaaagctgataactggtgatttcagatttgaatttgagcagctgccaaagaaaagttaaaaattacatctaaaggatgaacagctgtggtccaaactatgctgcaatcttaatctttatgaacttcttcgataggattcaaaccaaagccagaaacgtccacagagatcccttctgtagagtcagatttactcatgttcttagtttggggtcttctttaaaataaaataataataaattcaattactatgaaaaccctcctccaatgaaaattaaaaattcaactctcttgcatcatgctttttatgaagatgaattaaaatgtcttcatcgcttttcatagatgtggttgaaattattaaattattattgaatcaaggtcttgaaaccacttgcagtctttttccatgttctttcacatgctgtaatggagatccgtaaaattttgccaatttggaaacaggtccaatagatggttattaagcactgctcgactattaagctttctaacttccataatattttgtagtcccctatagaacccaaactaccattcaccgtctttagagtcactcataacattctgggcaaatccttaggaaaatgacacagagttgggctgagctgccaagacacagtatatttcgactgaggactaataatatttggaaatgatttcctgtatttcttctttacttatttgttaatctgatatagtttccagagtttgcaatgctcatgccttttgtattctaaagagatgaggggctttcttaaaaacaaaacaaaacaaaaatcttctttctctagcctgattctcacttaatgctgaaggtcttttaaaccttctaagtaaacataaatgtgtatacattagggttgcttgtgttggaagaagacaaaaataaagattggccttttcccggtaaacatggactcttaagcctctaaatgatttgccaaacagaatcggataataaagggtttaaactttgccactttggggttaatgtgaaaggcttgtcaacatcagactgtttagacattaaaaggaacgctctgtgcacctccttttaaactccatgttctcttgagttgcagctcccagtgaatttacccagctgtaagtgattccagatgtgcagcagtgacaagcttcagtctcagggtacttattcatttcacattaaaatctcatgttcccaggtctgagctgttatctgactgagatctgattagggaatacagcagaggcatttccaaacccagagcctgccctcattccctggcacggatctctgactatcaggcagctctgtgcaagggagaagtggctcggggtacagtgaagggcagggcggggtttcagagctgtccccttaatacgtgcacatcgcatgctcccagcgggtcaggtacttccccacagtttatctcatttaatcctggacagagcagtagacacttgagcccagctgaacccaattcctctatcaaacacgagcttccttcccccagttaaagggggtagggcctgtgattttgcacattttctacacagcaccccacatgcagaggggtgcttgataaaggcatgaggagtgataattgattttccaagccacaaaaccctcaatcttctctctcgcccccagctatgttctgaccacgatagaagaaggtaagtagaagagcaagaagaggaagaagaagagaaagaaaggaagtcaggagcatgaagaaagcaccttcttcaaacaagctagttatgcctttgttcccggacaaggaagtggtggtcctctctgatctcacccctagcatgaacagggttcattccaagtcagctttgacttccttgcccgaagtgcacatgtacaaatgctattggctgacagtttcttctatgacacgtgtcaaagacacattttcctggctacagaaatataaggtgagttggggactgcagacagagactaagataacatgagtacctgagggaagaaagcaacgtctgtgatgcccacagaagggggataagttagggatcattattatttcattattttcccctctagcctgacttttggtttgacttgagctttactgcaatttttttttcttgaccctatcccgttgtcactttgaagagggagatagcaccacaaacccccagctgatcaactgtggtcacaggctgctggacagccccagaggccatcagtagctcctgtcaccgaaccctcgtcacactggaagccccagaaactatgcattgaatactgcagccccctccccatgtgctccgtctaccccaaaaggaagaagaaagaatcacgcaaaccccagattcaaaatggagaggattaaaaagccagggaagccccaggcccaccttgaggggcctcgggttgggggtaacgtggccgcgccacatggaaggagagcagcggcatttggtttggtggtgggcagattttcttttacgactgctaaatgcctgcctttctccccaagcaattatagtgctgtttcccatcaagatggctgttagctgcggatctccaagttgctgcaaataaatcaggaatgctattggcagctggctgggagagcgaccgagatggtcatcctggttatcccatgatggcgatgaggggcatcgcagcaatggtccaaaccaagctgtttctgggagctaaagaaaacaaggtgcagccctcctgagccccacatgaatgaaagcggaaaggtgcgcttcgccctctggctgcaggttcagaacctgagcacacctaggaaatgggacccccacaacactcaaccccgccatggcatgtgctttgcccaaggaaacataaccaaggcgccttcctccggcacatggagtagtatcaaatgctgtcattgcagttaatcagaagcaacacaaaggggcccttcggtgcacagtggacacaatccatgcggtaatgaaagcttgtaaaagacgatgccaaagacgtgcattatgacatggaaggtaaataaagggtctgacgctgggcggggggcggagtggtgcgggttggttcactctgcagcttgcagtggcttcaggctggaaaacgggctgctcaaaccacgcagcacccttaatcttgtgacacggagggttctccgaataccgtagctcatctgaacacacacccttgtgaaggatccacatagaaaatgatggtgagattcctgtgtggctgcacgaatctctctgctggctctgtcactgtcacacccaaagcccacaaaaccatcccaagttgctgtgtgtcccgcagatgcaaaaagcatttcttccacgacagtgtttgagggtgaaaggagagaaaatgatttgggcaggctgccaggggtatgtggaggccaggtgggccgtgtcctccaagggaactgcacgctgggctaagaaacggtccctgcacgggacgagcaccatgtggcagctgcaaaccctcgccctgcccccggccctcgagtcacattgtgtcatgccacacggcattcggatcaggagatggctgtggcgtgctgcgtaatatttttaaaagcccatttccctgtttaagggggaagcaggtggaacacaggacccctgaagggcagatactctgaaaggccccacaggcaattctccaataaaagagagagcagggctggcatatctcccaaacttacaaattgaccttctctcttgatctgggacttaatgcctccaaaccaaactaattccaaaagtcaccttctcaacttctctgtacaattttttttttaaacaaatgaaagctcaggtacagcctccccttgcagcccttctgacgtccttagccactcaaattaaatctgaatggttcgtctctttttattatacgatgggccatatgtcaccaaaataaaaacccagctgaaatcccagtacagataaagggcatgaaaggctgttccggccacaaaatagagaccctgtttaaatcttattaaacaataacacccacccaaccatcccctcccccttttagcaaaaaaaattcaggaaggaaattgtggttaaatcatctcatagtttggcaaaaacttctacctctgaaaaatgaaaaggaaaaaaaaagcttcattctgtgctggactcacacaggctaataaaaagcaggactgtattgctttgcactgtagctgtcaaattctcagcaatgaaatacagatcctgactctctcattcccttgggtgctaccccctcagaccaccaaaaaacggaaaagcgggggtgggaggggcatcctttaccctctcccattccagagtgaaccttatttgttgctctgttttattttgaatttttgtttcttgacctgaatatctctcttcctgaagagatacaacacgtttccactgttgtaaacacagttaaacgtgtaaggagctgttgaggctgctgctttaaagaactatgattcttccttcttttaaagagagtacacactgacattcagagaagtccagacattgcaacaatggtaagcgtgctgtaaaggaaggaaggaaagaaaagaaaaaagaaagatcaaaaagaaaaaacatttccatttcacaaggtcccccagtggcctccaatgctcctcctccaccatcaaaaattcataagggggatcagcattctttaccgaatggatcccagtggcaccatagaccttgctggggagagaggcaataaatatcgaattatacacctcatgggaagaaagcactgaagactcagcttcaagcccttcacatggtcccagggggagctgctccagactccaggtccagtgcagaaaggaaatgggtcaagtgtgtcaatttctagaccgatgacctttgacttgcctaatgacactgggaggccaccacaaaaaaaaaaaaaaaaaaaaaaaaaagatgccaaatgccttggaggaaagcagtgggggaggggtgtcattgggaacccatgagaaaactgcaaccccagcactgtggtggggggtgacccccttcacccctggagtaactgtgacctgtcctggggaaggtgtaaccagctcagtggtagaaagtccatgaacagagaacttcaactaccacacagttttggttcccagctccaggaatggctttgcttctgcctgaaacttgaagaacatctcgtttgttcctctctaagccttgctcctccctgctctgcccccgaagcctccttcttcaccctccctgatgacccctgatttggctgccaccacctgtgccaaccacgcagtgaggtctcaatgctctgctgccttgcatcactccctttacacatgcatttttttcatctccttgcttctaacttctaagcaacaggagtggcctagaccttggccagattcctgcccccatcccatcttccctcacctagcactgtatcaagagtacgaagtcgatgctctgtgattcctgtcaattgttgcaaggcaaacttccattgccctatccatttcattttggaactggagtatctgggttccaaaatgaaatggatagggcaatggaagtgggaaggaaaagcatgaaccaatgcagtcagacaacatgcacctgcatttcccagtgtaaaaacctgtggaaggcccgatgtggtggctcacgcctatcagtactttgggaaaccgaggtggatcacctgaggtcaggagtttgagaccagcctggccaacgtggcaaaatcccgtctctactaaaaattcaaaaattagccaggagtggtagcaggcacctgtaatcccagctactagggaggctgaggcaggagaatcacttgaacctgggaggcagaggttgcagtgagctaagatggcaccactgcactccagcctgggtgagattgagactccatcttaaaaaaaaaaaaaaaaatctgtgtagttattcatccagcaaaacagtatatggaatagatgcccagttctcctttccttaaatggaaagatctagatgtaaattttcaaaataatctgacagttaaatgcaaattaagggtttcacaattggataatagaataaaattttttgcaaaccaaaggctatctggtagagtctaacatagctcgtggactaagttttacaaaaggtacctagctgcatttgtcacggagggaggtttcctgtgatttcagcccctcgtattatatataaagttgacccaattagagtttggattgggatgggcatttttagttctctgctctcagacacctgggcttcagttcccatttatgcttcaaaaacagttgaagttcttcttttcccatacaccaatgttctgaactccactgccaattctgtgagctattccttcagacatttgctaaatgggaagtggtgagaaaactgcctagaacacccacactgaactgctgattctcccagttcccagaatgctggctgggtgggactgagcctgaacactatgtcagctggagtccacagcacaggccccagccagggagctgtggccccgctccctcatcccttcaccctcctcctcactccttgccccttgaacctccaccaaaaagtaagtggtcatggggagtgaaaggtgaaactcagatcattcccaggggaagagttttaatgtaagactccatgggcaggacactgaaagaaacttctatctaaaaggaggttggagaactgtatgcagatttcattgatctgcatttataccaccttccaaggccattgaagctactctgtggcccctaaccttttaagaatagtaacacaccagtgctgcctgattttcccagcaccttgtctcccctccacctctgagaggtgctgggggaaagttcagggtgatttaaattattttggttttcacactatagaacccaccatgtaattaaacagaaacacaaaagagtgacctatgcaaaaatctgtgctctattattttgtaacatatgtaaacatagtatatacaaatgtgtaattacatatcaatatatctttatatattatgttaaatttataaatttctatgtataaggcttatatttgtcagtaaaataggtacaataatctcaattctctggtaaaaaataagattcaaagcggtccaatgactttctacaaatcacttagctaacctccagtggaaccaggaatcacaaacgcatcccctccgcatgcacgagcacgttcaaatcacagcatttttacaagttaaagacggaactcccatatatcaaaaatagtgtagaaatggtcgcatacattatgtcatatctacccacccaatggaatagtatttcccatttaagaaagatgaagaatctatgaaagcatggaaaatgtgcatcattgagtgtgaaagttaaaataacaccacaaaatcatgtggactcaaacgtgtaaaaatgcgcctgtgaaaaagacggaaggggacacacaaaagcgaaagtaatgatgcaaaagggctgaaagttacagcgacttttttcttcttctatgttccagacttttttgttttgttatttcgttttataatttaaaagaaaaccttaaacagaagttctctgactccaggctcagcgctgcctccaatgagaaagtgtcattcactctcctgccctcatccccagctgtctactgggaactaatttgggactgggttgtgggttcctaacactacccaggaagctggaatgacaggaaaagccaggactccctagttccaatccccagcattcaccccagccggccccagcttcctcagcacaaccccgggctctagctgtgtatagcctctgctcatcaggggcctcgctgcttatgaattatgaaaactcgctgggtgtgcccaccggtgcatatggatcagctgacacccgagtgctgaagacataacaaaggacttcaccgcttggtatcaatgtcgatttaaaaatcaaaagctttgctttgcgaactttatccttccacgtcagtggggcgctatttaaaagataccccaaaataactgttcaatgactgcttcccaaaaaattacaactaagcatttctttagcagtggatagcagcattccctcaacattggccaccctgccatgtgcggggctttctcctttaacagcacatagctgcgggtaccaacgtcaaagacaggaaagagtaaaccaaaaggtgtgtacctttgtgtgattccatgtgtacttgtgtgtaaactagaatccaaataaattatttccggaatgcgaaaccgagaaggagctgggtctcccaaatttgggaagattgtaacaactcaggcatttcacagagcactgtgaaccactgttttactgaaacaatattggctgacttaatgtgagtgtcagattagcacacagttgcatcaactatataattaagagcatatgtaaatatacccccaaaacccaggttttccaacatttacaaggcacagagcctgaaaaaaaatccataagacccattcgcggctgggcgcggtggctcacgcctgtaatccccagcactttgggaagccgaggtgggtggatgacctgaggtcaggagttcgagaacagctggtcaatgtggagaaaccccgtctctaccaaaaatttaaaaattagccaggcctggtggcgcacgcctgcagttccagcgactcgggaggctgagacaggagaattgcttgaaaccgggaggcggaggttgcaatgagccgacagggtgccactgcactccagcctgggcgacagagcaagactccatctcaaaaaaaaaaaagacccatttgcctgattgcacctcagaaacccctgcttctaggtaatgaaatttgcccagtattctttgatatctacattttgggaacagcccaaggtttttgcttccagtggaggccttgagatttttacagagtgagatctgcacagctcagatccacagccacccttcctgggtgttctcaaagatttttatccacccacctcctgaaactgagaaacttctttaaaaactcagcttctgaaaaaaaaaaaaaaaattatggctctacaataagcaaaggaaaaggtatctttcttctgtctccagaagatcttagggaccgtaaactctgctcttaagggagacagggggattgttttatatttgaaaagtgataaaacagaactgagcaaggcatgggctgcaaccaggaagaaccctaccaaactggaaattaaccaggataactcaagcctccaacgtctcaaagccctccagggctccatgcagctagacctcccctcacttctctgccaacaccaagtgtaagagtgccctttagaattggctgggaatttagctgctgccttctctgaaatacccagtggctacatataaaatatacagtgccacagcagatttccttgtacatgatatccacataaaatttccccatcagtaaacccaggtgggaggcctccagacagcaaggcagaaccaacggtctggggaagtagagaggtttccagagtcagcctcgctctaatgacgatgccaggcacatacttgagaacatactttctgaacagaaaaaaaccctatagtgctgccactaaatggctgtgtggccttcggtaagtcacttaacctctctgggtttcagtttcctcctctgtaaaacaaagtgttggaccagatatataacaaaggtcattctcaaatccctgacattcactgaaagattattcatggtccagccaggagaggagaaattgaggtggacaggaattacgggaatcttgctatttaagcaaggaagtgaggccagacacggtcgcttatgcctgtaatcccaacactttgggaggctgaggcaggccgaccgcttgagcccaggagtttaagaccagccttgacaacacagagagaccccccatctctacaaaaaatacaaaaattagctgggcatggtagcatgcgtctgtagtcccagctactggggaggctgatgtgggaggatcacctgatcctagaaagttgaggccgcagtaagttgtgatcacaccactgcacaccagcccgggtgacagagtgaaactctgtctcaaaaaaaaaaaaaaaaaaaaaaaagtacatgaggggttgggaaggtttcatgagcttaatgattacatgtgacatagacttaagatatgcatttatttgtacaacacatatttgttgagcaactattatatgctgggtatacaccatggttcttgccttcttgaagcttatggttcagataacagttgtctctgactgctgggtccactttccttgcctttgttcacgcaatagcccccacctagaatgccctccacctgcttaaattctaccatattcaactcccagctccttcatgaagctttcctgtactattaatgcagtctactctaacttctctctcactgggctgtagtatttacagaagcattgttgaatgtggaatcacatgactttcgaattgctgttaagtgcccccaaactgtcaccctccctagattataaactcccaaagacaggggcagttctgtcatgtccaccacggcaccaaactcaccagtttctcaatatatacaccttgttcgatgcttgactgtgtgaaaatcttggttaaactcagtgggcttgtttactggtcatttgagagttcatttttatgtcaacctttattttgtaaatctttttcaattggattattctactttcctcatatgatacaccaataacaacaactttaaaaaaaaactgactttttagggggatggcacaatactctgtgattcatcaatgtcactaacaatactctgtcagttgtaacagacataggtggagacggttcctaagataaaagctgaatggataagaatagagttgattgtaagccagcatgttccaagatttgtaagcaactgaactctcttgttaaataaaatcatataaagaagcccagtgtggacaaaggctctgccaaaggcaacatggggagcccaggcctccacctggccatgacaccctcacccccatcagctctgtgacacttttctgtaacccatgaggctctgctgagcacaaccccaaagccactggtctagattttaccctggaattaaaaaaaaaaactgataatttgcatctttctcataaaagcagaagaggaagataaggctaaagaagcagaggtgagggtaaggacagaaagagcaagaatattggaatctgacttagcaaagagtcatatttattggatattagttttatatgacttggataatatgatacatatatgaacatcacagatataggaatgtttttatattaaataaaataaaacatgtattgagaccttaactgtgtgctcaaacactggttggtactattatttcccgccattttgcagataaggaaactgaggcacagagaggctcagtagcttgctcaagttcacacagttggtaagcagtatgggagctgaccccaggcagtctccagagtccttctcttcatcactctatggctggctctccaagtcatttacaccttcaaaacacaaccatcgtatcaccttttatgtgctcgacactttacagatttctaagaacttctatgagtggcatcatatccatgcccttcaacaatcatgagtgaggattactgccttggcttttcagctgaggaaactgaagcacacaaagattaagttttatcaagaataatacaatcaaaccagaacccaggtctcctaacttccaggttgaatgcttctgtatcgtgctactcttcttgaacacaaactgcataagaacccacccccattccaatgccctccaaaaggtgttcattgtgctccctagaagcccctgccctcaggggcttcaagcattcatgtgggctccaggtagtagctgtgtgtctgcagacacacaaccacacaggtatatactacagtaatatacaaaactcataatcatcttcattgtcatgtcttgaggagatctaccaatttgctaggttttttatagagactctcataattcactgaattttttcataacataggtgcattccaaggacagcttagtggtgtccaggggtttttcaaaagacctaattcctcaggattgctggttcctcccagcctagcacttcttgtccatggatccatttggccactcactggatagcaggttggggagtgtagatagaagagaaataaagagggtagagcacatactcccaccctggggctcttcacacagttctgagagccctgggctcatcaaagagctgcccacagagccacactgagccagagacaagcagacaagctttgatcttcccaaggctccattagtccctatgtcccagccattagtgagcccctactaatggagaattccccatgcacatgcagaaatattctaggtgatcacacatgcacacatttaaatgagttttataagtccatatacgcaaatatgaatgttgatacatgcattaaggagcatattttaatctgccaaaacttatctctggggtgttaccacattatgcactggggatgagaaacaagggaactaggaggctcatatgatctcagcttcagtcaatgaataaatcatctgctcatatttattgaataacttccatgtagctggcattatgctaagttatagaaatagaaaagtaatgtgatctaatccagccaggaatctacaatctagttgaagagagaattataagggtaacattttacattttgcataatattttctattttacgaaatgctttatcagataccatcctccagcattcacaagacatttgctactaggaccattttgcagataaggaaaaccaaggctcagaattgatttgccccaagtcgcataactaaatagtggaaaagcaagaacttctactcagttctttagactccaaatccacagctctttccaaaaaactatgttcgttctgcaaaacaagactaatacacaaaaactaaactagcaacattgtatcatcctatcatatttaattaattatgtgatatccaaacacaagggacagttgcggtgtagaggaaagaacactggtcttagagtcaggcaacctaggctctgtcacttactgacaaaatatttggctttgcacaaatgccttagcctctttgggcctcagtgttccataaaatgagtctgatagcttccctagaaggttattacaggcataaatgcatgtgagaatgctttagaaacagaaaaggatgaattaaatgtgactcttcaggaatgagtggtgaaatagtaggaagaggcccttctctgctgggtgttgacagataacaaactcataggatgggccaatgccacatcacagcagctttcaccatctcccatgtgacattaaggcaaggttttggcttgcaatacattcaaatctggattataaagatctgtgtcgtagtaaacttgtaaaagggcaagacctcatctaatcccctctaaagatgaaaaaagacatgatttataaagtatgttatttggcataggaagctctgattctttaaataaatatccatgtaaacaaggggtttcagagactatagacattttacatttgtcctcatatgccggaggcgcttgggaatcaacatgattcagatacatgacaacgcaaatggcttgcagacaactctcccacatttacaagtagtttaaatttctgaccctgtctctttccagtatgcctgcaattgaaagacattgtgtattccatgtaaataacaggaagatgggcacatgagtctcccgttccgtaagctaagtggatttggctttctggataagagagccatgggtggccttgctcctatactcaccagtgagtaaacatcagaagcaacagcagcagcaaggcagcctcaccaggaagccttacactgagagctaatggctttcctctctaccagttcacttggcctaggggtcaacttctagagcctaaagctgcattaggattggcttggggattcagtccctagtggctctctcctgtcatctcctcttcccagccttgaaggttgcagtagaaaaggaaacctgagatcaggaagcaagatctaatttgcctgcacgcagtaggtatacaaagacatcttactgaaactccagttttacacagccagtcatgttacataaaaaaatgtccttatacatctgcatgtatataatacagagctatgggttatacacacacacacacacacacacacacacacacataaaatcaatagacacatttctacaccagcacatccttcctctgagtttaaaataccctatttatatgtggattgttatattacataataataagaaaggtctgttaagtcaaaactttacaagatcatatgtaacgttgttttaaacagaaagcttaaaatgagcaatgttcagtataatccaagaaccctcctcaatgtcaatctgggatgaaaaattaaaagccagatttagccagcttggggccaagcactcatgttcagattctacaactgtgctgtaagaaaacagcctgtctctcttatcccaacaaaatctactagctccagcacagaatccaagtcctctgtcctttcaagccaagaaaaggggcagtccttaccaccacaatggaccagcctggaaatattaaattgactcagcccatgtcttcttagatacaacttaacaactctgagtttacaaaactcagccaaatggcatcaggcttcagcataaacttttgctaactagcccacatagttcccatatgctacgcgatgttgtttgagccaactcagtaccttataattataaacacacgtctttcagctcttctgtgtattcttcccaggcagaacggaaatatgtcacttaaattagcacttggagtacagagtggatgccaaatttgggttagcacaaacagggtaaataaagcagcaccaaattaaaatggtaaaataaacttctttatgctccagtggaaactgctaagtcctagctgaatggcagctaatgggtctgggaaaaggatatccctcaaactgtagctcttggcttttgaatacagttttctcatccaaggatctcgaagcaatttcttgcaaaactcgagtagtgtgaaaaaaataaaaaaaaaggagatgctgtttcttttgcaaactcttctgccatcatttttcctcagcattctcttccaataatactgggaaagtttgtatttttatccttatttaattcatggggagagggagagattttaggggaataaatgaaggcacgtaggtgggggttcatttggcaaaagccaaggagcaagaatatatcacagaaatccaatcacaataagcctcacagagagaagcctttgtgcctattctgtctaatcagaaccaccacctattgaggcccattgtatgccaggaactgaactggaagacttttatagatggtctcactttcttcccaccacaatcctgtgagttggaaattatcacctccattttactcatgcattctgaaggtgttctgggaacaaagactggaggggtctggaaatgggggcagaaaatagaggactgccgggtgcagtggctcatgcctgtaacctcagcactttgggaggtcgaggcgggcagatcacttgaggtcaggagtttgagaccagcctggccaacatggtgaaactccatctctactaaaaatagaaaaattagccacgcatggtggcgggcacctgtaatctcagctacttgggaggctgaggaaggagaatcgcttgtacccaggaggcagaggttgtagtgagccgagatcgcacaactgcactccagcctgagcaacaagagtgagactctgtctcaaaaaaataagtaagggacagcaaaaacaaaagggagagttcacaaccacttcattcatgatgacaaacactgagcagcaatagactagctaagcaaattgtggcagagtcattcaacagaataccacttggcaatgaaaaaggaacaactgtggatacaggtatcaatatgatgaatctttttttgtttgttttttgtttttagacagagtctcactctgtcactcaggctagagtgcagtggtgcaatttaggctcactgcaacctccacctcccgagttcaagtgattctcctaccttggcctgacaggtgaaaccctgtctctgctaaaaatacagaaaattagctgggcatggtggcaggcgcctgtaatgccagctgaagctgaggcagaagaattgcttgaatctgggaggcagaggttacaatgagccacgatcgcgccattgcactccagcctgggcaacagcgtgagactctgtctcaaaaaaaaaaaaaaaaaaaaaaaagcaaaaggcagtgtataggccaagaccagatgcaagccaggagtggagaaagtcttttccaaacaccagctcagtggagctgaactaggaactgcacaacgtgtctcatggttgtcatgccacctccatttggtggtgcgcttggtcagaacctagattaagagagtggagaggattcaagtgtcgtttgtattaaagccacagacccatcaggcccaaaggcaacagaacttctttaaatcaaaaatttcatatttaaggccaggcatggtgggtggctcactcctgtaatcccagcactttcggaggccaaggcaggcaaattgcttgagctcaggagttcgagaccagcctgggcaacatggtgagacttcatcgctacaaaaaaatacaaaaattagcagggcttggtggcacatgcctgtggtcccagctacttaggaggctgaggtgggaggatagcttgagcccacggagcagaggttgcagtgagctatcaccccactgcactccagcctaggcgacaagaatgaggccttgtctcaaaaaaaaaaaaaatcatatttggaaattaaaagaatatcacaggcaaaaggggagctgtgctggtcaatgtgtggaaagggacccagctttgtgtgctgagttgatccaccacctttccctgcccccacctccttcagtgacataataattccaaagtccctacggacaccaaaggctctcaatacactgggaaagtggaaaatccactcccctgaaaaacagaagatgaggtcattattcttccactaagtggtggcctcaagcaagtcaatgaagtgcccagaaccttagttttcttagctctgtctgcactgtcaaccacctttggataagaggtgcaaatgagacatcactgaataaatttttaagcactttgcaaatgcccagctattaggactcctcttccctataaattggccacatctgttagcagacttccagttcaaaatgaccttctgctaacagcccctatgcagtttcccctgcctcttactacaagacctagagaggcaacataaaggaaagatgttcatagcaacactgaaaattacttctgaaatgcatctcaatttcattcactgctttccatctatactgccaccctcctggtctgagccatgcccatttcctttttatgtctttgtaagagccaccttgactgctctcccagttgcatttctgctacactctgtctcaagctactttccagttcattcttcacgcagcaaccgggggaaactgcaaccactgtgtggaatgcaagcttgagatgctccctagaacacagaggggtgagacaaaggaatgtaatagaagaagcattaaaaaatgtaatacagtaatatttttctgagctgaagaaatgtatgcaaattttaaatgtccattatgtcttttgggggggtgggggaagcttattatgttccaggaataatcgatgaaaatctaggtgtacccaaactttcctatctcaacattaaatgctagaatatactgggcaatgtctaaatagttagaaaaggatatggcctaagagttttacagccactattttgaaaaggaagacctcagagaaagactctaaggtattcaaagtgtcagaaaacataggacctatataccctgcttgacaagattattaaagatgcaatccaacattagaaaaataaagaaaaattaaaagcttaaaatgcagatatcataatatgaaggggactagtgaggaacactaaaaccaatcaaaatagaggtaagcctaataatcaacataaatatgactataaaacttacatattaaaaataatgatcaaaatagaagatacacgaaaacttgatacaattatattagtctggatatagtagccaaatttattatttaaaaagaccaagaaatggcaacagaagaaaagaataggaatgatgtaaggcaaaattttataaaactattgtgccaaacagaaataggacttccacttatgactgacactaatagaaatataggctaaaaaaacttcttgaaaacaatttaatagtaatattaaagaagatatacattctattctactgtaaagacacttggacatgtatgttcaccgcaacactattcacaatagcaaagacatcagatcaacttagatgccccaaaatggtgaactggataaggaaaaggtggtacatatacactatggaatactatgcagccatgaaaaaagaacaaaatcatgtcttttgcaacaatgtggatacagctggaggccattattctaagtgaattaacacaggagcagaaaaccaaatgctgcatgttctcacttataagtgggagctaaacactgagtacacatggacacaaataagggaacaacagacattgggactacttgagggtggagggtaggcaaaaaaaactacctatgtgtgctatgttcactacctggatgacagaataatttatacaccaaaccccagcaatatgcaatttacccatgtaacaaatgtgcacatgcaccctctgaacttaaaataaaagttagaaggaaaaaaattaaataaataaatacctggaataaaatttcaattccttgtaatgaaaaaaaaattttttttaaagaagatatatacagtaggcgtggtggctcacacctgtaatcccagcactttgggaggttgaggtgggcagatcacgtgaggtcaggagttcgagaccagcctgaccaacatggagaaaccccatctctactaaaaatacaaacattagccaggcgtggtggtgcatgcctgtaatcccagctacttgggaggctgaggcaggagaatcgcttgaatttggaagacggaggttgcagtgagctgagatcgcaccacagcacttgagcctgggcaacaagagtgaaactctgcctcaaaaaatagaaataaaaataaaaatgatatatacattccaacatatgttaaaagatttaaagcaaacatatttatacaaaaatacaacagatgaaagaaataaaaacaataaaaaatggaagacagatccatgagcaaaaatatctgctataataataaacgtaaataagttaagctctcgcattaaaaaggaattgaataaaatattcatgttagatcgaaaatatgtatgctatttaaaagaacactcagatgttccataactccatgaatttatgaaaaatcactgaagtgcacactgaaaatgaatgaattttatggtatgtaaactacacctcaataaactgtttttaaaaaacacccaaataaaaaattatatgtaaaaagatgtataagggattatgagaaaaacataaaccaaaattaagcagaggtcacaaaactaatagtaggcgatataaagttaaaagtaaaaaaatgcattaactgtgtaaaaaagctaattttataataataaaaagagctaacatttatattaataatacatagtaatcataaatataaataaattacatcaaaatatataaattttaaagtattagaattccaaagaaaaattggcagaaaaataattatagctagagattttaacgtatcctccttgctgtttggcaaataaaatagactaaaaaataaacaaggtagggccaggtacaatggatcatgcctgtgatcccaacactttgggaagccaaagcctgagactggcagatcacttgagctgaggagttcgagaccagtttgggcaacatggcaaaaccccatctctaccaaaaagtaaaacaattggccaggcatggtcccacgcctgtcatctactgggaaggctgcagtgggaggatggcttgagcccaggaggtgaaggttgcagtgagccaagatcatgccactgtactctaagcctgggcaacagagtgagaccctgtctcaaaaaaaaaaaaaaaaatgaagaaggttgaagaagatgtgaaaaacattaatgaaattttttccagcatcccaaaaggcaaaaattgttcaaatcactttttctaaccaaactgaataatttaaggtaatctcttaaattttaacaaattaacaaatcagtcacttaaaaatcagaactgcaaattgagtacttacaaaaaatgattatcagaaaaaaaattactgaaactcatgaaaaatcatggccaaaactgcacacagaggaaaatgcatagcccaaagtgctttgttttaaaaaaataagaaaagaaaaactaaaaaataaactaagaattaaatcaaagaaacttaaaagtgaaataaacccacagaaagcagaataatggaattaacaaagattaaagtagaccataattaagcagaattgacaataaaattaaataatttaaatataaactggaaaaacttctgccaaggataagaggaaagatggtaagagaatgagagaaaaagagaacacaaaggcaagtacctcattagtaatgaaaaacattcagaatttacagttaaagtggagatttttttaaattgtgaagaatactacgtataatcatgtgctaataagtataaaaatgttgactaaatccactatttttagggaaatactaaatttcagaataaaactttttcaagatcttgcaacaattttcataaaactaaaagagttttattaagcagcctatgagcaaaaaaacaaaaagcacaggaggtcatggagatgggtcaccatgcaatcctggagacagcacagctggagcagaacttgcaggtggtgtggtgtggtgtgacccactccctaccgcccactctgtgctaaaatccactctatttcatgctatggtttcattccactgaggttggtaagccccaaagacacattctctcagattatcaccattgttcatgcaatagttaagaaaaagaaaaaattaggccaggcattgtggctcacacttgtaatcctagcactttgggaggccaaggcaggcagacggtttgagctcgggaatttgagacaagcctgggcaacatagcgagaccccatctctataaacaatacaaaaattaaccaagcatgatggtgtgcacctgtagtcccagatattcaggaggctgaggtgggaggatcacttgagcccaggaggttgagactgcagtgagccaagattgtaccactgcactctggctctgggcaacagaaccagatcctatctcaaaaaaaaaaaaaaaaagtaatcaaacagacccattctaaccatctccatctgacatggagtataacagaaagaacattcaaattgggagctggaagctagagttctagacctgttctatcattaactatagtttcagtgctatcttgagaaggcagtttctctctctggcccttagtggatatacaaggctcagttagactatggggcaatcccatagaaccagttttcaaacaaatctgagaaaaagaacagcaatgttggttcaaatagcagtttcctctgcatgaaactgggtaaaaaagctaattttataataataaaaagagctaacattaataataatacacagtaatcataaataaaaatatacatcaaaatatatacatcttaaaagtattagaattccaaggataaattggcagaaaaaaaattataactagagacttttaacttatccctcttgctctttggcaaacaaaatagactaaaaaataaagttggagaagatgtgaataacattaatgaaattgttttttaggtcttcttaggccttcttccccatccctcctagctgccatcaccatccctgggtcgtggcacacttactctacaaaataagggcaagacataattctacaagcaagctcacagtgtcatgaaggagagatgacttacaatgtcaggcagtgggagggaaaacaagagaagtcaccagatgggtggttcaagcaataggtgtgaaggaaacagacaaggatatcagtgtcaggagaagagagaaactggtggcacaaaagaagcaaactcaatctttctcgcactatttcaagccatagaagaagaaggaatgtccaactctgaaagggacaccagccgtaggaagaaagatgaagcaagtgcattttcggtggttttgttagggcaaaactgctgtaatttgaataatctccacatggtgattcagatggatccttccatgtaaactccagtggtgacgttctgctttcttcccatttatttgtagtactttctgggttgtgtttcagagtgtcatttaatgtcattttatgactccctggttgtaagtgtctgagtattaccagggcttagagatttacagcctattttaaactcagataatgatgtttaatttgttattggctgtgtaaaggttaacaaagaaataactcaaattatcatctcagggataacacattacaagagggcaattaagcacactacctggcattacacaaaagattgatatctcgttacaagagcacagatgagttcagatttcacaatacaggaaatacactcgtcaccaccgtctctctttgaataaacaaatttcgggtcccacttgccagcgccactgagtaactagtatagggaaagaaaaaacttttcaagaaaaggaaaagattgacatgtggccaatttcttgtagaagagctggagaagaaagagagaaactcaggatcctagagaaaatcaggttgatgttactgaagtgaaagattaggttccctcttagttataaacaagcttagagaaaaacagacatgtacccaataggcccttgagaagagaaagcaaaataaataaaaccatcagagccaaactgttattaaattgtctctgaaatggaaaatgaaaaacaatctattgccaccatcatttttgtctattttcttctcctcaagacacacattcatgatgatttggttcgcattctgtggatttgggggccaatgaagatataaataaatattatttttaaaaactcatcagatgaagatgtatttgaattttccagccctctctttctggagttatttgctaatgtagcatgtctcatgaaaactctcatctgacgaatgccctgtttacctccctcaaagagaacttgcaattttttttcctatactcattttccattccttttcttttcttccctccgcaatcttggtctctctacatctgggtttttaatttccttctgcatttccctacatgtcttctgctttctttcatgtttttactctggatcttgtctttcctctttttttttttttgtctttgcctcccatcttcccaaaccgtcccccatatccacacacgccctctcctgtgaaagttcctcccttccattttctctttctatcgtcgtgttcagtctgtccactcagctcttctctgtttagtctttctaccatcacatttctgcagttctctatttcctcatcgttttctttgctgcctgcctcccactaaatttctctagtaccagccgtgtggctcaaaacccatctccacttggaccaagacatcaaaagtctctgaaatgtatctagccccagtccatgggacctcagaactcaaggcagtagcactagcaactcaaaaacaagggacctgactaccctggcagaaaactcctgagcagccagaaactcataacagcgggccatgaaaattgtagacatcacaattttattgtcccaggatatttctggagtcctagaacttcctaagttacagtcgaatgagaatctggcatttgagtccttactcccaaatcctcctcacacaggggaattgggagagacccagccttctgtttggctttatgttgtccaggtacaaagggtgatgtatatatttgtcactgggcaccacagtttggcttgctccattacaaagcagtgcaaatgctagctacaccatcatcatcaatatcgctaagtggcctttatgaagctcaaacatattttgggtccagtggtaagtcttggggaagatggagaagacatggtccctgttgtctctgcacttacagcctggaaactagcagcaaccatgatcaccagtactgaggccatattgtatgagaaaaataagacaaattcaataactggcccctgttgacacataaataaactcactattcatttgttcctttaatcaactggctatatcttggttctgtaacccctaataaatggaattgttagtatttcataaggatgtgtgcatcctcgcaagtcctgaatgtcacacgagggagccaagcccagatgacactgtcatatggaaacacctgggatcaagggataacgcattagttaagcaaactaatcttgagcctttggaactgaaatatcaacaaaaggataaaataaatttgcaaattgttcttccctgtggacattagccaggcgtttgttctttagccaacaacaatcaacaggcacaacataaccgtaaaaatgccagccgaagagctaacccaataaataaaggaaaatcgttgtattatggatagactgccaatggtcatgctgcaggaagtgagcaaggaattgaaattagagagtggaggttggcgcaaaaatcaaacctacctcaacgaggggccataaatgttaacataagcttgagatacaatgcagtctttagcaaatgactcctagcatgggaagcaatcttatggtctttggggtacctaaaaagatgtgctaaaatgtaacccaatgagcaccaagtgcatgctaagtggcaggcactgtgcttggcaatggctcactgggccctcaaagagcaccattctgacaagacattcatccagcactggaaggggaagggaagggacatacagtctgtgtcttataagaccagctcctgccttcaaaaaaaagttaagagaggaggaagtgaaaaagtgaagaaaggaggaaggatgagacagaggaagaaagagaggttgatggaaagagatttaactaaatggatacttggaagagatctatgaagacatctatcaacatctagctgaacagatatctacatatttgccaaatattatttgcagttagtcttagcagatgtgctttcttttctcttacagtatctataattctaaataatctctccattaaacatggcatacatataaaggaaaataagtttatttgcttttttttttgtttttgagatggagttctgctcttgtccccaggctggagtgcaattgtgcgatcttggctcactgcaacctccacctccgagttcaagcgattctcctgcctcagcctcctgagtagctgggattacagggacgcgccaccatgcccagctaattttggtatttttagtagagacagggtttcaccattttggccaggctggtctcgaactcctgacctcaagtgatctgcccgcctcggcctcccaaagtgctaggattacaggtgtgagccaccacacccagccctgcatttttaaaagaactgctctacctaagtttcctcccccatgcccactcctacacagcctctggatcctaatgatgctgctcacataggaactccagaatggggatgacagataaaaaggaactgaaatgcattaaactcactaggattgtgatgaaaactaagagagcttccttttctgaggcacaatagccagaaaggcctcagtatcacccgactttagcacagacaaagggaaccgggagttcaggcaaaggaacataaggatcccaggccacttgcttgcctgaaagtggaatcaaaggtgccagcccagggccaggatcccacttctggggctgagcttgtggtcatcttgcctaaggcaacatgaagtctgctggtggggtgagggatgactgtgaggaccatgcagaggggagggctagatgggagacgaattttattttgttgctccgttcttggataagggtgtaagggaaaaaattattgatgaactactttgtcatcgttaagagtattgctgacacattcccagcaggctcactgcgaggcagccagcgccgagcctacccaacgccttttgtagcccagacatgtgctgtgcattagacaaggtgtgtaaattatgacagcgccagttcttcggcaagggcccggggctgagcacttctctgcctccttttccctttgtgttctatctccctacggcccttcctcaaagcaagtagagttcctcagagagaacattaacaggcagaggctcgggcttggagtaaatactgcaggatggaaatgcggagggaattagacttcttttccttgcaggctttggagtgctgggtgagaaataaataatgagggtagtaatggcccgattcttcccggctgcgtctctccccctgggtgtgaagcctcttctaaagtcagaatgtggctgcttgtggttgcagatttgatgttaaagccaacgggacaggcaggcaggcaggcaggcaggcaggcgggcaggcgggcaggcgggcaggcgggcaggcgggcaggcaggcgggcaggcgggcaggcgggcaggcgggcaggcaggcaggcaggcgggcgggcaggcaggcaggcaggcaggtggccctggacagctcccagacagctctcatctggggaaggtctcatccctgttctcagcctcattttgcagacaaggatcccaaggaacacaggaagttcctgactggtcatgtggaaaccagaatgggtcacttgtcctccaagaggctatccagagttgctcctccgcttccactctgggagtctctgggagctttgggtaacattggactgggagggttccatggataactaattatgtattgggaactgagcctctggaaaaacttgcaaaaagtgcccaaaacttctaggcccttttagaaaggagctgaatgccccctgagagctgctgcttcttccccatccctattccatcattgctactagattattttctgtgagccagagttttcgaaatgtttcttacagcttcaacttttcttgttactcccaaccctctccccaaaagaaggagatgaaagttgtttacgatgacttttatgtaggtaaggcagcaggtaagtagtctcctgtattggaacttctggaatcagatccggcttcaggacaatggagcttgtaccatggttcctatgggagcactggtggggtgggggctcctctccctgacttgagacaagctcagattgaaatctgatgccctaagaggcaacctccacctggaaggtgttcaggtaaactgactgaggagctgcaaggtcattatgcttagaacattgggccatcaatcctccaccctggccatgatccctggggaagaggtgacagccaggattattgagaactgagaaggggcaatcgttactgacccaccccaccaaattcacacatcctctgagccggaccattatatccttctcctgaaaaatcacctctctggcgaagcaccaggaggacaattagggattaaccaaagtgctcgctcctgccagcaagagtttgcgctcctgggggaccaggggtagtttgtagcaaagctctttgtctctggaactctctcatctttgttttctgtctcattaggagaggcgttgtccttccactctgtggaggactttcacttctaggtgtcgtttaattattgaattggtattttccccatgtccaaagaccttaggacaagactgacatgttaaaaaaagaaaaaaaaaaaggattaaaactactcaaaataaaatctacatgtggagtttgttgtcaccattggttccaatattataaatcttttaaacaatggcttttcttggaccataatttcaagcccagtgaatgatctgtctctaaactggctaaattttggtaaaatagttgcaagaaagatgagcagagtagaatgtatcatgatttacattgatgcccaacttccaaattgtactcaaagtgtaatttactttgactattaagataggactaaataagtctggcacagtggctcacacctgtaattccaacattttgggaggccaaggcaggtggattacatgaggtcaggagttcgagaccagcctggccaatatggtgaaaccccgtctctactaaaaatacaaaaactagctgggcgtggtggcatacgcctgtagtcccagtttcttgagaggctgaggcacacgaattgttggaaccagggaggcagaggttgcagtgagccaagatcaccccactgcactccagcctgggtgacatagcaagactgtctccaaaaaaaaaaaaaaaaaaaaaaaaaagtaggtttaaaacaaagtggtccctttcataatgctgtctataaaaacaattccgtgaccaaaattaatcatatcatttaaaaaaaataacagtccactaaaaggcacctaaacccttcaacttccaaatggtgacttcgtaaccagggctgagagatgggtgccatagctcaaactgagccccacctcattccataaaatagagtctattcctaaagaatagaacagaattatctttaatttcttcatttatctagaacagtgggatccatatacaacagtcgcatagtggctagtcttcttttgaggtagacaagaaatagaaagaagatcattgaggtacaaagggaagaaccacttgcccagaaacacaagtacaatggcaaaaaaatcaaattaaagtgcagaattttctcttgtctattgtgcttcctaccggtcatgggaaaacctatggaacactgctaagaagttagttagatataaaagaagagctgggagatggagatatatatatatagaatatatctatatgtgatatatatacattttattatatataatatataatatatataattatataattatataattatatataattatatattatatattatatataattatatattatatataatatatattatatattatatataattatatattatatattataaatatattttataaaatataatatatattataatatatattatatatattatattataaaatatattatatattataaaatataatattatttataaaatatatattataaaatataatatatattataaaatatattatatattatatatattttatatatatatatatatatagagagagagagagagaggtattttgggaactaaggcaggaggctcggttgagccccctgaagttcaagaccagcctgggcaacatagtgagactctgtctctacaaaaaaaattaaaaataagctgggcatggtggtgtgtgcatgcagtcccagctgtttgggaggctgaggtaggaagatcacttgagcctgggaggtggcggctgcagtgagccaagatcgcaccactgcactccagcatgagcaacagagcaagaccaagtctcaaaaaaaaaaaaaaaagattttaaaatgatagaaagactcatgctttgaagcactgacttcaaagcacaaatccttcccaaagtagccgcagtttaatttgtggttttaaaatggtcagggcctccatgcagcatgtctccattggaactctgctccctccccagcgcaagaaaaaaatgccctttctgcagaacaaacatccattttcacaaggagccaaacatccttggacagagacaaatgcagagtgggaataaaaagttaaaacatactctaaggcaggtcctcagaaagctgatccaggtgatcttcctttgaaacactgcctataattacattagggatagaaaataaaaacagaaagtaacaaacagatccagggacatcatcacaccaccctcaccattgactctttcattttctctgcttcctgcatgcacatatgtaggcacattttacagagtagtatctacaacagagatcaacatgtgttctattttttcaccaaacatttatttttccacattgctagacaacctctataattcttttcaatgactgtgcaatagtgcatcaaatctctgtgccatcatttgcttagtcattcttctcttacgaaatagattgctcaggtctttgctattctagataataagcaatggaatgaacatcttcatggatgtagggttgtaattttctgtggcattattccttatgactctatatttaaataaacaaccttctatattcttcctgatgagaaaactatgtcgtccaattaattacatttccatgacactgtctccttgccagtgcccagcagggattttttcaaagcaaaaatcagaagcccactagctaggctgatgttggctatagtgagacagggcacacggccaagtccccatccctcctttttaagagactggaaataggattttaacttctgtgttattcctcttcagaaccactgcaatttcttttccctttaaaggccgtgggactgagtaatttgaacacagcaggacccacttgattcatactttttggtcaataatccaatatagctactatcaaaaacactcctctgaccatatttacattttcacctttttgtcagatgacagcatagtctacctcaacagaagggataaataagttattcggttactgaaggagcaggcccttctagacagccacagaagcaaaggaattgatggaggtaatgcacataatccttaagaaatattctcactgagagatgaagtatgacttaaagagaactgttgcttctcctggctctttggagccatgttgcttcagtgaagttttcttctgcgatctgatcatttccatccctgatgttttaaattattggatcaacagggagagagcctggcctcttggtgagtggacaggacgccaggctgtgtgtcctgccttgggcactgactcactccacagccttgagggggcccctgaacaccccctgtggcctctgacattctccattcatgaaacgtgaatcactttggtatcgggtcccactgggaaactagagatgcaatttgtttcatcatgttctcctgccaatattgtcatttactgcttgttctcctctatttcatttgagtttttttttaatcatctaatccagggtccatatgtaaaacaaacaaacagctagataaagaaatggatggaaactaaaacagtctcatttagaaaacaaaagcacgagtcaaggttgctggggaagggtttcactgagaatatggagaagtctaaaagacaataacactcatcacccctgcatgaagctcctaggctcacgccaagccttcaaaccacagagctggagccaggctgcaatagtgggatcaccctggattcccggatcagacacagattttcacccctaaagaaccatcactttcccgtacacttgcaacttttgcacatgtgcacacacacacacacatacacacacacacactacagagaaagcagctcccaattacagatataaactagcctgatataacttgaaaagtatagcaggtttccctaaaaaaaaaaaaataataattttatctcagcatttttcccggaaaaaagaagacatcactgcatagtttccaagtgaaatagttttaaatgtcctacatttgggccgttcacagaggctaatatttgaatccacttgggagactctgtccccagttccaatgcaatcatcatgaccagcagggcctgggagatcttccaggtcaataatagttttcaccaactgcatacaagatggacttcagtgatacacgggtatgggtctatgtttcccaagcagtatttacagcacacaacctctcctcggctataagtacaaggctagtcctcaggaagtctatggaaaaatcataatatgcattatgtctgcattcccatattttctccttttcctgcagttcccttcacatttattctattctgcatttgaccaataatactgcaaaacacgtcctgccttgatcactgtgagaagcctcagctgggaaggacctggtaaggtcatgttccgtgcccattaaataaatgtttaagtggctgtttaagagcaaaaagtcagcctagtgtagtggtgccacagagacacacagtggttggaacccaaggactccaagatgtattcagcccatcaacctactacgttaaccactaaagtactcactgagatcactgtaattaatagggaaaaattctcgattgcaaagtgctaagtgcagttagaagaattaaggcttcccatttgattttttccttttgcctgaaattttactgccaatattaaattagcagcgttttatcatctttgctttttatatcccaggcctttgtttccttagaaaccaaacagaaaagaggaaaaaagttactctgcatagaaatacatagttaactgtccatgcctagaataaccaaactactcttacccctatttatcaacctctcaaaaaaaaaaaaaaaaaaacacgaaagtaaagcagaaataaaaacaacaacacatgctatgtgtgtgtaaaattgtaggaaaagtcgttaagccaaaaagtttgtgatattttatacagcatgctcacaaactgaaaacaaaattttgattgcttatatattctgaagtgtttcctgcctacatatcctcagaagtcccaggagcttttgtggacacatggaaaatttcaagttgagccatttttaagttatccatgagtaaaagcgaaaaaaaaaaaaaaaaaaaaaaaccaccatgggagtgggtgtttgagtttgtcataaaagaggaaaaaagttattttgctctttctttccttttccttgaattacttcacaatggctgaacatactttgcctgagttttctctttttttcccccagaaagaagagaatcacctttgtgctaaagccaagtataaacgtattcagcatgttctatacaagtgagcaccagggaattcttaaagcagatctatgtgtaaccgtaaaactagcattaccagacacaagtcagatcacacatcataatgacaaataactgcaagaatcagaaagcaagcatgtgcttagtactcatcagccaaaaagaatttgatgtataaaattattttgaataattatgcaaaaggtagatagcctttactgaaatgcaaacgctgcaaaacgtgggcaacttgggtattgactctattttgcttcttccagccacgattctctaagaaataccgcccgcaaattaaaagtatccgagattcttggcaaacggcatccgtgtggtatctactacattatagcgatcgcatgccaataacagctgggcagagaagttctggaatgtttaaagcagaagagctgaacaagttaaatagagggtagaagaaaaaactgttttgcagggaaacaccccagttagaaattcagtgactggcttcatttcatgaatctcacataaatatctgaggagactgctgacatcctaagccaagaagaaaaacatgcatttaaagaacaaggagagaagccaggacatggaataatcatttcactggacgccctccacttcagataccattggctcgaactcctattaagaaggaacagagaaaatggatgagagatactgcctacccaggaagggaagaaactttgcttttataaataaacctgtcatggagataggccacacatcagaacggaaagtcggggggaacagaaagaaaaggagcctgaggtcatggagtcctcctgtctcctatctgggctggtacaaaagggaaggggaaacccaatattagcattgtctggccgtggcattttttcccccttctcataatataactttgtgaatatgtttaagagagtgtctgctgttattggtctaatgaactaactctgaaatctgagctaaagacagctccctagtggctgctcactgctccacagaccgaaaggaaactcctttcaggggcccatcagggcgaaccactgctgacagcttggaacggcacaacacacagatttatttcacagacagccacagacaggaatttagcaccctgtgctggcctcctgcttagtggagaaggtgttaaaatgcaaccatgcagagctctccgttgaacaaaacccagtagcggctaatcaagcggtcacccgttcccggcagaaaatacccagcgacgcgcagctgagcaccgagaggagcacaatcgtgacagctgcttctgggccgccgtgctgcagcttgagagctgcctcggaaagctctaaatattttgcatgacctttcaacttacaaattaattgatttataaacaacggcaaatgttatttatttatttatgacatcttggaatgccttcttccctcgatacgagggcaccgcgctgaggggaacattccctgatgcctgcagatacatcagacccaaagagcggctctttctgtccttcatcaccgagcgttccatgaatggatacttgaaagatattgacaaatatgggcaccgatgtgtagctatttacctgcctgcactagaaaaagtccataaacattattatttaaagtgcataaacttttgttttatatgcttgcatatgtgtgcatacacacacacacacacacacacacacatctctaaggtagtcttacctacatctttgcagcaaaagttaataactccactgcttcggactctaagcaatagctcagcagttgatcagcttagcactttatggataaaggcaaaccacatttatcaaagcaattgaaattgcatcccagtaacttggggttgttcccaaggaaattgcatagagttggaaatattgtttatattgattacgttgctaatcttgctctcactcatacatgatacgatttcttatttttaggttgcgtttgtgaaacaactaacctgttctagtaaaagaaagcgatagcagcgaccaatcattttcctttcatattttctgtgtggggaatatgcctctagttgcctggctttaaatttcattttaaatagctttaaatgctgtcctcacctattggattcccaataaacatttctcttcaggtggcttttttttttttctccctgcctcaactttcaagtttgccaataataaatactaatgaccaggtattccttcggtctgatgctgcaaccaggaccatgccacaatgtcaaagccagagagacatcagctaaaatgcggatctgcttcccagaaggtctttagtaaactgacacataagtaaacatgggatggtaccattgactaaaaggaccctgagcaagacctggaaatgtgtctttgcaaaatcaagtcctcattcactgctaccgctctgtggtgcccctccctgctatgattctccaactgtcagcagtcttaacggagaatagaatttacttgaacttttttttaaaaaaaaaaagcaatgtgttatcatatttccaggacacatgcacagccaggagcatggtgacatcaatcataaatggatgcccgggcaagcgtcccctcctggaatgcctcctcctgagtgggttaaccttttcccacctcactgtggtaacttaacaaagggagccttgaaagacccgaagtctgagaaaactgaagcagggagagaaacttcttcaccttaggaagccaatccatttgttcctattctaagacagaaagaaagaatcatgccctgtttattttttcacttctttgcaagtgtatcatttccctagagttcctgtgtcacagatttttgttaaaggaatgagattttgtttttgtccttaaagtccaaaggtgggttgggggagaaaaagccacaggtagaacatacgagagagattttctgtggaaggttgcctttgcttagtatatataaatatacatattaaggttcatatcatactagcatagggaacatcgaaataaatgtcctttatatgaaaatagggatttttaggaatattacacaaggaaaaatgcaatcaaaaataactaacttgaaatagctggagaaatatgccttaaccctaaattgaaaatcatttcagtaattcctgatacatactaaatttatttctctattctcattcttgccttcttcttagagtgggtatctcctatataaaacaggccctttcatttataccaagagcatttgcattcgaaaatgaaatctattaagacaaagatgaagtgtgtgcagagatgggcagataaggttcttagcttttccactaatggacagagttaccattttatgcatgtatgcattctctgcctctaagacattttccatatttgcggtgtttgccagatttcaaacaggtgatcctagcaaggcacacagacgaagaaaatgctgtccctgtctccttgctcacagcatgtgccatgtacactcagcagccccataccgttgaccttttctgtgaagcatcaaacaaagtcttccatggtgcaggccttctgttatccattcattaaacaaatactcatcgatacctactaggtgttaggcattattctagatgccaaggataaacaaagataaaaatccctgcccacctgtagcagagtagtgggagttggtgggggattggaaatatagacaatcaacaagtaaatgagtcaaatatatggcatcctagttgatgaagagtgttaggaagaaaattaagtctggaagggggttaagaagtgctggttttgggaggagtatctcactaaagggacattaaaatccaaaggacgtctgaccccaaacttcacactgaaatatacagttccagttaatagatgtgaattaactgatgacgatgacgtccccattagtttttatcacttccatcacagccaggggcaaaacagctctatttcttcccatattcctttaagagactagatcacaccttgccacactctttcctcctgcttctcccactgacactgccctcgtgagttcctgtggtcttcccagtggctccatcatccctttaactaatacttgctgggtgcctgctctaagtggagtgcattgaagaaggaatatcaaggcagtgtggaagcacttctgctatatcaggcggttctaatcatctgtcttttccctccatcctgcaaaactctcttctctccttaattaaggcagaaacattcagagcatcccaactcagtacttggaatttttcatttcaggtacccccaaatagcaaattgaggtgctccagttataacaatgtggatttcctggctttctgatccacactactctcaaatcacatttccacccactattaaaaaaaaaaaatcaaggcaagacacaacaagatgactccatgctatcttgtatcacaggtaaaagaaaaccttgtcgatatgaaatcagacagtgtaaaattctctccctgaggaatctggcattattacatcccccaccaatcatggcattgtttctccaacaactgtatcagaggcagcatccggatattgctataacaccttcccaaaccatcaggctctttccttcaaaccatggaagtcagacaccactacagacaatactgggcccaccaaaacccaagctcttccaaaagagtccaaagccctcgtctgtttccaacaattatcaactctcaaaattccaggacttttgtattaggtgaaatgaaatttgacttctacatttatgaataacctatacctacatgagaaaactctatgaatttgataaggcatatatggagaaataatatatacacattataatatataatattaatgaatggcatatattttaaatcttaacttatcaaagattcactctggacactccacttaataacaggcaacaattccctcctgcttatattataaatataggcattgttccaagtatccaggatatgataaagagatacgccaatggatctcacaaagcttctgccctctgacttttattattagtagtagtattagtattagtattattttggtggagactttttggttttgtttcttcaggtactcccaaggtgggtaaaaattacaaaatcaaagttaagtttaaatacaaatactggctgaatgtgaatttgccttttctttcctcctttgcactattaggaagaaagcatttatttctctttcagaaacacaagaatactgaaaagttgactttgagggtttcgattttgcttaacattttctctttgtccttgccactgatcacccaaagcaagcaaggagaggaccttgtcatgatcccagcatagaaaatgcctgcagtacattcaccttgtacaccttatttataatcctctgtaaatttgcccaaaagtcgtgaactacataatactaattcttataggttgacatatttccctgatctttcatgagccacatggggaaacagttttctcctgatctgaatgaagaagaaaaacagtgatcctaatcaaccatttgcccttagtggcttccctaaacaaatctgggaaagcgcttaaaggcttgggaataaccatgaccctgcttgatgcactgtaataaccctacctaattatactgatataaaaactaattggaaagatagcaaatgtcagggtaagatgcaaatcgtagggtgttaattgctgaacaggtgctggaatagaattaaatgagcattctgattaaaagagtggaggaaacaaatgtggacccccgatagaaacttggccatgtgacttcttaagcagtccattccaccaggaaaaggtcatggtgctgtgacctctgttttgtgatgggtaggccaagaaaataatagtgaccacagaagaaaaaacaatccagcaacaatatcaacatgacttccagaagtcactgctaagtttgagccccagagacatgcagtgtgtcttacgagttcatagacacacaaataagcctggatagaatcaagaatgcataaatcctcctcttccctgccacaagggcatgccctttcatctttaaccagcagttttcacatcctctcaccacccccacattactaccacagtgctgagtgcaactaggtgctcgctatgcatttgtgggttgaccaagtagttgattaactgaatcaacagccttgtttgccttcaataacttgggatggtatgagagtaagaacattcggatagggcgacatggagattaactctgagactccaactgctataagccagtcactcttgttgcaaatggtataaatgatatttattaatgctccagcaatccagactttaatctacatacacaaaggagattttctttttagcctggtctataatgaaggttgcttcttcacaaactcctggtgacttggtcaagcctttgtccaaccatcactgcatttcctgacatgtggcaaagcctaggccaatgaagcctacattctcaagacagaagagaccctgagggcagcagctttaagcagatagcagctccttagccctgacctgatgtggtgcctccccagcaccacaatgccctcacccctgctgccatctaaagaagctccactccaaaaaagaaaaatgctctagatcaaggccctaatgtttttcccaacacatcacctcaaataacctagaaaggttaaaattatttcattcccaggtaggatgctaaagtttaagtgttcttgtctaccagtagttcagaggtctttgagatttatgatgccagaaacctaaaccagctctttagtgcagggagaaggaggtaacacagtcttactctattctactgatttttctcactccacttcatctgagcatagagcagcgattcattcattgtgctcattccacttggggcctctacccagagtctaccaactgcacaccactgtgcctcatcatatttgattttagtgatacagaccagcaggaggcagatatcagcaaagttaattcttctaactcagacctatgtctactaaaattggattgcagaactactcaacccagttgcattcattcattcatttattcacacattcattcgtcttttaaaatttaaccaacttggcctctacttagtgggccaaagaaaataatacaatggttacattagacaatactccaactcagcaatccaatttcaaagtgcagaggagggcctgaatgctttaagagggaaatgtggctacaggaggcatgggtgagatttcaccttatttatttatgcttttataaggacactgagaataataataaaacaggatgggaaagagaaaaatgttgctccagtagagagatgggtgggtagaacctcctcactctttccctcccttcttttgatctcaagaaaacctcgctttctcttgctcactctctctttaaggaataaaaataaactgtctcctgagtaataaagtcaagacacttgccagtaaaaattggttaaggtcatcacttttgaaggtcaaatgagttttagacaagatgtcatgtgggatcaccattcagcacatttagttaaatggttaaaaataataaaaaataatgacaatagtggagttatattttttaaaaggcagaagtcagagagaaaatgagagaaccagatgtctagaaggaatgctgggaaacgctgaagagaaggatttctccccccaccccaaacacaaccttccccaaggacctttccagactcattgtcagtatctaatgcctgtacactgtatatcttttacgtgtgtgttttgccatgcagtccccttatttaaaaaaaaaaaaaaagactcaaagggaaaacattttttaaaggatcacaattcatgttgacctcaaagtgaagattttccaggtccctcatgtgcccaccctgtctaaatacccaaaagaccccagaagttgtgttgctctgtgactagatggtaagagaaagagagcagccttacagtcggtttgcctgaaaatgataccattgatttaagtgagatgccacaatctacccagtttccagaggaagatctctgtttttgataaaatagaccatgaacaagtcagagcaaaggggctgttcctagatgcaaatgagccctcacaggaggtctctggggtcccaaaacaaacgcagaaccatgctgacagttgggtctgagttctagggcatgttctgtcctctcacagggccatgtgggcagccagccctcatcctttttatagtccgcttgcttttaccggccacagcatacccatacaaccaaaaaatctcctgtgccaaaggatgcttggaaactccagcaaggccactgcaagactcaagttccaagtattgctcattgccagtgacaattagaacaatctgaaaatgttcctcccagaaaaatacactcttttttgttgtaacaggggtgtaaacgccagccaatctcttttggcacctagagctataagaaggggtttcactgtgccacctctcgacaaaaacgccctcaatgagcatcctccaaggactggctttgaaagggggtttcgcgtatcaggttaatgcatgcacttggcgcagcccaactttcgcaccaaggctctggggtatggggtgataagagccaggttctgtttgttaacgataaggcaattatttctttggtacttcatagaaggaaaaaaaaaatcttacagcaaagattcaaacaaggatccctagggagacaacggacctcataggttggaaaagtttttttttttttctctcccttcgcaggagcaaacaaatggcccattgagagccacagaacagccaaggctaagttactgacaagcacgctgtcagttggcttccctagaagctctggataacttagggagtggaagatgggagccagagggaggagagacagaaaaaaaagacagacataaaatgagaggaaaggaagaagagaaaaggctgcaagtagaagggagcagagagactgtaaagaagtaagagagaaacggccggacgcggtggctcatgtctgtaatcccagcactttgggaggccgaggcaggtggatcacgaggtcaggagatcgagaccatcctggctaacatggtgaaaccccatctctactaaaaatacaaaaaaaaaaaaaaaaaaaaaaaaattagccgggcgtggtgtcaggcgtctatagtcccagctactcaggaggctgaggcagaagaatggcatgaacccgggaggcggaggttgcagtgagccgagattgtgccactgcactccagcctgggtgactgagcaagactccatctcaaaaaaaaagaagtgagagagaaacaaagggctgctgatggaataggaagaaaaagagcaccgtgtgctgatgtgtagttggtagcacttctcatgcatttggagtgtgaagaggtccctgagcttggataaacattacatcttattttcactgacccccaaccaacatttaccatttccttccattttaaatgtaaacaagccacattagtattatgggtccattgtattcactggaccatcagtgggatccatggcaataaaaaaaaaaaaaaaaaaaaaaaggcaaagaacccccaaacactgggaaggtattaggcatcctctcactttgcaggcaacatactatttcagaggataggtatgcatgattttcactttggaaaggagaggcttttatttactccctgggtcaggctttctgccttcaggccaaggtttcttaactttccctggaattatccaatgtgcaacaagttcaggcatcaaatgccaagaagcttttaggaagtatttctcaaggtcatcccatttgattaacagctaagagttagttccacagctttaagggccagatccagcatgataattttgctcagctggttcccactgggcctgtaaaactcaaaaaaaaaaaaaggttggctttggcatccccaagaagcaggtctctgaagcctcaatgttagttttctaccagggaaaacgctctgaagagaccaagatattccacagacagaatagatctcaatccaagcaattggacttctgcttcttcctccttgtccttggaattacataatagaatattggttccatggcactgcaaatcccacagtcagggtaggccagcagccagaatccaacagatcattggccccaggacctataggatcatctgctggttatggccctgtacagatgtgactagacagcagctgagcccatgtactcagaaattcccacctcttgttctgacatcacaggtcagcctggtcaactgatggtgaccatgcaaactcaccaacagctctttctctcctggtctctgggtgcttggtttctgagagcaacttgtctgtctctgtttcagaagtttctaagccaaagccatctcccaccccaagaggcagggagaacttacactgcaacttggagctacctttaagctggattaagttgaaaatcttcagaatggacatcatgctcaaaactgcctgctttcccaggggttgagaagtggggaggcacagctccaccttctctgcagagaaggaatgtttctacctgacaggaagagttcagggggctcaaaggataaggtgtgcccatgtgtaggcaggtgccaaccatcaaaggtggagcaggtcaggcacaggatggagaaagataagaaagatgtgccccaacccaaaccacccttactcaggctttcctcactgtctagttaatttgcttccagtctcagtgatgggaattagacaaatgctttaaaaactcagaagccaccataaaaatagaaaattactgcttcctgtcatgaccaaatattaaacacagtgcacacctaatgactctatccctccccggggaaggagctttatgaacaataaaatcccagcagacttccagtgtttgggtttggaggtctcattatgggctcactgatccaatacaatttacaagctcaatggacgccacttgaagtgaaaaccgccagcccagagttataaatgggacacctacagtgaaaccagcattttattcttcatcggggaatgaaaagaagaaagggaggtctttaggagaaaggcaccagggtgcaagtcgctaagggaaatgtttctcattgcctgagtaggaatcaaggttagacacccactagaaatgcagggcaatggatagaaagcaagggaggcccaaaaactgaaggcaggaagaggaaaggtaaacaaaggaaaaagaaggggatggagacaatggtggtggattaaagacaagtagaggaagcaggggtggggttaactttgctgtcccttttgctatgtaggttgaatctacacgacatcacattttcaaagtcagatttttttttctccagttctctacattatccagatacaggtctaaagggtggttactcttcatcctgtgccttgccagctggaggataaaatgcattagccactctacatttgcttgggtaagtatcgagcggactgttagcgttaaatcgaagtaaagtctggctcttgttcaagcgtcagccacaaccaagaagagagagtggagcttctccttcacctttaactctgtgcaatttatcactcgagcctaaacaatcccacatgtttaaagtgctggagaaggagacttggagaatgctaaacaaagggttttagggaagtcagaattaaagtgcacaggggctggacagtggacactaagcaaaaacaatccaggggaggtgacaagtccataaagcagggtctagacagaccatgagaccaaggcattgagaggtgacaaaaaaggagggaagagactgaacatgaggagggagtctgtgaggagaaactgacaaagaagaggggaaaatgctgatggatcccaataatgctttctgctcacctgtctgccttttaagtgaatctcctacgtgtgaatcagcttctgtatagatcagaaggcaaaggttatgagccccaggtaaagatttaaaaatcactaaaataaaggagccatagcatatgctgattgggtctgaagtcagttatggccacacaacatctctcttccccctccacaggctgagaaagggccactgctttccaactcctcacataagaaaccaggattcagataggtttgccagataaaatacaagatgctcagttaattttaaatttcaaataacaatgaattatttttctgtggaggtatatcccaaatattgcatgggacaaacttatgctgaaaaatgattgtttatctgaaatgcaaatttaacttggatatacatactaaaaaaatcattcatgtttatctggtatttatatttaagtagcatcctagtttttacttgctaaatatggcaactctagattcaatgagagggaagaattgaatgaatggatgaatgaatgaatgacagaggagtaagcaaacccgtgctgatgccaaattttactgtggttattatcatactacaagaacagcagccactttgagtcctcagctcatgtgtcagaaatctatttcctatgtgtatcttctgaagtgagagaatactttttgcatgtaagaaacaggctccacacaaaatcactgattatagtaaagtgaaatgccatcagtttgccccaagccatgtgcttgaaaggtaatgaatcctcagaccttcaggaaatcctccaagccttcagtacagttagaagccttgtaattcagccacaatctattctatgtgaatcccactgtttctcttgtccctttccttgcagagaccacctcgattttgttctgggagctggataccttgtctcttatcccaactgagtctttggccagctacacagctcccaaaattgttgatcttcaattgggtttctgctctgtaatgtgggataacatttccagtctgtagctaaaatgagttgtgcacgtcgttttcaattaattagaaaaatgtcctgtacaattgtgcataaagcaccaaaacagctcaccatttatctccagagagacccacaccttggggcttttttggaggggctacatggaaatagaagcattcagagacacaatagccccagccctcatctcactgccatcttgtgagtcctctgttttaaaagtcctggctacttaggggctttttaaggtactagtcccaaagtgtttgttccatctctgcaaattcctccatttctgtcatcacatccgtggagttaggaatttctccccttatttccctctcaaaagctcttgttaaatgggggcagctgctgcatttctcaccagctccagctccttggtggtctcgaggggaccaggaaagtttgccttcactggaaattttgaggttacaacaaaacttcttggaggacaaccatttcatcaatgagccagtctagactgatgaaatgctgactccttataggctttggtctaggctggctgacaagcttggagcctctcatcactcagctacttctctttctgatcaaatgtcccctccagctgcaactctaggtcaatgtgtagaagacagcaacaaagaacaattcttacaagattctaattcgcaaacaaatcatctagtcaatccctagtgggtagaatcctaaatctgcgaatcatctgtggataacttccttctctccttggtatataggtctcatttcccaaccatttggcatgccactctcttagctgggtcaaaaatgggcccaaagaacttatccagccctgttcactccaatagaagaagataataactggcagttttgggaggtcctctttggataaatatatagtcttatcctaatctttcccaggctccacgacctttgttcctcctaaagccagctggataagtttgcaaagagatgtcttttctaaaaacaaatacctacttcttatttccagcacagcacaattttagagtactgttcttctgctccttgacccatccacttcctagcaaatctgctatttaatcacatcacacaatttcataaggaagaagctggaagttgaagcatggcatcatctgttctaataaccacgtccatccagttggtcctctgattttcactgggaattgatccagaggtcttgggcaagcactttgaatgagagaatgctagtcatggtgagttggttttcgtctttctccctcttttctaaagaattacttataaatggtttggattctggcctgagtttctgctttctcacaaacatccaggctactaaaaaattcacagattgccagatggtataacagcagttccccgcaatgaatctgagcttcccagtgaacaaagaagacacgtactcatggggacaagcggcaacatcaacaaaagctttggagtggtgagtgtgctgggggaggggaagcagggtgtgaagaggtgagaaaaaagacctttccctccagtggctgataccagagtatctggcagggaaaaaactttctagcaggttcccctacttccattctccatgttccaatccatcctcaaagttctgtctccaaaataccagcctgatcatgaaatggcacaactcaaaatccttctacatcttccatcgctaacaaagtaatgtcaaaatacttttgtatgggcatataaagtcctccaaaatctgggcccaaataatctctccaacttctcttactgtctctcgtcacatgtacccaagtacctctaaaactatgtgcaggtttaggaaattctttcctttccaggtgccttttccaacacactttcttcctagaaggccattctgccccaatttgtaaatattcgaggtatagccatcaccccacctatctctgccatgatggaaattatctccgcacttcagatcttccagagtgcttatccttttatctcttttatggtactttttgcattttgcatagcatcctagtctatgcaaaggatatctacacatcctttgtttttccatataaactccaagctcttaatgggaaagctttctgtttactcaatcttattatccctaagaccccactgcaaggtccatggcataataggcccttgataaatacttactaaatataagtaagaattttattctgctttacaaccctagatatctgttcttgggcctgttctgtacctatctgccactggacataagatcgctaagaggttgtagaatgcaggaagtcacaggaattgtcctatatgaactggcagtagactcaatcacccaaactcttcaatgcttggcagtcagagattaatctgtgaattaatatctatggagtgtctgtagcatccaagccactacaaagatgcaatgtgagatacaggataattgccctgactttttttaaagcatctgttgtatcatgcactatgtgggcaccttacatgaatgtatttagcacaacaacttaaggggagaggtattattaacaccatcacacagctaataaatattggcatcaagatttaaatgccatgtgatgtctgatatctaagaattataatataattggaaatgtaaagcaagcacgaaataggtaaaataaataaataatgcccatacccctgaacaagagtaagaatttgtgataaatgtcaagggaaaagattttcactacaagaactaatatctttgaggaagtagaatctgaactaggtcttgaaaaagggataggatttatattggcagagtgcttgtggtgggtattccaggtggaaatagtgtatacaaagggagaaaagaggaaaaattcaagatctgtgttccggacagggggattcacagagaaagaaaggatgggattcgaatgttgggacctaggtaccatccattgacctagtcttcggagagctttttgtattttgtgaatacgtattttttgtgtgcttatttacgctgtatgctccatgagagcgggaaccatgcctattgtattcgctgctgatctctcactgccattcacaaatattttttgcttgatgactgaataacataaggacttagcaagtgaatgaatgatggaacgagcccatttatacacgactaaggatttgatttgcatcaaatcctaaaactccagtgtcaggaagctggccaggcaagcagaataagtgtaattcttaaatactaacccaattacatgagtgaactttccagcaccacctctgcaatcatgaggaggagagtcattttctcgaacaaaattttgtttcttttttaccacttggctccagtgtcctccaatgaagagcttcaatccatagggacactttttcccagctacagagtcctttatcttacctgtaattccctgaaatggccaagaaactaacaaaggttttgctaggaaacaacggaatgagatcatgaaagaatgatgcattcacattggatagataatctgtggtttttattgagaaaatctaaaccctccctgagagaatgaaattttcacttaaaaaaaaaaatacattgagtgcagcagcccacaccagtaatcacaacactgtggaagcctgaggtagtaggatagtttgaggccaggaattcctgagaccaaactgggcccagagtgagaccctgtctctacaaaaaaataaaatttaaaagatagcccggcatagtggcacaactgtagtcctagatacttgggaggatgaggagggaggatcacttaagcccaggagtttgagattgcagtgggctatgattgcaccactgcattccaacctgggcaacagagcaagagcctgtctcaaaaagaaattttttttaatagcctggggccaggtttctgtgggctcttcacagtactgggttctcccatactggagatgaagagtctggacagagaagacatatatattaataactccggtaaattattgaggagcagggatgaattagcatacctgacccccaaacttgaggcctcagcaagaatcagagaaagtagaattggaaggtagtgtattagtcacccatgaacccaaagcacttcatttgacaaataggggaactgagtcacagagaggaggctcttgacctctgtaacattagatagctaactagtgaaatgttcttgggcccaacacaggtcttctggtcctaatccgaggcccttttgctgcactgcactatccactcctcagtcacgccgaggatggacattctgtcaaatctgtcacacagttgaatgtgactcacacaatctcaagttaaatgctacttcaggggccaacagcacccactccttccacaataacagattccccctccagtgttcctatcagttcttccagatcacacccaccaggcccttccatcttcacagctcttaactctgcagtttttcttcctattacaccaaaatctttctctctgtaatttctacctattgactaaattccagtttcacaagcaaactggctatgtgaccttggctgagttacataactccttcaaacttgagacttttatcaaccattgagaattaagatgattttactagcacaaatgtcatagcacaatgcccaacatacaataagtgccaattaattgttagataaatgttattattggttttatctatccttctcagagccagaaatcttcactcaggagataacactactgatatatctggtttacccatttccgaggaatgggaggtaatggtcaccttgcagacatacgtcaccttgtagatataaatctcacctgcagctcaactccaactactacccaaattctatctctaccatgattctctaaaagtttccgtcccacaaatcgcacttcactggagttaagaaacacacttgagagacaggaagaacaagtacggcccaggggaaagtagatccaaacatatgcttcagtagaacaagttacttcatgaggcagagaaaggcaggaagagactgtgttagacagcaggagaagggccaatgacaagcctggaccaaaggtgaaaccagcagatgacaatacccacaccaagatggtggaagaagaaaacaagagtcacacccatcaggatgactactatcaaaaaaataaaataaaataaaatataaacaaggattggtaaggatgtggagaagttggaagccttgcttgtgcttatgcacaatatggaagttccttttaaaaatgaaaatgtaattaccatctagtccagcaattccacttctgggtatgttccccaaagaattgaaagcagagactcaaacaggtactcatatactcatgtccacagcaacattatttccagtagccaaaaggtcaaagcaacccattgccagacgaatatacaaacaaaatgtggttcatccatacaacggaatatcatttggcctttaaaagaaaggatattctgacacatgctacaacatggagagtccttgaggtgatgctaagtgaaataagccagaaacaaaaagataagcactacctggttccatttacgtgaggtgtctagagtagtcaacttcatagagacattaaatacaatggtggtttccatgtgcttgcgggggtaggagacgggtagtggggaattgttcagtgggtacagagttttagttttgcaagatgaaaagagttatataaatgaatggtggtgatagttgcacaacaatgtggatgtatttcatgccaccaaactacacacttaaaatggctaagatggtaaattttatatgtattttaccacaattaattttttaaaaaagaaaatggtgtcaggagaacccttcatgggcaaataaacttcagtttattcagatctttttgaataaaccttttgaatgaaggtcattgtgttgtttgtttggtttctcaagaaagaaaataaacaaaaacacatcaacacttaaaatggtcctcctgggaacagagctcagaaatatatgagaccaatgtccagggacaaaagactgggatatttagcgtgtgagaaataggttggacctcctctttatttatttactagaaaataccctaccagtacgcacatgggtagcctacgaagattcaaaataaattattgccctctctatccatctgactttttatggggctgacaaggacaggaacaatagggactcatcttccttctcccacattagtcagactgtccctaaagtcctcttctcacagatcaccagattatcctgagccccccagaggctcactggatcgtcagagaacctgccagatagagaagagagtttgaaaagaacacagcccataacaaccaagtttgaattagagcttccctctaaaacacaaatgcaaatccatttgagccttttatttttatttaccacacaggcctttatagacaagagctcagctgaaggccacagtaagaatgatgtttcattagtgtttctgttttgttctgttctgttttgtggttttttcccctgatggggactttggatttctacactaaaaattaatcaggagacccttgattcagcagcaagtcctgctaggctgtgttttggtctaggcttttggagaggggcatagttgcccaagaattcacaaaagcatactgaacagaaaaatgaaaatagaaaataaatttatgtttctagagagattaaggcagggagtaatttagtattgggggaaaaaactccaactctggggctaagtcttgagaagtggagaactaagtccttaatggaggatcccctattgtaaactccaatggttttcaattaaagggccacaaagtagtgaaagcgatttttcgtatttcaagcagcctattagaaacagaagatctgctgggatatggtcacatggactcaccagaaagccaagttgttttgtgtttgagctggaagtctcccaagtcagtgtggtaacactgattatctcatcccaatcaaaaactcttaattggccattgatggtatcaagggcatttctgagaggagatgttttaccttcccattttgttatacgtttttgattaataaaaatggaattatagctgcattattatttgtccatagcagtttggaaggcaaagtcctgcaaaaccctgtgttcaccaaggaagaagcttaaggggtccttggtggtgaaaagttggggaaccatcctctccctctccctggaacatgcacatttcaagggaataaacagacttcttctgagccagagtggagtgtgcctgttgtgtgagaaaacgcaaagacagacagtgtaaattaactgcatctggtaaggttaggtgagaagggggaggagataattagttggcattataggaacaaggacaaggaacagagttctatatttacacagaggaaatccaaaatagactacattgcacccatttggggcttgtaagggaactcacggagttggcagatggacgcagagaccagacgcaaggctgatccaaacccctggataccgtaagcaccattcccaccttcaacaaatggaaacctgactttatgcccttttttttcttttcttttctgagacaggtctccctctgtcatccaggctggaatatggtggcacgatcacagttctctgcagcctccacctcctgggcccaagtgatcctcctacctcagcctcctgagtatctagggccacaggtgtgcaccaccacacctggctagcttttttagtttttgtagagatgggatcccactatggtgctcaggttgcttcatgccattttacttctgaaaatgaaggcaagaaggctaaggtaaacccgaaagacattcaggagcgatgagacaaggtttcagtgagagaactcttatcttaaaacaaaagcccttcttgtgtccatgtgttctcattgttcaattcccacctatgagggagaacatgcagtgtttcgttttttgtccttgcgaaagtttgctgagaatgatggtttccagcttcatccatgtccctacaaaggacatgaactcatcatacaggaaggagaacatcacacaccggggactgttgtggggtgggggaaggggggagggagagcattaggagatatacctaatgttaaatgatgaattaatgggtgcagcacaccaacatggcacatgtatacatatgtaacaaacctgcacgttgtgcacatgtaccctaaaatttcaattaaaaaaaaaaagccctacaataagcaagccaaacaaatggatctgtttatagtaaggtgggctcacttaaaacctgatactggactatttacagtaccctttggtatgtatgtttccatgtgtagacatgcaacatttcggaagtaacgcacatttcaagtgaggcagagacatcactgggctattttattgcacataggatagtaaaaataaatgccacagtcacataaaactcataatctgcagccaagatacgatttccactttctcagaagaatttaaagcatgctagcacaaactatgaaggcgcctaatatgaaaatcttttctttctatagacacaaagatactttcttttgtacatgtaatatgtgtgttacataggaagaaaacatgagcatattcaactttatcggtgaatgcagtgagatgtagttctttaaagtaagagctcctgcttagtgcagagccattaaggtgtgtacttatgagaagcaaggtgcaggtgagtatttacagatttgcaaacatttctaaagccggtttacagggtgtttattacgaaaaaggatgtaacagtcatgaggttagagtaccttcttaaaagagaagctaaagatagtggaaaagactagatcaagattagtgagctcaatccacaggccggaaaggacagggtctaggctgctctcatatgcatccagtctcccagagaatccctgggaaacacagaaatgaacagatccaactcatcagttaggacagaaaaagtgctgggagaatgaggttgtggccatggagagaagcacagtctggaagtaaggacagttctgctgtattcctttttttctttttctttttttttttttttttttttttgagacagagtctcactgtctctgtcacccaggctggagtgcagtggcgtgatcttggctcactgcaatctgtgcctcctgggttcaagcgattttcctgcctcagcctcccaagtagctgggattacaggcatgtgccaccatgcctgactaatttttgtatttttagtaaagtctggggtccactatgttgaccaggctggtcgcaaacccccgacctcaagtgatctgcccacctcggtcttcctaagtgctgggattacaggcgtgagttacggcacccagcctggaagtaaggacagctgtgttctaatgccagctctgcccaaccagctgcacaaccacgggcaagtcatgccaccgctcagcgttcagatttttcagctagatgaggaaaatgactgactccaaagagtccttgcaactctatatatttaagcttctctgtactttcaaaaaagaccagagcaaccccaatagctccctaaaacgcagctcactggaaccttctaaaatggcaaagacactatacacatccaacaaacattttatatttgcccatcatcctcttcaagcatctcagagaacactgcaaagctgccattgatatttcagtagcctcttgaagcctacagaagtgactgcacctcctaacccatcattatattattgaagaacaaagatgctgagtgctttgtccaaggtcagaagctaggacaagatcagaattccagcctcctcagttcctaggctatgctatactttccacgaagaaaccaagctggctttctgggaagaatgccagaggttccattctcccaactgagaattcgttggaatattggaataacaactttggagactgtggtctctccaatccatttcaggacctggctagaaatgtgaaaacccaaagaaagaagcaatagggaattattccgttttttaacgaaagagaaaaaaattagggatgggaatatggggtttcttaaaaattacatgatttctggaagttaatttggtatttcttcattggtttgtaagttctgtttccaatcacaaaaaacagacagctgaggatgcctaaatcacatttcagtgaattagtgtcttgtcccaaagaatctttcccattctgaatataacatagaacacagaatgcaatcctccatggtagaaaggaatctccctgaacacagcagagagcttgccataatcccctaaaccgtaatctgaattgataatcttccagccaagcagcaatcaccgagaataataaagtgggtgccacttaacttggggcacattgcttcttctagaaaactgattgagaccataccctgcccgaaaggagaggtgccatcgcttatatcctgcaccacacatactacttattaggctgaagctggtgcacctggaaaagactccaccacagatttagagacacgtgttccaaaggaagattctggcttcttccaagaaaggccagcatgaggaggcctttgttggatgagcttagtgacttgaaataacatgaaaccaacttgacagcaaagctccatggatcagtactcagagttgaggttcatgaagaaaaggaaccaaaaatgattgaaaaatcactttttccccctacctgtcaattatgactgggtccgatggagtctcatttcggtttccacagcttttcttttcgcagcatcgactgtagattgggaaggaaccaagagtgaaagaaatttattaaatcaagaaaatgcaatgagcacatgacaagaacattttttccccccagacagagtctggctctgtcaccaggctgtagtacaatggcttgatgcctccttcttggctcaccacaacctctgcctcctgggttcaagcaattctcctgcctcagcctcctgactaactgggactacaggtgtgtgccaccgcgcccagctaatttctgtatttttactaaagatgggttgttaccatgttggccaggctggtcttgaactcctgacctcaggtgatctgcccacctcggcctcccaaagtgctgggattactggcatgagctgtagtgcctggccacaagaacattcaccttcgtgaatctgtcttggagggaaacaacacacactggggcctgtccgaggggtggtgcagggagggagagcctcaggaagaatagctaatggatgctgggcttaatacctagatgatgggttgatctgtgcagcaaaccaccgtggcacatgtttacctgtgtaacaaacctatacgtcctgcacatggtcccctgaacttaaaataaaagttgaagaaaaaaaaatgaatctgtctaaggtagcttcccaactataagctacttgagggcaggatttatgaccatgttttataaaataaaaaataaaaaacactgaacctgaagccaaaatatactcaaattctcactctgtgacttagaagctggctaattctcagcaaatcacaactttcccatgagtcatatttgtaatcggaaccacggaaggttggatattaagatggataaggtcacttccagattgatattcaatgattttatgatattttagatatttgtggctcagtaaataattaaagaaacgagaggaaggaaaatatgtaaaatagactgcaagtggctgccaggattactataaaccttatttacataacatctttctccagagatcttgctatactttataaacatttattcattcacttatttccatcatttttcagatgatgtaggaagaccagaactatggtatacattttaaaatacgaggaaaatgaagcaaggagctgttggatggtagctccaataatttttaccaagtctgaaacagaaatggtatcccactgtttgtaagtcccagctctgaaaactccactttccaagacgtccctcttgtgctgggtacctgatagaaagacctcaataaatgctgataggattagctgagagggagataaagaagatcccctggggcaattacaacaaacagaaagtactccctaggacctgagaggggtgcaaaacactccagtccaaaggtatctgttcgaaaatacctagacaaatgtgagaagggcaaaggaagcttgctggtaagaagcactgggaattcactcccttaccaccagggagcccatctgctgcctatcagggctacagacttctgaatacctctcagctcatctcaggtacatggtccactatcaactatagttggctaaggatgtagccttgacatggctttttaaaaaatctttatcatccatactggttggagaatatgcctaaggagtaagcacactaacaataaccaaactctatgtgaacactgccctgcccatggtagtttttctgtagcataagtttgacatgataccttaggaagattgctgaactgggaatcagcgttctggtgtccaagctgtcaccaaccagcttcacaaatttagtcaaatgtctttaacccctctgggctttttctttcttatgaataaagtgaaagtgttggatttgattctctctagagtgtcttctaggtctaagtccatgaggctaggggattccatgagcaccctttgaaagtggtgataacataaggaaaaagggaagtcatgtgacagcaggaacccaatggcctagcaccaacccagtcttagaatttttttttttttttttgagacagggtctccctttgttgctcaggctggaatgcagtgacatgatcatgactcactgcagtctcaaccttccaggtttaaatgatcctcctttctcagactcccatatgtagctgagacaacaggtgcacaccaccacacttggctaattttttatttttcattttggtagagatagggtcttgctgtgttgcccaggctgatctcgaactcctaggctcaagccatctgcccacatcggcctcccaaagtgctaggattacaggtgtatgccaccatgccaagccccagtcctagctctgtggctctctgcagctcatttgccctctctggttctccacagaattaaacacaaacaaataaatatcttaaaactttttaaacccacctctttcatgggtgtgtggattcgcaagtgagtaagtctaccatcctcagaaagtaaaatatacttgagagatgcttaaacatttgcagcaaatgggcacaatgaggttttaagaaatttaatcaaattagtaggaaggaaaagaaaaatggtctcaactttcttaaataccagagtttgccactgggactttctgaaataatatttggcctttgaaattatattaggtcttaacttttaaaatttcaatccatcccaagattaacaccaataaaaatgcaggccagctgctctcccacctcctaaagcccttgtctctcttcccaaatccctaccccccacccatttctcccacctttcctgtttctagaatattgcttatgtcaacgtaatacctttgcagctcaggcaaaccatttttcttagcaacacagtttcaaaagacccatacatgccagctacctacagaccttcaagcaagactctcccttttgacatcaccagcatgtcaacctaaccccaaatatgtgtgcaatgccgggtacaatttaattacaagagcacacactgtcagaacgtgccaatctgtttagtttgggtaggaatgattctgagggggctgagtaagttttcaaaattgttcagctgaattcagctgccttccgtggggatttcctctggaggaaaagaaaacagataaaaatgtaagcctggtgccagtgtagtataatgtagggaaagaacttgggaggaaatgatattcaaagaaaaatgcagataaactttaggatccaatcctccattttccaacagtaacatatttaaatatcatctctaatgctgatattcagcacaaaacatacatagaacacactcacttggccattgaactataatagtaaaggtataaaaataatagaacttggttgaattagccccatttgagcccatcttaaatttttttctgggtctgttaagttggccaaagcaaattattatttttttttttagaaaagttctcactaatatgttctagtcgttctttgtttttaacggcattcagtcctcctgccagcaatattagcacaagcaatgggaagtggagaacctgagatgtttgtgaacctacactccccaaacagtgtggaacagctaagaaaccaggtccctgaattactcagatgataaactcaattctgccttccctttgctgtgtaaacaaagcctgagtgaccaacttcaggttcagctactttagttaaaaggcttttaggattattctccaacaagcaagtctgaagttcctgataagtgttttctaaaactaaaaatgactctaagattaaaaaaaaaagtaataaaaaaataaataaaacaaagagaagaggaaactgagcttggcaataggttaagactgtgttcgtaacaaccccagagagactcagaggtgctcttttttcctaatgaatgaaaatgaaagctgttccactgtttctctctggcttggtttggtttattttattctagtacttatttggagaatcttttacttgaaacactctcaatttattctccccatctccacccggagtctttgaaggagagagaaaaaataaaacaagttggaagtgggaggtggggaaatatgagaactcttatcacaatcctgaatcatacctgcattttttagaaagggaaaaagaggaataaaagatggctggggaaggggaaaaagccccagccttggacagagagtgtcccgtcagccaaactccagctcacgacaagcgagtgtgtccctttcccctccaaaatagtttttaaaattcaaccttcaactttcaaaaatctgtctctaatttcaaactcaaataagcgcacagcatggtggcttttgttttgttttcttctccccaactcctccctgcgattgcataacaaaagtgtctaaattcacaccatctggccgataaagacactggccccactgcccggctggcccatctgattagggccctgtctagcctgcgccttgtggcgaaaagtcacagctgtggggtttgctcaagctcaatacaactctgttattagccagctgtaggccttgagacgacttctgttcaaattataatatcttttaaccctctgagcattgagggctcaggggtggctggcagcgacataacaactagatttctccttgctaataattggcaaaatgaaccaaagcagggaagagaggaacagagaccattggggaagggagaaaaaaaaagttattcctaaagagatttattttgtctctgctttgttcccccattcaaagctaaacacagatttatgaggcttttactaaagattacggaacataaaaccatccggggaagtgcccaggtatgccaaataacactatgcaaatgaaactaagtatatgcaataacccttgagaaacagggcacctgattcatctctcaatcattgactgctacaactggctcttaaaatgtaagagaaggaacttttcccccttcctggagtatcaaccagctctaactgacagattgaatgagaacttcccttttggatgcatctaatatttgccattacccatctcatctgcacacatgtacacacacacatgtatgctgcagacagtatccatccaatggatcatttatttacacataattaatatttattttaaattgtagtttgggaagaaaacagcagagcatcttcccaggtctccaatgcagagaagttacagtacattaaatttttatattgtgttactaatgcagactaaactagaggctttaaaaattgatgctgctacttaaacagcataaaatgaggaggatttgattgggcttaaaaataaaaatgtcagtcttaactacagctggatggggcatgcaagtattattttaaatgataggtataattcattagacaatggatcaattttttgttttctttccttttcaggaggtaatctctccaaacaaaggcataaaaagaaaaacctcccttcaactaaccaacctaatcaaagcgttctatttaaatctaggtattatatgaactacatctcagaactgtattttctttctgaacaaatctatcaaacgtccctgagatattggagtatctatcttcttactcctcccaatgccttccccccagctactccagcaaggaagcctccattgctttcagctgaagccactggcatttggaaagtttgttttggtacttggtcaaaaccaaaacaaacatgtctgattgttatggtttcttcctgactgggttggggagggagacagggcttcagggagctgcccgtaaaacagtacacactaaatcagataatctgcaattacccaaagctagtaagtctggagttaggagacattgactaaagcaatagccaagtaaggaagaattgagactttccctccaatcaaagatttttggaggaagaaaagcatgtatggagcagacatttaaattttcataataaaatagccacactcttcccagagtttcctatttatatcctttcttgtctgcggtgggatccccagcacccaaccgataccgggcacacgttaggcactcaataaacatttgttgaaagaataagggtagatgcaattcttctgattttttaaactttcttctagtcaggcagaaaaaaagggtggggggggaatgcacaggactcaaggtggaatggattgatctctgaaaggaagatgggaaaggtgcaggaacgccagtagactgaacctttcacgacgtgaatatcagaatccagctgttgctccacactccagatctcccagcgggtcctctccctgcccctcctaacgctggtgggaactggactgatctttcttccaggtagttccttctgacctgagaaactcccccgacacgagaactcctaagagagcaacctcccgggaggaagaaacgcccacgcatcacagcaggtgcctgggtgccaggaagcaccccggaaatgagccgctggaccctctggtggtccctcgcccagactaggagtcgttccagggctttcactcagtaactccaagtggagttactggaaatctaccacaagaggcccggcgggaactccagccgatcccaaacccggcccggggttgcccagcccgcttccaccactaccactgacaagggcacagtggagactttccacgtagccggaggaaactcctgcgacatcagagaggtggaatcccgagtcgttctgagtcccaatggttatgctttaagacacttgcatgaaggggtttccgtggatctacactctgcgcccgtctgcccgcgaggcctcccagctgcgagcgctcagtcctgaaagttagtcccgggaacgcggcgcgccaaggcggggctggagcacctgcgggctctccaggaaggcctgggaaaaggcggctcttacctacacatcacttcgtgcgtcaggagaactcggcacatttccggattcttattctgtccctcgtaagcgatgggctgtgaaggaggtagtggcaggaaaggaagatgtggagaggggtggggggcaaggaaagaagggacttcagaacaagcacaacatcgctttccctcccactacctgccaccgcattaggaattcccgcccgcagcacattctgcgcggttgccgagtttggactcgactgaaatcatagagaagtttgccccagtgagaacatcattcttagcaaaatggaatgtttgcgggaactgaatctcccaataattgtttcctctccatcctttttgttcgcctcttactgcccccagggtttccctgagccagacaaaacaggtcacttggtgagacagggaagaaaaaaaaaaaaaaatcttccctagcagacaaggtgctgggagggggacgtggagggggctgtggagtctgacccaggaaatcgtggaggaggggcaggtcagaaacaaactggggggtttgggggtcggggtcagagacaggcgaagagaagccaagtggcctccggctcacctgcttggtgaccgagtcgatgagcctgacatagaggtcctgttccgtgcggacacctgcggggaccggaggggcacgagtcaagggccgtagagccccttccgggcaccccaaacccttctctgccatgggtctgaggcccaagcagcctctccatgctgagccgccctggagacggtgacctcccaatcccctgtcccaggcaagcctcccgccgccctgggctccatgcgatccctgagagtgatcatggcaaggtcagcgcgtgcggcccggaagccggctgctaggcgccggctcaccgttgctgtagaagagctcaccgttgctgtagaggagctgtaacttgtagtgagtgccgttgttggtcttctcgttgccttgttcctgaaaagacaggcagcgttcgattcccttgcctttcagccccccaaaatgagggaaagaggagacagtgaatccccacctcacatcccttctccccatcaaaaggcagctttgagtaaccccctgttcagccctaggtcaaagggcatgagcatctgcctgtccttggccgcccccggaaacttgccaagactcgtagccacttgaccctttccagccctctgtctcccttaaaaatgtcctcagaagtgtgacccttgagcttccgacaacaggaccacttgccaaagctgcctttaaacaggcaccacccaacccatcgggctctgtctgtccttaggaagccccaaggcttcccttggcagaaaagtgaagggacttgtcatttggaaaggcagcattcgggcctatcccgcgaggactgcgcacgcagggccacgagctcagggactgagttccaggttcaggagggactttgggaagtgcctactctaaagctcacattgtacagctggggacacggagacccggaaagggcaagggattttcctttggtcacacataggtttcggcggactgtccttcatttgagaccgaacccagcccccaattccaggcttgagtttggaggaggcgctgccttggagaacagaacaggagagaagacacggccagaaggcaggccaaggctgggctgccggtttccacttagtgccgcaactcaggccacctggctctcgcaggtgcaaaataattaaaattaacccagagaaggggagcggcggccttgggtgtactttttaactagtccaaggggcgtttgctccgccgtcagtccataaccaggcgctactaaggcctccaggctcggtgcgcagagccgggagcgctcctccagctccaggttgggggagtcggggtgggaggaggttcgggaaatcgactgatttagaggctgggggtgagtagcctcgatttatcatccctgatggtgagagtggaaaagtgtcgcgagagtgacagatggaatctttagtgcttcgcaagagggagttattaggccgcggggtttggggggtactttccgcttactttgtcattctccacaaagtccacgaaggccgtccgctcgatctccaccggctggccctgcctgtcatagagcgccaggacgaagtgaaagaagttggatttcctcaagttggaaggaggctgtttctcaaagtgggcccgggacagggcgaccccgctgcacagggagaaaaacgggggaacacaagacacggggaagcacaaaaaggcgatgttactaaccgcccacaacactgcagaggggtaaggggtccacttcccaggtccagagttctgaacccttcgggccttttttccaattcggataaggaagaggagactccttaaaggagtcaccgtggccacgggggttgggtggcagggttgatacctggggtctctgacaccaccaagtggtccggcatcccaccgctgggccactcaccatcccgtctttagtcgaaaccgaaagaccccggctgcagacagaggcccagagtggtcccctaaggaggtggcccgcgtcctataccgtggggctgtctccatccactccctcaggtggtactgctgggtgtatcaggatgcagagctggggcccagggttaggggaataagtgcctcctttgctttggaagaagcgacccttttatttagtattaattcgagttatcagtcctggacccactgctcacaacgcccaaatgctgactgggaaaggtagtgggtaagaaccccaaggggcaggcgggagagtaacacagagtccaggtctgggtccttgggctgcttgcctcgctcttccgaaaagttgtgcctgggacagagacagggcggaatcctcgcgaccagccccggggatcgctggccaccacaaatgagatgaccgacatagggggccctccctcccagaggtgctaggtggggaaaagccaaactgttaaaaggcgagaacctcctttcctggggccaacgcgatccccactcatgctgcgttttctggcggcgccagccgaacccagtgactgtgaaacccaagttgggggacccggaaggcgccctcgagcgtgctgagtgtgtgcacacgcttcccagccaaccggtcgcagtcacagcccacctggccatcagatcccatttcaccgaagacttggggctgaggtgaacgcacagattgcgggagctgccctgcggcgctggggtctcccaggttgaaccccggtgcgcaagcaccttcattcactcttttgaaaggggtaacattttggctaagctctcccccactaagtctgctccttccagcttcaacaaactttttgatcccgggaaggaaggaaagcgagggaggcgtctttaaggagcccagctaaggaaatgcgcggcacagttggctctgcggtgctgccttatttcccttagctcgcaggcgggccagtcccgaagcgctgcggaaagccgcggccgccgcgctgtgcggtctgccggagggaaatccgcgctccccgggccacaggagggagggaaccgccgccggcccaagtcccggagcgataaaacttctgctttctccgctccaagggtagaggccggttcgctctacccgggacacctggccagtttgggaaagggatcatttctccgtgtgatgttggcacttaaatgtgggtggccaggagggcagcaggggaagcgagggtagtggaagaagttcatcggctctttgggggtagaagggctgcctctctcgcagacaaggacctggaggccacaaatcccaactcagtagtggtgatgagagagtgggaccgtaatgtcttcgtagggtggcaccccggacatggtatttactatcccagcacgcagacgcctaaacacaaagtcaacttcagggatccgcaaaaccagaggctggcgatccctgagccagtctagctgctggtggccttttctcgcctctttcttcttccgcaactctttctactgtgactcagtattttctcttcttttaaatctcttcttttctccagttccctagctccgttcgtctggctcactgttttatctttgagccgggaccctccagcctgtcccccctcccagagctcccggccgcctcgtcttcccgggcagccgctccggcttttcccgctcccctcgccgccgccaccctctggccgccggcctcccaggctccaggaatcgcccagcaagatgcgggaggtaggcgctcgcaggcggcgtggcgaagccaagagtggccaggaagccggctttcctcccgcgccgccactgccagcgccggtgttcacgctccgttcggggccaggccggctcggcttgcaggactaggggctgagctgggagatgttgggggctactttatttttccttgcaaagagtggactgtggtaaaggagagggagagaaacgcctacgacccaggcagttcaggaactcgagtgccggctgccgggtgagcgttcgcctgactgcagcgatctgcttgcccgagggcgagccccagcgcgcagggcctgggcgacagatggggggacagggagagagaaaggcacggggtgcgcggggggggtgcacacggagagacagaccgtaagagcgagagacagcataataattgcgcggccgtgtcgttacctctgcgcggcgacattagcgtccaccactccgacattccggacccaggacctgaccgaatccatctccgcgcccagcgatttctctttcagagttggtcctcttcctaaagtatcttgaattccaaacatttaaaaagtctgatcctctactgtcgctttaaaagtaagagttacaacacagtcctgactgttcccaacgttgccagcaaatcgtctcctccaaagcaatccaagaaaagggatcaagtgcccaagtttgagtcttagaaaaaaaaaaaagataacccgtcctttgcttcactggcgaggtgcggactgatgtagtcaaagtttgggttcttatcctccgcaagttcagatctgccgcctcagccactccaccctaggtcgctcgcatccttccagctgcagtgctgcctcctgaaagtgatcacaatttagaagcatcacctgttctgggagaaactggaggaaattgatggctgcctaatctctccccttcctccaggtcccccctccctgctcctccccaccgttccaatttagaaaaaaaaaaaatccccaacaggatcagttgtaaaaagaaggggaagacctggagccgagaggaggcggtggctgcgagcgccacggagcccggctgcagccgcgcgcgggccccatgaatgggttactacggccctggctgcgggaggcggagctgcggcccgataaggagcctcatttgcatggacgcgcgggattggccggcgcctggcaagccgggccgacgtcctccggcggcgcgcgccacgctctgcgttgccgggactccgggaggtgaaaggggacagaaagctgcgggcgtcgagtcctagcacgaaccccgtgtgcttgcgcaggattggggggcccccacaccctgcactgacttagggtagcaggtctctgcgggctggggacgcaggggttcggcctggctgcgggaagcctccctggatcctgcctctagatgtaggcttttgtagcctgccgggaggcacgttcgttcccggggttcggatctgtgtgcatgcttgtgagcgtggccacatgtgcttatgttttgcgcaaacgtcccccagagcacccagctccctgaatggctccccaggtctcctggagttccatggtgatatcagatgttgtgtgcggcttgcacgttgctgagagtggagaacatatgaaagaaggcgggggatggggtggggcggacaagcgaggggcaagtgctgctcaaatacagtgctggggaaaacggtccaggacctaaggaaaacacccgcgggcgggcgggcgcgagcggcagtcgcacccgtgtggaggagaggttgctgacagatcgaggcgggctgagtgcgcgagcggccggggagtattcccgcgggtcctccggttccctccccacctctccgttcccgaagcccccggtagtgggcggggagggacgggggagtcgtggaaacttcgcccaccgcgcgcggtcgccgcggtgctggccgcgggctggtggccggcaggcggtggcagcagcctcaccgaacagctgaaaccctagacggttttttaactgcgcggggctgctcgcggtgcctattaaacatcctcctggctgggtgtcattttcttgcttctccttttgtattctgatctgcgcatagatctgctgctgctgaaatctagaacaccagcgcgaaaacagatttgaagacaatgaatgcaaatctgtgctcaaagaccatctgccgtggaggagacaatcagctgttcgtagttcgagcgattgcgccccagtctcccggtctcattacggggagggcatttgcgagcgcctggactgcgttcagggcactttctcccctcttgggtctcagat

SEQ ID NO: 177 - DNA, 131595 bp, Homo sapiens
  source 1..131595: mol_type = genomic DNA
gagcagcctttcttccctttcaggggcctctttactgcttgcgttgacccacttgatgagtatggatttcatgaggtctttttcagcatttgaactataaaaggttcagaatgacaccaccccttatagacaaaagataaccttgccctttgaatatattgattctttattaactaggctgtttaatgcaatgaaatgaggcattagattgaagcccatttcaagtgctttgaataatctttaaaagcttgaaagaccttaaaaggcggcctgacaataattggcatgcattttgaaagaaggcagttcttgcttctgatttgaaacacaaacataaaataatttctccatccccgggttacagggcgttgggtacttgtggcaccagcgcagaatgggaaggtggtgacttgcccagccactgcttgtcccagccccagccccagcctccagccacttggaagggagcctgcaggggaggggagtgggcaggcttcaggcttgtaccttataagcctctctctttgctgtctctttaaggctgaaatgagaacctgattgtcaatgacacgacaaaaaggtattcacaagtttctttatgttttgaataattgtttcctgttttgctcagcagaacaagtaattaagatgacatttgtgagtactaatttggatcacacttatgtgtatgtgttataaagctgcaagccaaaacatgcaaacccagcctttcatggaggagaaaatgaaaaaataccgagtgaaatgggagcatgggaaactcggaggagctgaacatcggcgtgtaaattagaacctcagtgttgatagcagatctcattatagtcggtgcatttggctaccgacctgcagccagcagtgcccggggctagtgcatggggtctgctgtgccactgtggtggcagtggcatccgtgatgcccctcttgcagaacgtaggcagcgcaggcatctgggtgccctggtatctgcacacccatccagagcctttgctgctgtgtcactcttctaagcctggttcttgcccagtggaacccaaccatggaaccaaaagaagcatgtgtctggggtcaccggagccgttgttctctacctgcccagtgcgctattcagaagcagaggggctggggcagaaggtctggagggagtgggttatgaagcccctcagtgagccttgggattgtttgagttctcaaagacaagtgctggaacagtgattgtgtcaccccagtgctgctgtggcccacagaacatctgtgacacagaaacatcagccagagtgcagcatgaatacagatggcacctctgggggtcaggaccacgtaagtgacaatttgctgaacctctctttctatgcaggttagaggacggaggctggataactttgtggaaagttcctctgtggaacatttttatcttggccaagttgcagcttcagaacccggtctgtgcaaatgaaacccctgatgtaacttttatgttagtgtttagtcattttaataatcaaaaacagagaaaattaccaaaagtgaaattcacagacaagaaatactttaattaaatattgtgtaaaatgaacatttttatacagttaaatatctgaaaaaatgtacagataaaacaatcttattgtagggtctttaacagtaaaatctaccatttagtgaagtgctcagtcttgagacagtgaagtgatgtgggcattgactacttaacctaaaacacaaaccaagtgagggcatggggaagctggcaggcgttctcagtgcgtccatgtgagctcttttgtagatcaaacccttactcgtacaaaataaaatggaggcaatttagttccaaagtgacttctcaggctttcccatgtagctagaccttgtcaaccatcacaaagccagactgtgacctgctgactcctggggacattctgtttatttaattttgtccctagaatgaacactttgtaagttgtgcattgttgatttttgtcaagaaggtattttaaagtccctcctttttgttttaaattcgatttctgctgcagtttgcaaaatgtttgctgtgccgtgtctgcaaagcacttagtgcaaaggagaaagaaaaaaaaaaaaacacctgacacttttggtctcactgtgggtttggcactaagaggcacgatatctgaaggaggtcattccagttttaaaagtacggacagtgctgttggaactgaccacaaaaatgtattgttaaaaaaaaattgaaaaccagcagtgatttgggtccccctgaaacctctgtgaatcggaggtgggcccaggagggtgcaggacgcagcagaaatagtcccagaaaggagagacgggtcatgcagcgggcttgtgcttttttgtgtgtgtttgtgtgttttacaccatacatctccaaatgaagtatttattaacaattgtagtgtaagcctgtgataaaatagcacaaaggttctttaaagaagttcacttttaaggcatcagaaaagttaatgtggcaaacattttaattaaaacatcagaagtaaattttattttaaactttaggcctctgaatttttccagtaaacacagttcagctatgtggcaaagtcaatgggtggcatctaaaatgactttttacattctacaaaaaaataaaataaaataaggacacagccccaaacggtgtcacctcttcgcggccgctccacatgcacagaatctactaggatttgtcacggccgggtggcaccgatttgttttgactatacaacaaacttttttttcaaaagtatttgttcagataacttaaaaataatataaaaataaacaatgaatttgacttttcctcaaaataaaaaaaaaaaggatggaaagtctaaacaatagcatattttttgaagtacaaatgaaatgtaaagacactggttcagcttaacgaaacagatcaaagagacaagttcttggctaatgctcttcccagtatcacaacaccaggccgtgatcaaaaaccaatacagacaagaaagaagaaaaaggaaaaggtgggaaaagcaatgtacaaaatttcaaagataaatacaatatttataattgatatgttacaaaataaagtcccttagcaactgcaagtgttcatgggaaagtaagtgtcaaatgaagaccattttattccttataagacacataaggaataaaacttgtttttctaaatattttaagtggatctgaaaaaaattcaagacaagtgtataaatatttagctacaactttggcaaaatcacaaaagtctacaattttataaccacatacaaaacacattagggaagaaggatctagaagtcaaaaggacaatttctggtacaagaaacatagacctcacagtagcctaagaatgcaatagtatacagtgctagcaaaagttgaaaaaatgttgcagatcacacttgcttaacaggaagctctagcagtgggagaatattggaaccaacagacagtagcattttttctctgtcagtgtgcttgttgaaggcaagagaattcaatatcaaagttacaatttctaactacaataagttacaaagtttcatttcatgaagatgaagttaagcagtgataaaccctccctccctccctgccaccccagtttctcctcatcatatagtcatccttttttccagtctgatggctcatacctccttggccctctttttatcaccacaaaaaaatatttcacattatagagatacacaaccattgtgaatctaagtatgagtacagaaaaatgtttggaggcatttttcatcagcgtttcatgatcatcaaaatggtgcattcacaaagtttctcccaacacatagcaattactagacatggccaagacggagtcggaaactttatacaaaataggcgtcgctttgttttccttattcttcaggactgagaaatgtgaaaatatgagaaaagttcagtcaataaaatggaattgttcatgaagaagtaggctgtttgcatgttgattcttaatagtttaaataaaatctttaaacaaagtcttttgtagcatttcaattgctgctgatttttttgaagatactgtttccatcagcatgtcttaatatactaaacgtgtcccctgaagtccgtcctttgatgctgggtgctgcggaaggtaaacagaagtccctcacattggcgggactaccagcccagacatagctgcaagacagaaggacagagcagttactgcaggctcccccacgcgccctcccgccaacgctgacgcgggcggggctgcccttcccccctattcaactgggaggctggtcttgcacagttccgtccaccagcctcgggcgtggttagggcgtgctggggaatctgcttcctgaggtgggggcacacgtggggacaacaacccccagtcctgcccctcctgcagccctcctcaaaggcttctttaaaggcttcttttggaaaagggaagggctcctggcactgctgtgtgcagaggctgcagcttccccacactgaccggtgcactgccaacaggtgcaaagccaacggaggcccggagccccctctgtcgagagaggtgacccagcctggtcactcccgtgacgccagtcaaggccggctcacaggccctgctctcgctccctatgtgagaaccagactggcctcagtttccccctctgcttccaggtctgggctctgaccgtgcggtcatctctctgtatcgtaatggtgagtcaggggctctccagaatcaaagccactcacagcccacctgccctggaacctccaggcaagggccacggagagacgtgagtcatggcaccgcctcgggaccttttttctcttctcaggaaagaagagaaaactttgcacgaaaacgccaagtggggctgacgctttcacatgaactcctggtacgaatgtaatttaaaatcttttaccgctggtgttgtttaatttttgtcagaatgatcgttctcattaatttatgtataacatattaatacatttgttcatgtagtgacgtgagcttcaatttctcagttcattaatttcaacaatattaatttatctccgactcaccgttacaactttacggtttggaagccctgtgcgtacacaccgcgtaggaggtgccgtctttcagccggcccgaccccgtgtcacgggcagggccgcggcacctcaccacctgcctctgcaacgaccctggtgtggtgcccgctgatggcacgcaggccagtcggcggcacttcgggggcctgggcgtcccttcatacgctaacggatgttgtgaagacaatgatttcaaatcactgatacctttccagttccttttttgagcattagttcatcaaagtgaaatatgccaccgacttcacaaaagggccagtttgtcttctccgcggctacgtcctcagcacccagcagagagcctggtacatagtaggtgctcagtaaatactggttgaatgggttcatgtttctaaaggagtaactggatttgagtcactgggaggagcatataccaaaggtggtgtctgaaagaggccagatgacggccacttaatttaagtgcctgcgggcctcagcacctcacaaagggccactcgcaagttcatgaggcctgggggcacccatgtggctctgcccgtcacacacatcacaggccacgtgcagcctgcacagctcagatgggccaggcgctgggcaggcacagggtgcccaccccgtgtggcctcatctgtggacagctgtgccctcggggccggcccttctccctcctgattctttgaaagagatcacgtaggaaaatcagctcctgtccacagacaggactgcaacctggtgttggtacacacctggccctgggtctagacgcacacctctttccaaaagacagtgcagccctgctggatgtgtggcccagcagataaggtggagaaccaaggcccagcctcgggacaacgagggtagcagattttgagatgggctccacaggtagcatggtgccccgccattcccatgccagggctattttcgctgctttgtgcatagcaggctgcaagcccaggagctatgggcagggcagcatcctgcgctgagaagtgccaggccccgggcaaaggcccattggctgaatcagaccgacagtgaccacagctaccttcaccacactcccgccttctcttacgtggtcccacccccttaggggcacagggtgctccaccgtaagtacactaggtgccgtcggaagggtgagctggacaaaaaccaagaggaggaatctggtcctttctggggctcagtgcacaggggtcctcgctgtgaacaccaggcagaggtggcacgcatcaaggtgggccacgggagaacatgcagcagtcacagaggtgccaggagaaaggccgagcccccacccccactcccatccccacccctggagaggacccagcactggcccacggccccgcaccaccctcaccttgcagtccattcccgttggcgctggtgcaggaaggaggaggagaggcttggggccggaccacgggcgcgaaggcgctcttctgtttcactgcggagatgacattggcaggtgagaatgagaaaatgccgtgtgtgctgctacagtttgaagggagggtgaccgaagaggctgccatggtggggctggacggcactactgcaacaaagcaaacacggtcagcacgcgcggccgcggcacagcgccacggcgagagggcaccaaaggcctcgcctcggacgggggggcaggggcacgaaaacaaaacatgacatgcgtctggctcggccacgctctggataacaggcaagctcttttgcactggactttcccttccaattgagcagcccattttgttctgattttgttttggtttccaatgagatcacatcgggcccgttttgggtcaatttacggtcgccatttggacgcccagcctccagggccacccttccttttatccagtagctcacatcacagaacatccaagcaatgcacacactcgactcggtagtgaatatgaatctgcgtgatgacgtgtgacaaaaacagacacttactgccgtagggagagttagcggaggagccattaagaaatccaggcgagccagggacccctagactggccatggcgccacttccatatccattcatgctagtgctgactgtgttgtaattggactgctggggagtactgctggggacgtagcctcgcggggacacgctgcttgtattgcgactgtagccgactgttgaaatcccccccccggccaaaaataacattattatcagcgacagacacttggggggggttccccgagaatctatatcatatattaacattgctaattgaccctgtgctttccacctgctctagcgcctgctgccagctcggatgaccttatcacgccaaccctgctgccactgtctcaccgtgagccccatcctgtctctgctggcttcaacagccagccggggcgcgcttcgatctcgccgtcagtggctttcacgtttctctttagaggcaattatcaacagcttggattcctggtctgtccccccacgctctgtgaactttcggcctctgtagaccttcaaatgccatgactgacaaggagagcttgtttgtggccgtaacttcccctgaaaggctgtttgggggtcttcatttgtatggttgttatttctatacatgggggcgttcgggggacatggaagcttcattcctgccatgggagcttgtggatggacgggaacaaaatcagcaatagtatgggtgaggtgttttctaagatcactgcctgcgcgcttttcaatgaagaaaactaaaatggacccaaatggcaagatgcagcggccttggctggcccaggacactgcactgtgggatggggtgcggggtggggaaatgggggtctgtctccatggattcgttccaaacttagacccaaatcccgccgtgcagtgcgtccaagcaggctcccctcagctccctaggccatggctatcctatggcttagcccagacttccaaggaaagcaaagtctcttatgaacacattgagggaaacttctagcaaataccagtgacccgcatggcatccattggagctgccgtttttagtaactgggctctctgagtgttcttaccccagcactggctgggaggacctgcagcaaggtcttcctgagcaaaggaaccagcagagccagagagaacagaacgctacggacattccccagctggccctggacacgtgcctcttcagctaaggcctcaaccaaccctcggagggcgttcagggcaggggtcctcccagcatgctggcataccttggtcgttggcttgtgacgtctctgacacgttgacggctagctggctgctgaaggagttgacgcccatcatgcccgtgtgtgcagggttgttgcccagggtggggatctggttgtgattgcggggaacgctgtacagcgcctcggcgatgtccgccgctcgcttcaagatgatctcctgcagcaggagcaagtgggagccggcctgtcaccccaggcccggcccagctggccgcactctcgggggcccaccatggtggcatcccactgtcccttgcccagaccatgaccaaatctatttcttaatgggcaaagagcttcccctagaaaatcatttactgacgcttttgaaagtgtgcaatatctggctgggcacggtggctcactcctgtaatcccagcattttgggaggtcaaggcaggcggatcatctgaggtcaggagttcaagaccagcctggccaacatggcgaaatcccatctctaatgaaaatacaaaaattagccgggtgtgttggcaaacgcctgtaatcccagctactcgggagcctgaggcaggagaatcgcttgaacctgggaggtggaggttgcagtgaaccgacactgccctactgcactccagcctgggtgacagagcaagaccctgtctaaaaaaaaaaaaaaaaaaagggagcaacatttgctgtgttctgtcctgcatgctgtggggcgcccatccagccctccctggttcccagcggcaccaacaccgtccacccgccactgcacactgcagatgggtttcaaggctgtgcactcccgctgtgacaagttttttctgcttttgggtcctgacaccaactcatcatttctacgtgaacctagcgtgagggcaaggatgggaagccattctcacatcagactcctgtggagtcgctggaaaagcatgcttatgtccagaaagcccacactggagccacgccggctgcccacgggttctggcatgggggggaggatgggcgaggggagccgccctccacctacctggttgttgtgaggcattccgtataaggcttccaccaggtccgccgcccgcttcagtaacacctcctaaaggaagagcagacaggaggtgattcatgggaggaaccggccagttatcactgcccttcagtaccagttccgtctgcgggtgtggagaccagtccccacccacagcgacccgtcctggccctgccgtgcacttcgaaggcaggcacagacaggaaggcacgtgcgtgctgacaacactgtttgtggcctttacaaggaggctgaataaaagcgttttctgtggctcctccatccggttgggctcacagaggtgcacggacaagcgggagggccggcggagaacgagcccaatccgtgcctgaggtttaatgacggagtcttatgggtattaaacaaatacacacatggcggagatatgaaaggcccaggcaccacatttgcctgttaattcctagcactttagtggtgaagaacaataagtaattttccatatcttaattaaactggcagagtccttaaagacaacatctcacccctaattcacgccccaaatttgcaagtgagttcagtgcttattcctctttattttgaacaataaagtgaattaacttgggttaatctagttctttcataatgacattaagaaatttttcaattaacctctttgactgcatgttgtaaaggacttcataaatgccttcacattccgagagtgtgcgcgctgtgcctgggggcttggatgcaccgagttttgtcttatccacgtctgcacgcctacctccagtttacgattgtgcggattaatccagagtttagttaattttaaatacaaatgggggcttacgttttaactttctctaccttgagctgtaataaaacggagctgagctttttaataagccgaggccaggcccaaacccctccccagcatggaagacgggcagagagtttctttccaactccattcagccaggacagtgctagcacagaggtgaagagaaaaattccctgggtggctggagcacagtggcctcctgcggaccccaggcccggtctaggagagctctgcggtctaggagagctctgctggtccaccttttaggtgtggaggtgtgtctacatctgggcacctcttgttaacctgagaccccaaaggtgactggacaaaaagtaaggcaggtggccttcgctcctgggcctgtggctgtggccttcccagagagctctgtggtgcctcacagacacaccagcttatgatttctgcagattcacataagcagatttcagcctgaacctcttaatgcaaatacagtgcagtcggctggtgggaagcaggcccgtaatgactccactgttaaatctgtgttacatctgagaaggcaacgactgccttccaaggactcactcgcctcattgtttccccatctcccccaacatgccgactctggaccctttatttatcaagattaatcactacgggcatcactttttgtgcgtgccatacgttcccaggaacagcacttaatccagaaagttcccggatgggtggctctgacaatgggcatttacctctgaaattggtgccgacgcttgatgttgcatgcatctagtttgcatacaaataaagaattagacttgtcatgaagcaggtataatcaatgaaaggcccagctgtcttaatcaggtttcgttagcctgagcagctctctgtgagcaagataaagtgtttttcagaggtattaataattactcataatctctcctatcatatcgcaagactttttacatgcctttcaattttaagcaacgattaaagcaattaagattgctgcatttacaagctatttttcattcccagaaaatatcctacacctacttgtccatatggtactttgcaattggaacataaggatagtttaggaaaattacgtatgctcttatcctaatctgcctattactggatagtgtcttaactaatgaacccgactttctgagctgctcttaagtggtggtcttgtcatatcagagagacacaaaacgggtaacccaatcagtcaaggatgctttgaacaagtttgttttgttacaatatgccgagcttatgcatactgcctcatgctgtgaatacattagcaccgaatggtgtttgaaaagcatttcgatggaaatttcttagccacaaccataagtgtaattggctgcctttcaataggacataacagacttcaagttaaatggaaactattaaagctcaaatgatttctgccgttgtttcatgacaaatgtacagttttattattatgagtattcattcttgtacagtggtcgacagcgatttgaatatacatgattattcacatgcccgatgatctagaatggtatatatcatcacagttaaaagaggtaaccaaggtgacgttgcttcaggtgctaatgtcattataaaactgtaaagcaattattctgttagttcttgcctggggttatgaatacattgaagagtgcagagccattagatgtagctacttcaaaaagcggggaaaagaagatgaattttaatgcatgggtaattgctcaacatgaccgcattcctaataaatttttgtatattagaaaaaaagaacagaatatatttgtgtatgatgcatgaaacagaaaaaaaactcagatgaaatgcatgcaattaattttatggtaaaatcattttatgactatgcaccttataataaatataatttgttagagcacaattccatgcataaaatgtaatttgttttttctgctttcattttttttttttttttactataacatgtcttagccttgattatattgtttcaaataaggcttaaaaagaatgagaattctttagtctctgatcacttagagacgtcttcccttccaatctctatttttgccacatgagtgcctcttgatattgcctttattttcattctgggctttgtgtgtgtgtgtgtgtgtgtgtgtgtgtgtgtgtgtgtaaaacatttgcctatttatgccactcccacaggataaaatgggtcatttttgatggtgcctaaaattaggaggtaaacttcaattcaagccaacccccctctctcagaagcaacactattcgcgtgcatccaaaacaatgtgtgtgcaatgtattggctttctgtcgccccacaattacccatcaaaccacgtgcattacggagcttcaaaaaaattgctgcaaaaatcaatattgtggtaatattatcaactgcggggtgacgccgaggagggggcagcactcctcggcaaagccttattgagacacacgctttacatctgcggaatctcatctctcatttctattcttttttctctgtctctctgcttgtgacacttacggctgattttctttattccatttcttttttcattcaaaatgtatgttaaggccaattgctgttttacttaggacccactctgacccttgtaaagcagcctcagatggctggcttaaccatgatgaatcgcttggcagtttaatttacatgccgctgaactccacatttgggtccattagaacaaaatcaaatatttatgttgtttattgaaactgctagatttcatctcgttcagtgatcgttttatgtgaagcctgaacaatacgttttcacctgaattaaaagagctaagtaatatggggcagtgggctgtgggctaactgatctgtcaccctgctggagggcttatgggaaaaaatgcccataactgagaaagtcttctgtcccccggggaggcagaagcccttccctggagggctggtaggcttcccaggggtcccatccaggcccccagccgccctgggggctcagggaaagaaggtggcttggaggaggctgggtgctcaccaatgagggccctggcaggcacgcggtcacctgtggcgccaacaccagctgccagcggggaggactgtgctgtggggttctgcagggacctgaggggagtgggaaggtgaccagggaaccccccgagagcgcagctgctggggtgtcttccctgagggccacccagcctcaaacccagtgcttccatgggcctgccaaggcatgtggtctgtctatgggatggcgggacccagtcactaatcctgcacacaaagccagccctagatggaggctggcagcaaagccctctgggtaaggatgttgcaggcctcgattcttcccggggaaacactcgttctgcctgggctcaccctcaggaacaaaaacccctccgtgaactgctctgcatttgaaaaacatcttccccagccctgatgatcctaacagtgaatatctgacatccgttgctagcatgttcacaaattaaaaagcagcctaatgacatcgcctatgttcatgctgagcattaaaaaggtaatgtctaaaaggttttattgtgttaataaaactcagaggtggtcaagacttggtacacacagggatggaatgtaaaacaatcagccataatgttatgacttcatttttcattttgcattttcaactctgccttggaaatcagatagggcttctaaagagagaaagagacaaaattatatcaaaggaaaggaaaaattataagcttgacttgtctttaatgttatacatcaaaatggaatttctgtgatatgtggcgtgtgcataaacaacgcgggcagcttttgtctttgttgaatttaaatggaaagtccctctagatattaatatgtggacttcatttgttagcctgctaagtcagggacttataacaaaagctttgtaaacaaaagattaaactgaatcgagctttagaaaatgaaaggaaaacaagagtcaagtaatcacagatcagactggggctgcttagatggaaatcagagcaggccactggagtggaaaatgtttaattgaactatttcattacgcggaagtttatgtccccctcacagaatccaaaatatttgttatcagaaaagctgttctttgcttcccttaaaaagatggtcctttggagatgagatgtaaaactcgagccgtctacgccttctctcacccttcgcccacctctgaagctggtcaggtgcgggcccgggcagctcctcacacctgtcggccctgtggtgggcacagagtttggggaatctgcaatccccccttcccagagcacctgctgcccccaaaccagaaccagcccagtggcggccccaccatgagcggggtgccacttgctcttttactaaccttgggtaacctttcgggatcacccggatgtcttgggatcactttctgcaacctctgaaagccgtaatctatggttggttcattaagggctgcaacaggacacagaaatgtagatcaggttaattacttttatgtcatccattactcgtttattgcacacttacaaataaatgtgtagttctcctgctctgatgctctctaaggcaagcacccctgaatactagctgtgtcttaaggaatagattttccccctttcttttgcacataaaagcaacgattatttctgatctataattagactggaagaaagtcaaagggtgactcaatatattgtaaaaatggtagtgcagtcacaaagttacaggtcttggggccatatgtagcaatcaccaccatcacgatgtgatgtctgcatcacacggtgccttccacactggccagggatttatgggaaactggcaattatgacatatgtccagctattgctagcctcagatttatccctgtggtccttttttgtctagcatattgcctgagcacaaaccaggcaggaggagcacttattcttgcaaagctttaataatctgtgaatggctgcctacaaactgatgtagggcactatcattctacagctgcaatccaccagcctcacgaaattgctggccacaaacagtaattaatctttttatccctcaaattgtaattttgactatgaactgtgcgcggccataaatcagcggcacatgcgctgtgtacagtgcatgaatcacggccgggactccgtccgactgcacacactgtgtttaacaagctttataaggagccatcgggctttattatggctctgcctgactccaacaaaaactgagcctggaggcccggggacacgagttaagatgaaaatacttattggagtacattacttcttgatgtagatggcgttttccgtggagtcactccacggtgcgtggcacaacataaatcagaggtttttcggagactaataagacctgccaccatctattcattactctgcctgcaatttgggccatcactcattagtaatttgatgattaacacgccccacctcagcaggtgtgcaaggtgcgggggcggacacaaagactgcggcttccggagaggacggctagggggccgcctttgcaagtgctctccaaaataattggtcaccgttctcgagtgcttgggcgtcggcgcatcttgtaagcaacgcaggaagcctcgcacgtacactcaataatgcgcccgaaagttgaggaccacaatatgatttgacattccatcatacatcccggagataaaggtccgcacaggaatgtgaagtaagacattttcttgttaataaagcattgatccgatgtattgattttacatgacatggcttttgctgggattttgccctcttttttctttgcaaatagtaaagctcttcaaaatgcctcggcgtatgtgacatggcaaaatttctaactctctgtgatgtaaattctatatgtgtaaaaccacttcataatcagaccattaatcatcagaagctgtcagcgttgacttgggggacaatttgtcatgtctctgcctaggcccaggccagagtgtcaggcaaaagcatagttcgggccgcggggcgcgtgcgcagtcgcccagcctcaccaagcgacttggtccaaaaaggattagataaagtattacctttcctgaacagggaacaaaaaaggcggcccactgcatttctaacgtgtcaggtttctcctctcccccagctaatcaccatgactgtttgacttaatgaatcggcctgatgaaaggtgatcagaaaagatagatgggcggccattattgatttcatgcaaatgcccctgacaggtgatagacgctttaatgcaagctttcagaagctttatgacttgtaataaccatacactctcattctgggagagacgctttccaatgtttcagttgaattgatattcttctttgatgcccaaaaatatgtgaaagcagggtaagtacatgggcccctttcacctctcagttcagcccaaagagcacttatgtcttgaaagcaatgccaagaataagcgcggcactccattggaagttcggatgtgaggcgtaattgtgcactgtgggctcctgccaggctggatgcgggccgaggcaaggggctggggctgccattccagctctaaatcccttccaggggctgggctactggaagcccagtgagttcacgttcaagaattagaaaaaactgcccctctctttttaaattgcaggaggaatgacacgcattcgtggttctgggaggcttctgatcactgaaggtgggggttcccaatccacctctgtgcccccaagagcacctgccttctacagagctcctgggttctgcaaagcctggccaactggtggcccctctggcccacagccccccaaaccctacagaacccaccaccgccctgcaccatcactggcaagttccccgacgggaggagaaagcaccggggcctcacacacatctcatgagccctccgcacgcagagtttacgggcgagagccctgccgagccagggcaaggcgctggcacgtccagtcacagagccccgagccaggccaatcaataccactttcctgttttagaactgggtaattatgagggggagagattgcctgacctttcacctgcgctgcattactttgctgatattaagataaattgcctgattttgggtaaacatatgctgcaattcaaactgtcagcactggtttgctcagggataatttgtattgatctcccagcttcttcccaattttgcttactgacctcgtggataattagagaaggagccttgggtgagctcaagtcggggatgaagaagaaatatgaagaagaataaagcaaatttgttttatgttaatatttgtgggtcctccccccaccctcacatctgtcagcatctggagagccgtaaattaatgtacttggttcccgagcaatttattcccaggaattgtttagcagcatgcttagtctccgaacacatgtcactgggttaaattaatttaaactctgccttaaacacaacaaaaacaaatgttattttctactgaagggggaaaaaaacaatacgtttctcaaaattttgagaaacgtattgtaagctcccaactttctgcatggaattccacatatctggatctgagaggatgagttttctaagaaatccccccagaagtaattagtgcccattatttgtcctgaattcaaattttgctacgatgggttgctgcgtataagagatgaatgtatgtgtgaaattatatcgtttaagatatgtcagattacaaggctgttgtatcaaaagtcataaaacaaatctcccctgtgaaatatctctttattaaccgtgccataagatattaacattcctcatttagtggagggccttttatctgtttcaaatacattattcgtccttttagagataaactgtattaatatccatttgagtaggctaccgcggcctaatgcatagtaatttttgttggagagcttttattttagaataagaaaattacacagcaataaaacctgaatgaatcagaagctagaatagccgggaatcacattccatgccaaatgaggcaagcagtcgggcagcctgtgaaaggccagatatccggctatcatatgcaggccagtatccagagcgggtcatacaaatagagcctgacacgaccacatagactcaatgcttcctgcacgctggaatagcctacagctcgggaaggatacatatttaaatatatttgagtgtactggagttaatctcgttactttacatgcattaagtcataacagaagaagcattctaaatatttaagtcatgcccgtgtactgggggattcatcacaccgcacttgatacaatgttaacggtctgtgatgtcagttcaacttgggattgctgcagctaatgtggcagcagaaatggcatcaggcgctgagctgcagctggggccagagcagctccaaccggcctgctgcaattagagacgtaccggcgggcaggaggcactgggattttctttcttgtgacatacgtggttgtagttttcattttgatggcttaaccttctttgtcagccagccccgccctgagttcatgttgatctctaataccccaaaatgtatatgattattttattagacctgaatagcaagtccgttaacttataaacgtcattcaattaaattaagcaaggggacacgttcagtacttctgggttgataacacagaaaaaaagaaaaattcggattggaaaacatacacgtttggggccagtgagcactttctacaaagagtagtggaaccatccatcttaaatccagttcctgcaccaaacattttatcaagcagctactacatgcctggggcttggtcgtgggtccccaccagctgtgggaaatccacccccaagggcatcctgtgagcagcagccgagagcagagggaactgctgcaagggactctggcagtccagggcgttgaggtccccccaaggcctggaggctccctgcctgcaaacaggactggactgtggcaggaaggaggggacagggtgaaagagcttaattgtgatggcaacctcctgaccacccctgcccgggagagctggagaccagcccagccagcgagcagtgtgcgccgcctgtaagtactcctagagtaattgctcttccagccacagttgtgtttttaaaatagtgtcattaaacacacaaggggggaactcgcaggtaggaagtgagacgcttttagcattgcctctccattgtttaagcccaagcccagcacgcagagagagatacaagaagttttaggtttagcgcaaattttcttcctgcctgaaaaacctgactccaacaataaaaacaggaagacattcatttgcttcattccagctgctggctgcagctattaaatgagttccagtttcatttcaataatgatcatcttcctgtagcttcccaatcatgcatttgtcataacgcagtaattttctagctacaaacagatcctcgtaatgaggcagtttttcacattagcaacataactacataataagaacatctgcagttccttttccgagggacaagaatgcgcctcaattaaggcaatggggattgttaaataagatatagtatattttactaacagggagacccagaccctaccccaacagactgcaagccgtcagtgtgcctgaatgaacacaggttgtaatgtgtaaaaattaaataaagtaaaattaaattgctcaatacaaagacattcctctagagggtgttagtgatttcagtgacaaagtgctatttgctgacaagtagtttacacattaaccagctgaatccaagggggaaaaatgccaatagcaattatatcaccttgaggttattaaatgtcccactgataagtaactaggtgaacttgaccaggtgataaagactgctgtgagcaaatgattgtgcggtgaagaatgtttttctgtcctgctgtttctccagatagcttttctttcaaaaatgactgtataaaaagttgcattaaaaatgtgtggccacggaagacaaaattgatatttagctcccccctgaataccttgcccccaccagagcgccttcatcattccacctcaaaaacattacacaaagtctgcaaatgcctgctttttctcccttttttaggctttaaaatgatgctaagttcttcactttatcatcaactgtctcctccaagtgcatttcatctataagaaattcagatgctcgggaaattaaaatttcaaagatctgctgcaaaaaaaatcaatggggcgagatcaatgctcatagaaatttcatgaactttgaactgatccgggcatgatgatgagaggtagctggagtttcaggcggctgatggctcctcacatggatgaaaagcggccagggcagctgagaggagggctacgttttagatgggtttttgctttcatattttgtccgacaaaaaaattaatttttagtctatttcagtaacaagcaaaaatagaaaaaaaaaatctgccttcctgatacgacgtgtaataccccgcttcttaagagcacctaatgctttgcacattaacgcggccatggaatgaaatcggttccctctgcagccgattgcaggtgcaaattaatattgtaaaatgaagatcaatgcatggacagggccagatcaatagtggctaaattattgctgcattttcctcctcattcaagatgagttgtgttttcctctcaaagtcaatactttgcagcttttctcattaatttctcaataaatttggcaatgaatttcaatcacagcactcggcagggtgagccaggcattgtggtgtgcacgggaagcacaaaggccttgcagcctccgcgtcgttcaccaggggcgctgcccgcgggggccggcctggctccccagcctggcaggaagacgtcaggtcaccctcctcctacacccagaggcaaaccttgtgtttgccctcacagaaatgacagtggcttttctagcatcctggccgctcccgtccgtggagctccccagtgccagcgggggatggctcagacctgcctagggtcaccctgggtttcacaccagtgactccagcatccccccaacccgctcactgcagggtatttctgtcgaaaagtcttctaaggttgagaaaaacacttgacttctaattggaattagagccgcctccttcgtatcgggaatattgttctggaattcacacagacagcccaaccgggcctcgtgcacagggaccagcttccattcaccactgcctggcagtggatggcggcattgtgatgtgacaccaggcacagaaaaggggacagctcatcttccttgtaccaaaataatacccttgctgacaactattggattgcattcaaacaattctgtttacatacctcaaagaatacattggatgatggcttttatagtcgtgtggaaactacatctacccagtccagccctgcagctcggaaaactaaggcacgtggcctcctcacttctccgtggctttcgcctctggggacgggactgggggagacaggcacttcccaaggcggaggttctgaggtcgggaagtgggccccaggtatcctataaccctcaagctccccaagaaggctgttctaacgttttaacctaaggggagaaatgcctggaaacaaaaggaagagacaccacccagtaaaagccaccctcaacatgataaaaagatgtgtgcgattgaatgctatatccttttctttaaaaaaggaacatcaagtgtccctctgctgccacgcctcccagagactttttgcagggaggagagaggtcttaagaaccaaacaggaaatctaatgctctgtggagaaccctctgagcaatggatttgcacactttaaaccagcggaaaatctgcacacagaggtaaacagaaaaaggagttggcaaagcccaagcccctcccgaggccagaggtgtccctgccagggttgaggacagaggcatccctgtcctgtgctctggggtgggccacactcccgtggggacgttcccagccaccccatgcacttgttcaggcatctgccctccccataggaggaaggccacccaacaggtcaccctctgccacgtgcctgccctactcagtgcgatgtgcacagtaggtgttcaaggtaatgagtaatgcaggccccttggagacatctggccaacacagaaggtatcacattttcaattttgaaaagccaaagtgaatgtcatgtttccatatgttcacaaaaaaaaaatgtattcacacatgttcctggcagtgttttccataacatccaaatgttcatcaatgaatgaatggataaacaaaatgtggtatatccatacaatggaataatactcagccatgtacaggagcaaaaccttgatacctgttacaacagggatgagcctggaaaacacgcaaagtgaaagaagccagacacaaagaactatatataatgtgtggccccatttataggaaatatctggaacaagcagatggatagggaaaggaggtagattcatggttgccaggagctaggggagggcaggaaaggaaaaccaaggcacaggctgccctccatgctctcacttctctacggctgtcacttctggggaccaggacagatccagagacagacgctacccaagggaaggaggaatggggcaacagctagtggacacggggttccttttcgtgtgaagaaaacattgttgaattagactgatggttgcacaaactttgtgaatatacgaaaagccacttaattgtatactttgggtgaattctgtaatatgtgaattatatgtgaacaaaatacagtgtttttagtgaaactaacgtttctcatctgaattagaatatatgtgccagctccatctgtactaaggaaatatcttccagggccggagtgccgtttagaataaagatgtgtccagtgcctgtgtaaaagcacagggctccgcacaggtgtgaacaagacagagcccagcagtgggggaagggcctggtgtggggaatcgattcccattcagggagcataactctgtttcccaacattattacccttttcaatctccatggaggcatttttaactcctggtttttcaggctgcataaagaagaaaaggaatgttctaaggcagagacgctttaaagacatcaccaagattaatgtaaacactggaatccccaaaagcacagcccttgaacacagcatgctggattatgtgtctcctataaaaccgtcctatttccacataggggttcccaaatgccaaggtgtactgggaccagaaggccatcgtgtcctcatctgacctccttcttgccacggcagcccccaacccagccctgggcctcccccctcacagccccatgcccagctggcactccttggcctggaactcctcaacgcctgctgctcagcctccaggggtacagcctctacggccacctcccaaccatctccccagggcgcccctcctctcaaatctgccagcgcctcatctgctcctcttgtcatcggatggagtgccttctccattttgactattttattaacttttccatgtcccgcttcattcccgcaagacctcaagtcagtgtgatagcaaatgtggcttctgcaccagacacgtgccaactgccatccagataccaggccccgggctgccaggatggagactgtcacttcccttggcaagggacccactgccgggtgggcaggtatgtcaccccacctgatacccccaccatgagcgcctatgagaaccagtagcttccccgcctctcagtatcacctactgtgtccaggtaggagaacactgggagccaggggcagattccaaaccatgttgatggcgagcttccacagcacgccacaccttcacataagacaccgtgctcacactacgcttgtcctacagatcattcccgccagctggcattttgcaaatacacaggaaaggcgaatcaccgatgttggtggactctggggtggtgaggaaggggagcagtcccctggtgaacacggggctcgggcacgtggcaggtgttcactatcatggtgccacagcaaagccagggcatggcctggaacccagtccttggggttgtacataccaaatgccagcttccctgggcagtgggcatgtgaagctgcagcccaataccctccgtggtgtctgccggtgacacgtttctctcccttacagggtattaagactcagtggacttctgaaacaatcaccaccctagcctatggcctgtttacagtctttagtttgggacaggccacagcctgatgccaagcatgtggtaaagcagtctcgatgccacctgtcctgaaggctgttccatcgtaagagccctggaggagccgccaccctcaggttggtgcctgtttggaagctcagtgcccacaggcctaagcttgggtgggatgtttctgcagtgtgagcatgttccttaggaaaaacaccaagtgggtcttccgaactagggctagaagggatggccatcaacaagcatctgactgaccccagcctgggtgcctggggctgagacaaaaagggccagtggggagattcccagccaagggcctcctttagagaagacaaggaggtaaaaagatggagaaaaacctcgcagaatccaccctccctaatccgaccccctggatttcctgactttaggcttcctcagatgcctagagtgcgggtccaggcctcagaggctccagggctcactgtgccaggctataagctctctatctgggaagacacagaaagggctatctcaagagtgcagggagagggtggcatccagaaaggaaaggaagaaaagaatgaccccggccacgcagtacctctaagaaactttcctcccaagatgatttgcaccaatgctgaccaaaatctgccacggcctcctatctcaacgggagcttctctatttaaaatttcgcacgctccgtaatgacccttcgagagtgtgccctctgcacgcacttaggttccttgtgaagtcaagttgctccatgtgctcgtgaaaagcatctgaaaactttgattttgccttttagtgtagcaaacagtccacatcgctgacagacagccttctatttgttgttgtggctttatttcaaagccactctaaaagacaaaagttacgttttactcattttgctttttttttgttttggagatggagtctcagtctatcttgctcaggctggagtgtggtggcacaatctcggctcactgcagcctccgcctcccgggttcaagagattctcccgtctcagcctcccatgtagttgggactacaggcgtgcgccaccacacctggctaattttttttgtatttttagtagagacagggttttaccatgttggccaggctggtcttgaattcctgacctcaggtgatccacccgcctcagcctcccaaagtgctgggattacaggcatgagccaccacgcctagcctcattatgcattttctacaacaaattaaaaaggcccaactgattgaaatgatagttttgtaaaagcactttttctcaggctaggcttttgtaatccaagcctcagcctagagccaacgtgcacagacaggtctcaggaccctccaaaaacagcctcacatgaaaccacgagcagccaggctccagcactgtcactgacccagctggcggggcacacgctggagcgaaacatagtctatcgattccagccatgggctgttagcactgggcctgatgtccagccgtgtagatttggtgggagggagcttgaggcactggtaacttataagccagaaagagaaacagaggcagtgtttggttcttgttcctatttttccaggacaacagagtgatctatttcacctcctctttggtgctgaaagaaccacgcacttctgtttcaggtcctctaccgacatgtttgtgctgatgtctcccttggtcttcagagtttaacctgtgggagttgtggctggagtgatctgtgatatttaattttacatgttattatccccgctttattctgcacttcaggtgatcacacttattttgttctaaatggtctgctgctcttctcccacagtcccacaccatctcctggacccactccaagctgttttcagaagcacgtcctactcaatcagaaactcaaaagtccggagtgtgatcccgctctacccccgactctcctccctgcagcaccgagaaggaccatcgcaaggtgggtgaggagcgggaccagaggacccacctactcagggggcttaacaggaagagggccgggcccgcctctgccatcctcaacccaacaattaccaagtgaaatccagatgacccttttgtcctttggggaagatgaatggccgtcccctgtctgctacattttgtcaggtttggtgctgaagagtcaataccttcaccttgacatggaaactttgtgatttatcagctcatttctcctcctgggttagcgtggccccgatgagagcagccaatcggggtgcagggtgcagacttggtcacagccacttggaaaacgaccaaagccccctcggatgacagacaaatgtgtcttgttagcaatagcccaaaagcgcttgacttgtactaataacaaaaaggccatgctggtcaccgtgggtctaaagacgaagcaccctgtcaccagcctggttgggaaattagcaaataatgttcttttccttgataaatgggtgacagctccctctcaccaatcatttttaacatgttgatgcatgcctatgatcccactggaggagcagaaaagtttactggccctcaattttcagatgatgaatggaactctctaaatgtgcgatttctgtatgaggtatagttcattttaagcaattctagtaaatgggtgtcactgattaggacaaatagtctacttgtgcaatagcacaaacggtgtgtctcattctcctggcctccttggagacaggaaagagaggggacagcagtgaccctggaagccctcccggccccactcttcaaagggccgtgttatcgaatctcaccccagcacccacttagcatgctggcagattaactgatcatggtttgggttgatgctgtgccgtagcagtggggaggacagcggtgggagcctgccctccctcccttcctttgtggctctgcctaaggggccctgaggacccttgaaatgaccccagtgatggcagtgggcctcactcccaggggaaggggctgaggcacagatgcacgccaccccacttggtacgaaaaaaaaagtcaccctttgccatccatatttaaacaaaggacaaaaactaaagtggcgtcaggagaagttgtgttgttggagtcacgcattatcttgtgattatcccgattctgggcaggtccagagtcagcctgagctgaacacacagacccaagctattctctgatagaaccaacctgatagaaaagcaaaggtgcctggagggtgtctattcttggggggttcactggggatcatgggggggacacagacatccttggacaccattgactggtaggtttgaagcaggacagccagtgtggctgcaggagggcccactgcagacaggaacgaacagtcagccacggggggcccctggccacaccacgggatgatgagagtcactgacagaattgagccaaagattccccaaactccaggacccatgaggaaagcatgtggtttacatggaaggaaggcattagcattgagttgagcatagtaaaaatagtatgatttgtgggcggcaattaagcatcatttgctctgtgcatccaagtaatttgtttgaggagcaccggcctgggagacagcaagctggggctggcgtggtcgaagggcacagtcgactccgcagtgctgacgggaccgcctctcaatgcacacaaaagatctttaacacacttaagaaccatgagtgctttcacaaggggagtgaagtgggactaaattgtggacacccgccaggagacacgggagaaaccctcacccagggccaggacagccctggaggacacagcgtcgccccttgacacactgccagttttaaggcacattatgactttaaaagaaagaagaaggaaagtaaaccataaatactgtatcagaaagaacagaaactgttagcaattactggttgagtaacgatttcataagcctgaagctgaatgaacgtccttgtgcagaaaataatcacttttatgttcccatctagtaactgcatcccagggctgggagcggtccaggtattccgccgtcaagagctccctgtgtccacttcggatgtggttgctatcgactgccaatatcttgtttagtaactgggttcagtctgtcgcagacaacatgttgactcccagtaatttgtggtaatttctttaatcgagcaaaagaaatctctaaaaggagggtgggtcaatcaaccatccgggtgcaagaaaccaagagtaagaacacccgacccagccacgtccccagggtcccatgaatgatgctggaagtcaagccacctctcccaaccggcctcagtgcttttgtttaataggaaaccattctgccaaatggacactgttggaaaacagtaacacacgcatttgtgccatgatgcttcacacttgaaaacatgtctatgaaagtagtttcctcagtaacataatttcaattagatgcatacaaattccaatctgtcttaatcaaataacactgtaatgcttatattctaattaaaaaataatttcttttattactcttaaccatttgatgcgtttctacgggtgaaattataaatgcgaaactgcccaatttgtgtatactgcgagtttctcaggtaggacattctgggactattttaattactattaaacaagcaaatggcacactgttagacaaatattaaaacaagcattgcactcagttattaatttgcactatttacttttaaatgcagcaaatatctcattaatttaattttaggtgcccaccagtttatattgcattttacagtctagaaggcaatttactattaactggcaattacatacagagtgattgttaattctgctcctaagtgctagccgcttgaaaattgttctctctctctaatttctgaccttcttacaacagggtgaggcacatgggaatacaaagaaccagtatggaagcgctggacatgtcatttgtgactcattcttttaattcaccgtgctaatcaactgaaccgccacagcctcccaaggtaattgtgtctttataggagttgaaagcagcaggcaaaagggcctggatggatggggcctggcctgccttccccttcccactcggggttgactaatagggtctggttcagaaaaatctggtgtttctcagatcactgtaaacagatcattgaggccctttgcaaagcccctcccagcctctggcgggcggcccctcctctgagcacaggttcattagccctccgcctggcggccccagccggcctcacgtggggaaggttaaatgtgagggtgtcccggcagcctccggggctgggggacactgatgggaaccagacgcccaggggacggtgcctacgtcgtgacatgcaaaggggctggctcagttttcagcgggggagtgcaattcccggtgattacctcattgtccccatcaattttggggcaatgcaaatcagacagaagcttccaggtcagacaggtcatgaccctacctttcctctgctccccagcctgtagagcctgtatcccttacatcacctttgaaatggatattcctgttaatgactggggtgtgggggagccaataggttaacctccagccaggaaaggctgggctgtggcaagcatcaccaaacacccactcatgggagcatgtctcgatggaggaaatccctgaagcttcgggcagccaggaccctgagcttgtgcctgagaagcccagtcagccccagagtgggcacaatatgggctgcagatatagaaggtgggcacttggacaggctgggtgggggctggaactaaggggtccactggtcccttagtaggaggatatgagacctggagaggatatccctggccaaggaaggcatcctacctggctggagggcaacaggaacaggctacagacaggagagagctgccccctccctgcaccagccccagagcagcaaaagcagggcccggccatgctgggaattggggggacgctgacatcacaggctccgccacaccatgtgatacctgccagccagtgacaggcagctcctcccaccctacacatccgcaactgtctccaaatgcacagcccaaggcctttctctgcagcactggggacagaatccccaggagacagcaggcaaagtgcaaagaaaggactggacctttcagcaatcttctttcttaaaaaagtctcatttctaacaatagctgtgcagacttccccaccaaaaagcccacatatgcaaagatctgaactcatgaaaggatccactgaaggcatccactaaagcattcatccgggatgggctgacagtccagtgtaagaacagggggcttattcatccatttttgtgcagaggaagtcagtcttgccacatgcaaacacatgtcactttcatgtcacaaaccaggaccccgcagcagacacaggcacctacacaggagcccacccctgccatgtgcccgccgaagctcaggtgctgctccatggctcacaagcaataatcaacacccgctttcctaaggagctcaggactcgagcagagtcccacagaacccagccgaagttcaccctcagtgactttccacaggaaggaccatttatggagtgcctgccatgtgttagacactgtacataagtcatccccgatccttgccaaaaccttgccagatagagcagaggagaaattgggaccacaggagtaagcatatgcccaggtcccagtctgtctgcaaacaccaggtctttgcacggggcctacagcctctacagccagatgtgccaagggactcaggggcatgtggtacacataccaacagtttgcacaggaggcatgtggaaatgtgcaccgtgtggcttcagcacacaccggcaaggtgccagaaaggaccccccagcccacggtgggattctgacatctcgcctttcccaggtacctggggcctacagatgctgcactttgttgcacagcaaaagttcttaattgttgaagtgtatataagtgtttaaaaggttccccaattttttgaaccccattgtgacatgtctttatttttttaaaacactgggattccaaaacctagaggagcagccctctctccatctcagagtcttacatggaagccaagaggtgtccggacatcagctctttgctatgcccacctcccctgtggtcttctggcagctcctgagcgcctggtcctgtgtgtgctggtcccacagaaggtggcccctagtgtggggcaggcactgcctctcccatcctaaccacatggagagtgctgagctgtcgactggacacctctgggacagcagccctggcctgccaccaagacccatccaggcacaccctggggtgacgctgggcctgatgtacagtgggcagcggcaggatttatatcttgcctttcttgctcactccgtccttcctaagaagggaagaggctgaaggacgtctattgcctctttaaaccttctgaaagcagagggggcttagcatcctccatgtcacccgctctctggacagaggagaggactgtgtcccattgggcgtccttcaggtggtgatggcaggagttgaagccccatcctctagtccaggttcctgctgtggtcctcatggccaccccaggacaccaggccacagtcacccagccactgcacatgcaggtcaagcccacagatagtaagtattcatcttgctcactgtcactcggttccagcaggcactgtccatcattaaaaacatctctcaaatgtcacagcctttggagttggctaagattagaaatcaaaatgcaaacatgccttaagttgaagtgagttgtttgttttgagatagggtcttgctttgtcacccaggctgaagtccagtagctcaatcaaggttcactgcagccttgacctcccgggctcaggtgatcctcccacctcaccatcctgagtagctaggaccacaggcatacaccaccatgccccactaatttttaaatttttgtagagacagggttttgccctgttgcccaggctggtcttgaactcctgcactcaagtgattctcctgcctttcaaagtgttgggatcacaggtgtgagccaacatgcccagccaatttgaagtttagttacggcatttctcaacagcaatcccgaacaagtggggctaattcagcccttgagtggacaaagcattgtatagaacaactgtaagatagcaagcatgtgtaactgcataggccacacttcctgctgacaggagtctgtcccgcaccctcaaagaatacggatctcctttaggaagcagcgtcatgcagggttcaagaccccaggctggagcaagaaagaccaggcttacatgggccttgcatttacccggggtgtggcccgggcactgacttcatcacctctctgagcctcggcctgtgcaggagaacagcagtgacaccacggggaagaggcatagagaccggtggacacacggcccctagccccacatggagccaggcatgtgggcagctgccgcagtggtagctgggtggctgttgttcctaatgactccccctgccactttgtttacaggtgagaagccccacaaagggagagaggtaccgaaggtcacacagccacgggggctgccccatccacggcttcatacgccatctcaaacaaagatgtggaaactgcatatccagctaaacccacaggccaagggggctttgtctgtctttccacagacccctgccctctctgtacagtcctcccgtgccctcatgagcacctcctggtggggaggaggcctctaccgctttcccgcagaagctggagctgtgaactcaccggtgtagacaaagcgcccaggagcacctttgcagaactgcttggatttgtaggagagggtcacttcgacgacgccaggaatgtgcctcggcggggtctggactcggatggcatggggagttatcagctacaaaaaccacacggtgaacaggcgctcagcggcgctggctatgagaggcggacacttgccagttggatataattaccaaaatgagcacaaattggaccatcgtcttggaatgccccctcctagctgtcacccagagtcccgggacctacagtgttttttaagaaaaatatctgcaaatgatcccaggttttagtttgcaggaaaggccacagggcatcattcatatgaaaattgccaccatatgtctccttaaacctgcttctcgtaattctagcactaattgttccagtggacgggggacctcgatggcaggttttaaaccccagggctgcagggcaggggggtgttccgtagccacccacgggagaagctgctgccacaggcgaacagtgcagtgtgttaaaaggggaatttgccatagggcaccttgtgtcaatacactattgacagcttgtcaaatccattcatgaagacagcaacagcgcgaagctgaccgagtccgcgggcttacctcgctccacaccaacatagttccgaatacaacttgcagcccgtcaaagaagttgtcgccaattatgatgacggtggcaccccccgtggtccagccttcactgggactgatggccttgatgcacggagtggctgctcacacaagacagagaaggcagaccttagagccccgtcctcctccgacgctgggccgctcggccaccgcgcgtcccgcggccaccgcgggaggagaggcgcgccgttcctccaggcggcacgcaaagggcaaccgtagatcagcatgttgatgtgtttaaagcaaactattaaatgttttataaaggaaaggccgagctgcggaatactagtgagcgagaaaaaaatggcttgatatagcaaattatgtgtcagcgcaaatatgactattacaaatgattaagcattgcatgcatgtggcatgtcgatttatctgctttgctgtacagatctaagcagagtcaatcaaaaggttgttgaaggagatggaagagcaaatgccttgcatttcgattcctcataagcagctaattgggttgggttttttcatccgcgaactttgccttttagttcaaaacttcattttcctctgtcactccacaattactacttttcacttttcatcaggaaaaaaaatcaaaggcactatattaatacttttgtcaaaggtacacattttacatctaatattgtttgtcgacagggatccccgcgccgctggcgtgacctctctttgtctcgggagctctcgcatttgcatgagttattacaatggtgctgctgcaccggccgcagaggcagccctgctggggcgggaggggttgggggcacacagacagcagaaggagggtgcaggggggaggggaccaagaggccacagcccagggagacaggcaggcaggagtcccagcacggtgccctcggcagccttgagcaggaggccagggccggggctgagggctgcaggcctggtggaggccggctttgatcagcccttcctttacatggtgttggcagaccttttaaactgcctttgatggcctcttgtacatgggctcccatgcaaaggaggggttgtttgcatgcctgcccacgcctgccaaagcctcggagcctgtcacctgcagggcttccgcagcccgggccaggacactatcctcaggaccctcagactactctaccctttaggtgagctgggaggttacctttggtgcacaaggaagaatgggccatgtaggcctctgtaatggttgccaggtggcctcttcgatgtacaggtctccttgctgatgtttggacacaattacaccctaaatggcgggaggcccaggcctcagtcctccaagagaagaggaagcctctacactaagccctgggacacccagaggtggcatcccttctttgtcctgccttagcatttgggggtgttgggggttaaagatgaaccctagaataagggactcaaccctgaggcccgaggagtacccttgctgttttggtgcccttccgtcgctcacagcaacctcgagggctactggcccaaaaatgtagtaactaagcttggtaaacaattagtggcttaaccaagccacccgccccccaccaccccgccagctcctggctttgctcccccacggctctccagctgcagacaagagccctccaaaggacatcttggggccttattaggttgttcatcttatttgagcccctgtgcagctcggcttcagataaatcatctttttagactctgggtcagatccggttgcacatcttcataagcgggagttttccggaagcccgcgtgccgtggtttccctgacaggtcagaggcagcgccgtgcagacactgtctagttaatcaccattagctattgttgtttagcacaccgccgacatgccaccttcctttgtttgctttaatgttggactagcgggggttatatttgctcattccacgcgcatctccctccgcagcagaggcgcagagcacacactgggaacctgcccttaactagcgctgttgacttcatgctaataagttcatacaaattttcatttctgaggcttccgaatgacatttgcttttcttaattgcatggagagcatttgaaaaggatcagctctctaaagactgacaagtctcctccaagggggtgaccttcatcagcacagccaattatggcaaataattcacaaaaaaaaaaaattacagtaaacaaatttactttggaggtgagaaaagaaaaaaagaatccaggatctactgcatgcacaagagactgctatctggcagctgtggcccagtggaaagccacatcatctcggaatttgtagtgcttctcagcggaaagaaaacacgggcctgccttggcctcctccacagtgatagccatcttccttctgcctgtatttgcatacatttcagtgcacatatagagagggaacatgtgttcaatgggaaccatagcaaaatgaattacacagacagcgttagagatctaatgatatacgcgcacaatacactcaagcagatgacaggagctgggcccggcagctgaagatggcagaggaggagcagggaagcagtggggacagggagcccccacactccccatctctttcccggcctggccctgtgatgggaggcatccctgaagacagatcctggtctgcagctttcagcgtggcccaccctcctggggccccgagctgccagggtccagagaaaggaggcgtggcgagtctcccctgcggatctgacatgcgccaccatgacctgtttttaactctgaggatcctctcagctacttgggagaagaggcgctcacaaggaacaccctctgcccatcgtgacccccgccggctctccccagggcctgcggggactggcttatcctgtggccagggagcccaatggctgggatgagcatgtcaaaacgggagcgtgactcaacttggaaacccgtgttggagacccatatctttgggtttttttcctttcttttggggtctctccaccctatccagtattctattagtaaacagcttccccagcctggtcccattaatcagccctcctgagtaatatcacagcatttgtcaccttcctctgcattcacaatattgaggcactcaaacaggcctaatcttgcctcatgaagacttctttgttctgcctgctaaaatgtcttgtaattgtgcttgggatgtccagatggctggctgatactccagctgataggattatacctttacctctcctagggccatctgttcgctttaactcgctaaagccccgcagcctggattcagttgtccttattgcataaacctaaccgcattacggcacttggcatgcaaatcgcttctgtgctgcaggccgggtgctgggcagggctcgcggaaggtttaaacagggttggagtcgtttacgaggggacaagtgacaaggaaaaaaaattaaagcctgagttctactgtgttgtgctgaaagggagaatggttgttttccctcacttgtgttcaatactgtaaataatctgccttgctttttgtgagctcaaaggacgccgtggcagacatccacagcagcagcagggggaattcgtttacttggaaaccatcagcgactgtgtacacactgctggtgaatattagatgattggataatgaggtgttagctaggagaggctgcacgcaagcacagatctgcggttttggggggcactttccttaaaggatgtgggactgatgtagagccagcctcccacccctgcaatctgtcctgagcaggcagaaggagggaaggggtttgggggacaaatatgcgcagacttaaaaggaacttcctaagtgtcaactctctcaggaagtgacagaagcataagccctgccatttttttctagggcacttgataactgggtattaattacaaaaaaataaataaccctactatttatgacaaatgcctttttcttaacgatctgtctatgctagtcctcagagtcaccctattggcatttttaaattagtagtcactttctagggtgggacaagatatttcaatctcttgcaaggaactgacttggtttaaatgtcgagaaacaaacaggaaaaaatcctgagcaagactgcttctgcaaatagcttttgattagttgggttttatctccaaggtacccactagtggcctttatttctctaaacgctacattttctgcttacagtcaaatgctttttcatgctacttacaaaaataaatacttgtactttgctcagatcataatagctcattagaggaggctgattttggacctagactacaacctaacaccagagggctggggaggccccttgaacctattgcgtgaaagctccactctctagggaagcgaggaactgaggaccggggattcaaccttcttaattgtgaacctcattagtgacggttgctaagcaaaacacacacctaccttcagtgcatgggaaggagataaacaatacgtcacaggctctaatgacatcggtgcttagggcgacctttaattattatatttttgttctcttataccttagtcattaatgtagaaaaacaaattagtttatttttgtggaccacagcagattcataaattgtcttccagtttttgtctgaattatatttcacgctgataatctgcacacgcttcattcattttcctgtgcgtgcatctgtctgcctcgtgtgtggctctcgaatgtgggacctcgggatagaggatttgtcttaaaaccatttagttttacaggctctttgctctaaaggattcgatcatgctgttttgtttgcaattcacttaaaaaaacactcacattactttctccacaattcatattggtcagaatctcgtaattattatgaaatgtttaatgggggaagtggctcttattctaaaggggatgtgttcaattgtgggtgctgtgcagagcacaaagtgggatgtgcctgaggggctcggcgcaaggcccactgtgtctgagtctttctgcattccgacctgatatccaagaacctttctccctacctaccacccttatggaaacccttctcttttaacaaacaaaataagaagtcaatcaattgaaagcatttggttaaaaaaaaaaacgtatgctggttggtatttcaccccctcctccttgcccccactcttgtgtgaacacgcacatacacgtggatcacatgcacacgcactccagccagggacaggaaatggtcctgtcccttcggagctgactggaccaggatgtaaccacccactgggcctgcacgaggtatctgggtatgagcttctggatgggcgcttccgacaaaccaaaataaaaccaaataaattaaaatcgcaagaaaagcagtaagcaaaagaacgcctggaaacatgaaggccgtggcaggtgaatgggaaagtcccgctgttcaataaaggagaagagaaagcctaggagggctgtctccccttccacctcggggacaccccctcatcctgccttggtgcaggaggtctgaccaagggcgggggcctggtgagagtaactccacatgaatgaacataaaggatggtgcaaagaaaaagaagcatcgcaaataaaaaaagacatgtaacatgtgcctaccattttccagataagaaggggccgtaccttctgacgggtctaggcggcgggcccgcctcccgtgtttggaattgttgtgcacaaacatgttgtctgacacggccagcacgtggccgtccacgttgactgttgtcgatacaacaacctgcaaagatgaagtggatttgaaaatggaattggcaaagaaaagcagagccccctgttaggcaaaatacaagccatcttaaatactgcagagcacaaggaaatttcacgtgttcctggacactgttgatcgatgtgcgttcacagcttttttggctaatgggggtgggtgggttgttttgtttgttttgttttgactcaagattgcttctcttcaaaacctgctccactaattacagtttaatctcctattatgctaacaagtgaattcaattcagagaaatattcttctagccattagcttcagaaacacccctctagccactcattttaaagccgctgttttgattgatctgttcacatattgattagaaagtttatctaattaaaatgagttcacttgagactggcctcccttgaagagctgggaggattcagagttgcccaaaaaaggcttcataaatcaggaacattcctactgcccacattttatcaggaaacgatccctgggtcaattttacaattacatttaatgtctggtaatgaactttttttcatctgaaaagactgagttgaatatgaatagtgggagtgttttcaatcctggaaaggtattctttctcaagttcattgcaaaggctggcaaggaccctggtatgccaagggaatgtcctctctgttgcggtgagaggcttccattcttaggtccaggcacaaaggatgtcgaggggagagatcacagatcaggccctcttaagccctcagctgcctcgtggtagagggagaaacgaaaagggccaggcagggatggccttgcagactccatagacctgcccaggggagcttgccacaaacatccagaaatggcatccctgaatggacccaggaaccaggaaatgacaacctggccctgagctttctttaacagaggtggtgcattcatcccggactagctggagctgcaaagatctgaggccaggtttcatctgggtcttgcagaagcactcctggagcttcagcccagctctgacctgaaggaagggtggctctctgccacagtttgggcacactcggccatgtctttgagtcagcaccacccgagggaaccacagccctacagagaattgtgcggtggttgcacgtgagtggagaagcggaaggggttcccagtcagggtacaccttccctgcaaggcccagacaaagcacgccatgcaaaatgagcttaaaagccaaggccaccataggccttagtgaatcgcgacacatcagtgttgggtccgcacatgtaaggaatcccctgcaccagcataatcggggaaaccagggggaggggcgcacgggggtacacgggcgatctctgtactttctgcgaaattgtttttaaacctaaacttctctaagaaaaataaagcctattaataaaataattaaactagttacctaatacaaaatgaatacaattcattgtattcaatgagtcactgaatataaaataattaaacatacaaataagtagtattttcaggggtttaacaaagaagccaaagcttatgtttatatatgaatacatgtgcaagtgatggcttcttctttttttttttttttttttttttttttgagatggagtctcgctctgttgcccaggctggagtgcagtggcacgatctcagctcaccccaacctccgcctcctgggttcaagccattctccttcctcagcctccctagtagctgggattacaagcactgccactgcacctggctaattttttggcatttgtagtagagatggggtttcatcatgttggccaggctggtctcaaactcctgaccttgtgatccacccgcctcagcctctcaaagtgctgggatgaccggcgtgagccaccgcgcccggccggctttttcgttttaaatctcagactccacaagatgatgatgcagcaggggcggtacacacgcatcccacccaaatgccctcatcgggggcagcttccctggcatttcttccccttggccactgccaggattgttgaggtcgcaacagtgtcaagccacccagaacctcaaaaggttataagtgctggcccagcatcccaggtccagccttgggtatctcagcaccctccttttttgaccactgcccactggctttgccctttgcagccctggtgggaggtggctttgctgcccctttggtaccacgagtgggcctggcagcctctgcctggaggagccaaggcctgttcctggtcacccaggtgccccccttgtgttctacctcccaggcccagccctgggcattgaagacactctacaaatgcattatctgaatatgatgcaaagatgcgtaactaacactgaggtgcagacttaaccctttttacgttcctaaacatgataggttaaagaaacatgaaaaagtaaaaacaaatttaaaaagtttttaaagacacaggctttgcagtcatctacatataggtcagccacgaagggtaaagagtgtagttcagcagagagagcaggcaagctgtgctctgtgtctcacctgggctgtagcacctacagaaagctgctgagattgtgaaagcagctgaaactattgtgtaagcactgccatcctcctaggtcagttacaccttctgagaggcatggggctcagctaaagagaccagaggaagttctagtaactacggggtctgcagtcaaccacgagatcacctgtaactgacgctgtgttcagtcattggtgagacaaagaggacacagcccctcagccctgcctgacttccattctgcttagaaggatcaatatcaccagtatcctgtgaagcctagtgcgtgacaaatggaagcagacccaactgttcgcaggaaacactgtccccagctgcagacatgactgtgggcgggcccaaagagcccgcctcctctgaccagctgaccgggcaggcatggagacagatgtcacgtgattcactaaaggactgaggcataagttaaatttctgagaaatgctttgagctatttgatggaaaaactgggtaaatcccaaacaggaatcattctgctcttgggtcattcatccaagctagtggtcatttccattagccgccaaattcttctctggctggttttgtattctagcccagactatttttacaattaaaattagcaaaatcatccaatgtgtttaccctgaattagcttcctaatcattcacaaaaaaggcaagaaaaatatgaatctatcataatggtacataaatctatcataattcatccctgaaccccccccccccccccacccagctacccctctgtatccgtcttttggataaaatcttctgaggcaaaccagagacaggacttagcctgagtttaggaacagatgcaactagcatggaaagtgggcaataagaacacagtaaacctcgggggaaggaagccgaggccaggaagagactctggcagttgcagaggtctgtactaagcaggtgcagatccctctatgaggaggatctcagatctggagtattcccaaaaggttgcattatagttctcctcccactgaaaatcaatccctcaatcaatcccaaaagaagcacttctgggctgggcacggtggctcacgcctgtaatcccagcactttcagaggccaaggcaggcggattacttgaggtcaggagcttgagaccagcctggaaaacatattgaaaccccatctctactaaaaatactgggtgtggtggtgtgcgcctgtaatcccagctactcaggaggctgaggcaggagaatcccttgaacctgggaggcggaggttgtagtgagccaagatcgcaccactgcactctagcctgggatacagagcaagactctgtctccaaaaaaaaaaaaaaaaaaaaagcttccacatggccatgttttcaaagctaagttcgctgttcgctatattgtgcccacattagacttgatgaatctggcatactgaatataccagatcattcttaaagcattttatttgcatatttttatcaaatgcaccaattccagtttgcttccaagcccttaaagaactcaagattacttcctgaacagttgcaaatcagagaattcaaatttggtatgaaaagtcaggaccacggtccacgtgtctttgagaaatgtatacctggaatctccgcatatctcgagggttgcctgcattcttcaaacagttctgattgcacttgaggaaaaactttagaaagaatctataaaaaatacaaaaagatgatatttattagggttatcagacaaaagactcaaactttttaaaagacactcttgcgcagggaggagtggagactcaaccccacagcttccacacttccctctagggggcgacattgagaagaggctctgggagaggcggcgaggaggcacccagaaatagccacacaggagagcagtgagttgcatttgccttgacgctgtgggtgtccaagctttatgataatagctgcgactttcgcattggcatttcttggctcaatctttgcacaactgcccattaaccatgggggaaacattcagcccagacaggcctaccatctcaacccactaaaaatgaaggatgcctagttaaatttgaattttggataaacaaaaaataatgtcccaaagcatactcctcactaaaaaattgctgttgacctgaaatggaaatttcactggatgtgccatatcttatctggcaaccctaattccagaggctaccactgcctaagcaaacacacttttaaatatgggttttaagagttacagtagcgcctgtaatcccagcactttgggaggctgaggtgggcagatgacttgaggtcaggagttcgagacaagcctggccaacatggtgaaaccccatctctactaaaaatacaaaaatcagccaggtgcggtggcatgtgcctataatcccagctactcgggaggctgaggcaggagaatcgcttgaacccaggaggttcagtgagccgagatcgtgccagtgcactccagcctggttgacagctcaaggctctgtctcaaaaaaaaaaaaaaaaaaaaaagagttacagtaggtacagctcttaaaaagcaattggggggtggggcaggagaatcacttgaacccaggaggtggaggttgcagtgagcggagattgcaccactgcactccagcctgggcaacacagtgaaaatcggtctcaaaaaaaaaaaaaaaaaaaaaaatctaagaactgattgggaggcatattgttttaaccaagaattcttgaggcggtaatgaaactgttgctgaggcagaaagcaaggaacagcactctgcagggctggggaggtgaggccgaagcgagtgctatttccatttcccgccatgccttgcccttatgtttcatggcatgaagattcaggggtcctgacagtgtgttgagatgctgtgactaaaacgtcatcatgttgtcctccgcattcctgcatgctcagtgacattgcaggagagctggcttccagtctgaactcaaagaacctgggaagccaggctctaccactacccacaggaaaagtgggtgggggggtttctccctgtataacctctgcctcaacttgaaaaggccacaaccaagaggtcccagagcttgggtctgtgctgaaacacccactctctgcacgtggccaagcatcctgtccagcaaggtcatcaacacaaacctttctctacttcctcccaaaatatcatctgtcctacttggtgattattaatttttgatgaagtttcacatgattttcttacgttcaaggttcctcgctggcaattagaatatcagaaaatgaaaacactcaacggaccaagactcatctaagtgcccccccagcatatcctggatgacttcttactgtggcagaagaaaatccaattgatgggggaaagagtggtggccacttaattaaattttcctgcataccatgaggcctcaccattttaggccagaatttacatcttttattaactcacctcacctatacacttagctcacaatgcctcttcacaccatctgccatcagcatacagtaagtcacttgatattccacccaccaatttttcctaacaaccactgtgcaattaaactccacacgttccgcagcgaggtaaatgaggcgcacctgcggccacactgcatttgaactgcatcagaaagggcctaacaaggtgagggcgccaccaagttatcgtcctgtcaggcaattaggttttcacttcggggacagcaacacggtgcaattacaccacacattaccacccagctaatcttcggagcaggcgccggcccgagaagctgctcatctgcaaatgtacctgcacggagccatctccaggagctttgtttgtgatttgagagatttctccccagctccagaggaggtttctttaaatttcttgatgtcttttagacagtcacccttttacctccaagagaacagagcgagttttgatgataccctaactagccctcactcggcactgtcatgaagagctgggtttggcattcttaggccttcactgtcatcctctgcagaaatcagcaggacaaagtcgggtgctggaccccagaaacatactgagcatacccagggtcaagtcaagcaggtgcagatacacacctatgcacacatacacacatgccacccacacatacacacacatgcccacacatacatacacacacatgcccacagacacacatgcccacatgcccacacttgcatacacacacatgcctacacatgcatacacaaatgcatgcacacatgcagacacacacgcgcatacacatacacatgcagacacatgcacacatacgcacatacatatgcacacacacatacatatgcacacacacacatgcattcttgcttgctcactccctctctttattttctatgtggcaatgatagtttctgcttctatccaaactgcctaaagagcagtgcaagtacttgagaaagagctgtcgtgcacaaccctagagaccaggatcctttctgagcacacaggtcccagtgacacaaataaagtaagctcaacagtcaagtggctccatgccaggttcttggggcatctacagggacggacagaggggaagcctcagcagagagaaagaagagctctgcgcttacctcttaccctagttttggtcatgtctgagttggggattcaattaagcctttgcaaggtggctggcaccgtacagcaggtgtgtgactctgatattgtgcagagttacacacggagcaaatgtatgctttcacgaggaggtgctcagtgagccacacgatttcagtgtttggggagggggtgagaaaattgaatgcccaacatgtgaagtcaaaaggtaattctcatcctttactcaattaccctttaattggctttttcctaagaaatatctgacaaccactttacatatctcacttctagagtctggtacacaaagaatttaatactcttgttatgaaaggaaaaatctttcctatgtcagaaaatctttggctttagcaccaataaactctttattactgcaaaacatggatttgctgctccatcacgaagaggcgataaaaattctaacctgtcattagtacattatgcttaattgtgtacagtgtgtctctcgttgcatctgttggcccgtcatcaaaatgaccattatgtgcactaattccctgaccctgtctttatttccctaaagagtcatcatctttcacagtaggtaccagagtaaatcaagcttgaaatatgggctttatttacttgtttctcccaggcagaggggaagacagcagctcgagataaactgctacacgccaggcgcggctttcccagccccattccactcggaaacagcccacagaatcctgggaagttctcaggaaccagcagaagggggaaaggtgtgatcttattacttttgaaatgaggtttcctctttcgcggtgcacagggactaggacagggaaccatatgggcaacctcattcattcttgggagggctggttccaggaggctgagttgtgggaggttccctctactaactcatgagggtcctgtgaagatggaccaaggggcacagtcgggccctgtgccggggaggacaggggtggaggggcagctgggtgccactccggatatcttgagtttaatctagaaatcccgaggccctcatttctgctgggacaatgactcatctgctctaaatagagttgtggccaccactgcacccaaggaagaaagagtttggtcttggttgtgtttgtttcagagtcccaacaaaaaactccagtgccagcataagcgtggagcagcagaatgaggacaccttaaactgggctaaaacaaataatgggatcaaccgttttaactggagcccaatctaggtatcacacaagaaaggggcaagcccccaccgcagtgactaatttcaaagtctgctctatttctgtgtgtttaagctatgaattagttcatttatatttacttttatgaagctgattaaccagagcttctctatctgatgaaaatcattttaattgtagtgttaggctcctgtgtaatatccattacattatgaactgtttaaattctacatgggtattgtgtaaattggccctttgtgagctagcaggcaattaggaccaaacagctctcctttaaacggctacagaactttgtggtgttgttcaggacaatcagaaacaaaggaggctgtttaattgtaatttaatggaatatcaaggagtccgtggcattagatgctggcaacagagagcaggagagaaaaattaactgcaattatgtttgattaaagctatccttctcaataatcagcggtcctgacaggccatggggctctagtgggttccaggatggcaaaaggtgttgagcaatattagggccaataaaggggatattagcatagctaattacagccctgcaaaacctgtaaagggggcctctgtgtattgtaatgtgtgaaataattggccaaggccgttatcaattacataaggaatgaatttggtttgtcagagaaaagctgatgagatgcacttcatctgacaccatccctaccctcatgtttccatgtagctaagaacgtatccacttttatcaaaagctgcaacttaccactggccaaaccactgataaaattatcttgccagcaagtgttgggtaattaatacagcccatcctcaccgccttccctgccgctgttgttctcacctaactgaagccactaatcatgcaatgatgatttctttccctctggtcaaaggagaaatagattgtctccttagaaatgcagtgggcttggcggtcgcaccctggtgattgaagagaaaaaggaaactttgaactgttctaatggcttgctttttgcatgtggctatcacttgtttgaaattacctacttctcagcatctcaggaaccctgtacaggattttttctttaatcatcaagtttcagactgttccagggcttggtttctccagcgcttgaaaacgtgagtcactgtacactggaaggtgtgacactgactggccccctgaaaagacgcctcatcaaaccgagctgtgactcctaggtgcgcgcctacccccacgcagggttaagtggccacgctgcaaggaaagagctctggctcttagcacagcctcccgtgcctgggttccagcctcggtcctagaaggacaacccccttttgcggccctcaatgatgggtaatgtgggaaatcagagtcaagaataaaaaatgttggtatcttttattgtgggggatggggggaacctgcttttgagttttaaggcagagagctcttaataagcagcaaactcatacaacagtggatgggcctgcaggccatccatcaaaaacccaaagtgttcgtgtgtgaatcatggaggtgacagcttccagaggttcctgggggctgcagagagccctattccggatcgagcccccatgttttcagttactactgttttaatacgtaataaccttgacaaggaaaaatgagtactgaaaaccagccagaaaacacagttttaaaagtcaccgttcactggtggttgctggggtgggggaggggaggatggggaacagctgcttcgtgggtacagggtttcctcttgtgggggtaacggggacatttggaactagatggtggtgatggttgcacaaccttgtgagtgcactaaatgccacagaactgttcactttaaaatggttaatttcatgttatgccaacatcacttcagcgaacaaaaaacgtcctgccccgaaggagaacacaagagtggggcacgtgatccgaggccctcatgggggccggtggctgcagcctttactgtgctattgaaatgaaatagttaagagtcaaattaaaagatagagcctttaagagacttttccctgactgataagagtggccagtggagtgcttcctcgaggtccctgctaattactgggaagtccctgaaagcagtggccacagctgtggtgtgtgcacacccggccatcagtcgctggagtattgattactgagcaattctagccgatcgggttcgggcgcttcagagacaatgtgcttccctcacaaaacctgtaatgagcagttcctatacaagactacattctgctgacatcagatctgtgcactaagatagtacacaggtcaatacgtattggatttccaaaatgcgagggtcttaatgtcaggcctctctttttctctcactcctgccattagctattactgggctcacgttctttaatgccatacgggagaaaaaatctgctccattagtctgatttattcttcaaatatgccatgacaaattgctttaacaccagacttattaaattcttgtacatttcaagttatgggtctcatatacttgtagtgcctgcatgacgtcatagcgaaggggcagagggcggcaagcttgaattttacagctgtgcccagatgtcctttgttgggggctcccctctccaggcgagaggtctggatggctggactccccaactgggagtacctggcctgcacgtgcatgctccccgagcacacacgctatcctgcatgtaaatgtagatgtatgaggatttgaaaatatccacggcttgacttgcagttcaacaacgactggcctttgtctggggattctggctctactgtagccgagcccgtctctagtggactccagctattttacttccctccgctgtagtaaccacaccgcattaacaatatttgtactacaatcgccaagggacccacttcccagattctatcacttctttatctcctgacaaatacctcactatcgaacattattaggtttagaaaattaacccttcacagcctagagccacactaggccccaccgtccctccaaagagccttatcgctaaatttctgctataatggtttttcttttcatcacaatttcagcagcggctgtcaagaggcacttatagataccatgatcttgtacttttgcaatgattctcattaaaatgatgccaaagagatctgatgggatttaatggctttgccggccagttcaatatccccttccagaacagatccccgccaagtcctccgtttggagaaatttgtatgactcgcattaaacttttccgggtggttttaatgtgttcagataagtaaaatccaggtagacactctaaaggcaagtacatcccagagctacaagcttcgtcagccaccccactccgcccgctgtcagtgttctagttagtattttctgcaactgctccggatatttcatgatagttttgataaggttatctgtttcaaagaagtcaactgcacaacacaaaagaaatgtgaagtgcactatatttacactagggttcttgtttcaagtgcctatctttctttcccccctttacctatttctctatttctaatgggcaatgcagcactgacattatttccccagcagatcacgcgccctgtcaatcagtctgtattttgtctttcgctgcgggctcattaaaacagcttcctctctccctctggacactgttctatttgccagctctgatcacgaagctccttatttaagaaaaatgccagcatcacttggctcacaacagacgcacccccctgacttgttgccagctccaggggaggcttttacaggttatgcagagattaagtgcctatgcttatcccaacttagggtttcaagcctctcccaccatacgcgtgtgtgtttttagggatctgaagatcacgggaatgcttctttcgccatcctgattcctgatggctggggaggtcattctcaaaataaatgtgggtgagggggtgttgtttttggttttaattttttttttttttttttttttttttttgcttcccatctccaagtgggaaagatcttgttaatcctttcctcctcggatgtacatttcccccatccacaccagcttgcttaattaagaactatcatctttgtaggctgaattattaataaaaaaatcacattttaaatcaagcctgtgcatgcacggaggacaccagtgttggacctgcctatgcggctctctagccttttaggtcctgattaaaaacttattaaaacattataaatgattaatgggcgcacagctctgagtggcaattattagttttaatgcaggtaatgcagcttaatgaggggcacatgtgtgcaaagccttaacttcattactcctgcgtgtcaacatatacaagagaaatgtgtgtacaggtcatccattactcggaacagcaccgagccctctctcttcacctccctttgttgatgagccaggagccataaattaatcccgttctgtggctcggggaaggaccaaggtgttaaaatctcagtaaaccctgctcggctccccacgccaccaggcagctgtgttggaatatttcacagattatctgttctgcggccctctggtatgtgggaatttttttttccctgggatttttgcaggtcgtcattgtctctgctcagaaacaagagctcccgacattcagagctgactgggtttctttcccttcttgttttaaaaggtctgcaggggagttagctccatcctaccagtgcctaattcacattagcacggttctcctaaatcttcagatgtgattccaatgtctgtccttctaaccgctcctctcctgtcgtgtggggtgcaggagactatgtatgagagacacagagagacgcacacttgagtgcccctggtcaagaaggggttttaacactggaatgcagaaacagaaggaaataccgatcagcgcctggctgcaacatggagatgtcagggtaagcacaggcccggggaagaggctgggtgggggttgtgggcgggggggggggggaggtgaatagatgcatttaggatgctgagagtcgggggcactggcccacaaagaagcccatacaagttgcagccccacctgggaccctcagccctgggcctgcaacagcccacggctggggagcatgccactcggcccaactttgcacgtcacctttcattttctgtttttgtgacaagcagcttgatccagcctgatctccactatctgtttgaagagtattcaggactatttgcatcattttatcgctaatgtataatatatggctctaaagtgagcccaagcgctgtcttgttaccgagcataaaaaagtaagggcaataaagatacattagttctctcaagcacagcggctataatgcaagcaagaaaggttgctgcttacagttaagaggcaacctttctgcctggctaagacaatggaagagtaaagaaaatgtcaaatcaagaaaagctggatttagagatgaggcagcccagaatgacgttggtgccatattttgtggaactataatgctgttggcagcaaagatccgtgtttctgattcatctagggccgcatggcaaagctttgtcagtctgtgcaaggtataaataattcagggtgagagatggcaattacagggccctgcacaaccaaaatgaatattttatgaggactaaaactgctctggaatgaatcatgcacatggagtcacacatggcgagtggtgggttcgcacatgccagccccaagaagagaggcgccgcggccctgatctcctttcagagcgttgactataaacctggcgaatggtaagaggcaaacaaaatcagctaacccgcccccacgctcctcatagatgctcagtccctaaaacgtccagtagggaagcccgggaccatgccatagaaactccttgctgatccatcccaatcggcctcgtggtttgcttatttttctccaattgttcaaactattgatagggtaagctgggaaccttctcttcgtgagaaaaggacttgaatttcttgcacagggagaagaacagtttcgttgtcctcgatggaacgtgggcgtgctccaggaaggagttgcagcgagcatgcgtcacgccctccgcgtgattttccattttcctgtcggggagcagcacccgctatggctcttcctccgccttctggacctgaacctcacatggtcccagtcaacagactgaagggcccgaggcggtggcttttgcgtccttagatccaaactggcgcgtcgaagttgctttcctcgctttgaaaactggtagactcctgatgggggcaggatttaaagaggtcgttaaaggctgaaaggagggtttcatctgttacatttccttccaaaatgctcctggtgaattgctagaacaaataacaacattgttcacaaggccgcggaggcccagtcccactggtgaatggccattgtgtttgtccagctactgatacctgcgcttttgtggaggaaagaaggccggggccacgacatcggcgcagcacaagcatccctctgtgcggatgcccagagcgggtcccggccgcggtgggaaccgaacaccagatccctctgagaaggttttctttaaatccagctccaatgcattgtttatgaaaacaaggctattaggtatattaataatttgataaatagggatttgtccttaattattcatgaagaacatttggcaacagtaaaattatattcgcagaacaggtttataaaccagctaattataaattaagtatgcaagagaaaattgctaaccttgaaattaaaatattttatgattctgcaattacaaaaaaaaaggtagggaattatcaaaaccccagtgtgggcagagggagcagcaggcctgggcctatacagatggtggcggcgcacaggccagaggcgtgacagcagagggggtggaccgggaacccctgtcccctccccaacagcccctccagtcggggtttgtgcaactttccaagagctcatgggaaggaaccagcagctgtccacaaggcagcccagcatctgcagaaggccctggtctggttctttgcaaaggacatggtggtcccctctgctggccgccaaagccctggcaggtgaacagagcagcatgtgccctgcagagaagaccccaacgcccctccatgtcactgccctcccgctggggcagggtctacagagagcatgggggccaaagggacaaggccagagctcgtggcacaggagcgtggtcccgcttgtccccactagagggcttctcggacgggcctcagcggaaaccagcaaacgccagggtgggcgggcagccttgggctgggagcagctcctgcctgcaacacacttgggacagacccctcctgcggctgggccgtcccactgatatgtgggctctgctgcctgagcacagctttcttgtcggacggttccatcatccacctgctccccaaactctgcagcctccctgcaccccccacccgctaaacagccagcaacacattcccagtgagttccacacacattcccttgactcatttgataagagaagacagatgcaggggaatcttccgttcactttctaatgaccagatatcctcactcataatttgggcagaagttaaaagaggaaaacaaccaggataaataatgaatgtcctgttgggtgcagggaggggaagtaggccatattcctccacttcttttcccatggctatgtcacatctgcaaaaaaaaaaaaaaaaaatgcaaaccgtagaggctcaggacatgcagaggcagcccccgaccacttttactaccctgtaactcagtgactctttccacattccctgaaatcaacgggaaaatgagcaaagcccattgaagtgccttttttttttttttttttttttttttttttggttatgaagagtcttgacttccctgagagtcaaaagccccattaattgttcatgtaccagaggtagtgcagggcacactcatgtgcccgagtccttaccccgacgcttggagacacagctgtgggtcagacagccaaccaatcagggaggtctctgggaactcagataatgaaaattttttcatgtataaaatccttaatcaaaatgcgagtggtgtcatcttgcagtgcagacactgcaacttaaaattaatatacaacagaaccttcagcagaaggaacatccccgggctgtgtggtacaagtgaccctgaactgtggcctggactgccgagaccccaggcggcaggccggctccaggccagcatcgagatcccagggaaacaagctgttgctgcaccaggatccccaaggcccggagggactccaaaatgtgagggcaaatcggcaaagatgatgtagcacaaagagcgccattaacaccataaggtgtgacgtgcacagcggggcctccgccagcctaatactgggcacggctttaaggcaccgtcaaccaattagtttaactcgatcagctagtatctaaagaatatttttatcatttggaatagactatttaccatttgataggatacatttctttctttaccgctgggatgctccacagatgctaagcaacttcccctaacaatatttaaattgcttacaaagcctctctaaatatttgctatgtatttagcatgcctaagatttgcccgttatcccaaagtctttttgttgtaaattgcaattttacaacttcatgctcgtgatctattttgacaaagctctgctgacaccctctattggcctctgaaggcaaaagagctgatactccacgagtcaccagagaactctcaatttgttgtgagaccgcgctactttgccatcctcaatctgcatggagaaagattaaacattcaatttgttacttgataggccacaaggttcgccacttaccatacaaatggaaaacattactgtcattcctcaacttgcttgcctgagtattttattatttgtaatatttacttcagggaaattatgattcatgtcatatttatcttcatgaaaaatgagcatctaaatggaaatcaccttttgaatgtaccgggatatagtgtaatactaatatgcttcatgaactataaaatttagtcacagtatatggatatattatagcatgactttaatactctcccatcaagcaaattttctctgtgttaagctgatactctgagccctgattccagtttgataatcattacacctacatgatggtacaagtcactacttgtagatttatgtgccctctcagctcttttgcattaatctgcctctgaataagctattcgcacttcctcccgtgcatgcaggaaattggaataaggtgcaaatttgtaggccttaaatctgaacaagcacagacagatatttttcacctgataccattcatttgtttcaagtaaatacaaaagacattttttattctttgtctttgtcctaaggccgttcttcacgaaaacgactgttgtgtgtttccctccatatttacatccatttttgcagaagtcagagttaaatgaactatctgcaattagctctgagtcagacttgcagtgatgtctgtaccaatacagggtccccagcaggccgcgccatcctttgtggatccgtggcccggtggtctgccacccaaggaggtgatgccatgtattacaagcacaacagagctcagaggcccacagcccacttttgagaatccttctggataattggagagcataaacttcagtggctcacggcgtctctgaggccctggtaagaggcattccaattcattacagaggtagttcagaaatatctaaaagtgacaggaagagcttggcgtcactctcccccaattatccgggaaattccgagattcctggctaaacccgtcccaatctcaaaccttttcctctcagctgacctgcagccaatcaggctgttaagggagattgatgggcccgcctctctctggccaacggcctgcctgaggacccagggctgggacactggcaggggaagcatttctcagcagcggcaagaaatgacagagtcaagtgaacttgactgagcaggatgatcccgggtctctccccgggtcccaggctccaactgatgagtagcggggctcttagtcgggttcctctttggagcccttatgaaactacctggggccaggaggcggtgctggggtgcccccaaggaaacaggagaggggtaggtcttcacagtgtgcacatgcccctgctttggaacccactcccgtaaaagcagtgaataattaatttgatgaactcaatttccatataaaactgttgtcattggaaccataggagccaagtgcaatgagctgtttggcgatttccacttatttggggattttggtgccacggatgccggacacctgtgaggtgagcaacaccatgggtccagaccgggaatgaggcctcctgtgacggctcagagagtgagccgtgttgcatgaatgtttatgtgcgttacaaattaatgataatcaccactgaccataaatatagcacaagaatcacacgagagggtcatagctacgaaccagctacataaatagagtatgattagtccatgtctaagagtacattcatcacttaatgacttttcccattatgcctgcacattttatctaatcagaaagtaagcctgcttgctttcactgagcagggttaacctaataagactgctgcttaaaccacatcgaaacgaggcataacaagccagcttgatgaaaacgctttcccaatctgtgacaacgcacttgaacgtcgccatcaaatcataacccccaaatatgtattttcccattttaggggagggcgccggcagccagccgttaattagcatacttcccatgctcgtcatgaagtcacgggctaatctggcacacacggttcggaacaggctcctgcctgaatcaatcgtgagagcagggcgctgggccctccctcccagctctccctttatatttcaatagtcctatgacaataattgattgtgattcactcctgaaatgtaccaatccccgggaaatggcatgggctttcattcatcaatttcagcttcataagtggaaatttatacaaggtatgcagatgtttagagtttggggtaatcaataaggagtaaataaagattggcattcactatactccacttgacaagccccagcctaatgtttgtcaagcaaattaaacacactcagacttttcacctgctccgacaacagcaccacatatggccctgaagttaaaaataagaaaatgtgcatacattatcatacataatgtacaactccctccatttaatatgcaaattttgtaaaatattactgaataccttctgttctaaatgaataaatttgaattgcaattagaataatcttgtataattaatgaaaactgtcaatttttgttcataagtaatttgattaacatgttgataggacacttatcaagttcagtaaactgttagattaggaagatgaaaaaatttgaagaaaatttttaccagctctgacaatttcccctggcatggtaaacaaagacttgctggcaaacttcctgacgccgggaacgagcctctccagctaatctgcaaatcacagcgcacgcatgaaacccggaccaccttctccatttcttctgcgctcccctcctctccagctaagccagagtttaaagctacagttaatttcattgatcagtctgactcggaacgtctgctgaggtcaacagcaaggtgagcgcctctgttacaggaagcgtgcaggcctgtcagcagacctgctggcttccctggtgggggtgcacggggccccacgtgtgagggactctccacagccaccctccgtttggggtgaacaaagcgcgtgcttctcctacccaagccccactccccaactcgtgtggctggagatgcaacccacaggcagaataatttcggtaaaggcttaagtgcccccctccttcctattaacctgctccccagtcctgttcctgttcttattttctaatagaaatgaaacttttatgatatagacgtgggctggcttaaagggaaaatctgtcaagctggtgatctgcacttgggtgtctcctgcgcagaactttagatgtttaattcataaatcctgtcatccatgtaaacctcctgatttcataatgaataactcttcatcatttaattaatttaataatgcctttcaaaatccataaatgaagggggttctaaaatgggtgcattaattagtcacaacgagggctgaggactcacttgtcaaccctgagcctgtcagttttaggacgaccagaagagatgccaaggtctgtacccatcacccaggaccttgcccccgtggctggcacatcccacaggtcccaggggagaggccccctgcagggctcggtgacctatgatccagcaccttgcctctgggccccgcctctgtgccccagctcctcctcagaccgagctggaaggaggctttctactctgcttggaagctcactgaccaggctctccattgctcactggggccctccagctccccaggttgcagcagccatggctctcccaatagcctggatgaccctcctgcttccagggcagactcttccagaaaactgcatctgcctggggcctccacagagcctattctaacatttgtcaacatcatctgttttcaactttgcaatatctcagcttcctctgacagtaggtaaaaggcatcaagattcccaatgtttacatgctgcattttcaggaagttgccagagggacagagtctcctgctggtgacttcctactcaggctggcagcagcctgtctgcagatgtgggtgagtccctgggtcagtgagcacaaagtcctgggcaccttctggggcaaggcagtgctcatggcagaggctgtaaagcctgcaggacgggtaaagccaggcaaaatgagtgggcatgcggaacggggacagtaaggccaggttcagccccttgttctgcttcttcctcatgggccactgggcgagacacttaattttgccgagattccattcgtccatcgacttcatggagctgctgggaggactatatggaattgcttgcataaagacctcatgccttcactcaaccactgcctcaccagcaggagtttgggaagccacctggctgctcttagctcctgattgccctctgcgaagtggatggatgcctctcccccagccaggctccagagggagtggacggggaaggaggccctgcgacaaggcttcgtatgcctcccggcaccgaatctacctgaggctcgggtgtaccaagagcgggctctggacaccacactgagctgggctgcggcccagctactggagaagctcccttgttcccatgggcagcttctcctccgagtatgggtaaggcatttccattccccttcagacctccacagaaaaacccaatgagtatcagtatgtcatcaggggacaaaggagtgaatccatactctcaaaattcgacaatcaaatcttaccagaggagtcctgaggaccctggtaggggagtggcctaaacacacctgtgcttctccacctgggacaagggctggtgtgcagaaatgctactacaaataaacttgtatcgatacttgtgccattttaaaatgatacttttgattactttcctatcatggacaaggacatgacacagattatttctctgcacatattagttaaaaaaatccagctgactttagagtttgtcaatatcaggagaggtaattaactgttttgaaagaatccgtaatgtgggactttgtaatggcatcatttggagtcaagtcacagatgcggcgtgtggagccatactgtaattaggaagaaatgctgtacaggttttctactaattagcaaattatgctgaaaatagcatcaagctaattaacagttattatggcatttttgaaagtatgactttaattagcaaagtcctgacgcatgcaatttcaaacttgtccagaaaaacacaggacatgatcaagaagctacaaagattattatgaagaagtcaaaatgcagggtggggggaaggggcttttatgatccatctgagttcccatttagatgaaagagcatgtgtatcgtccaactctgccaaaaaaacccaggccggctgccggatgtcaggtggcctcagtggtcatagcagccaccatgcaaaaacaagcccgagctcagctggtgctgggaagattcacttattctacttgaatgcacattaaaagagggactgaatgaagccaagcaacaagacataacctgacagctccgctcccggccacgcggccaccgtcagccaccctggcctggcgtcgcccgccattcctggcccctccgagcagctggctggacggggcgggggccggcgtgggccgggtgtgggggtgcgacaggcccttgggggctgcccctgtccctgcacagcgagtggggggctggagtttgcaggacgtgctggggcgcggcctcctggcgagcctcccggaggcggtgcaccgtgcagcccttgagctccgctgacctcgccggtgcctttgtcttccctgctcctcccgctgctctcctccttaagcattcccttttgttgtctcagagaatgagaaaaatgccatctcttcccaaagccccctgtagctccaactcctgagagctggtgacacgcccagcccgtagccacctttcgccctgcgtgaacttggcaggggagtcgaccattaaatactgagcagaggctcaaaccgagagagaagcctgcccacgccgccaccccaggcctcctctttattgcctgtccttcatagagagggaaagagccttgtagccaagttttgacatggccacatatggcctcttccatcaatctgactaatcaagcatcgaggacaggcaccgccagcctgattgccagccatggccatctcactgcaggcaacctgagcagagatgggcctagacgggcagttggagctgggagacaggaagacaaagccggtctcctttcggggtcctgggatgagcactgtggtcacagacacactcgcggtgtacacgggccctccacgcagccaggaaggggttctgctcttcctgtccaagttcctggggacacctctagtccacttgggccccactttcctgcagggacctaggagggttgaaaggagatgaggcccatggctgtgtgggtgagttcttgggggtacaccagtggccccaggacctttgtggaaccagagcagagcccagcggtgccacccatctggaaggcggtgctgcaaaaccctgaggtgcatggcctcttctcccatccaccctcccctgcagactggctccccctaaatcaaggggggccaggcagacctaacaaacagaggcaacacctatgcaggaacttcctgggaaaatacagaggaaacccagcacacgacccttttatccgagaggcgaagcccgggaaggttctcgagggcgcccattgtctccgagcctgcccactgtgcctgcctcagagccctgacggacagctgacattctcctatttattatcaagaagtacaagttttgatgttatcagagtggaaaaacagcccaaatgtcaaagcctgaatattttccccagtttcttgaaatgacatcttactttcctacatttatcgtgacggggccacttgtgggtatgcgagtacatggcggccagaggcagatatcattgaactttgttggggttttgttccagcatcctccaaatgctgcaatttctgcccttttcctggtgaggaatttcaaataattctgttataaatgcctaaagctggggctgctcaacagaagagagcccgagctgacccgttgctgtattaaattttcatatgaaaagaggactttgcacatgcagccaaaagggcagagctcagcgctcctgttgggctcccagagacaagcattttctagctctgcatgcataaaatgagctacagtaggtgtcagtaattaaacgatcatgtttcaaagtcttgacaacagtacagaagcaagagaacaagacgataatttcattagtctgaagagcaaagtcataattaggtgcctttcacagagtaaaagtcatggacaaaaggtacccatcctgcccggctgggtctgcagtgcaggagtgaaatctaatacggggtcccgggtttacggggttcacccatgggcaggagactgcaggcaaagtctgggtggaaacaatcaggctttctttggggcggctgagaaaggaaatgatatagaaacagcctgaaaaagtcagcaacaatgggatatcggtgggctattgttatagggaaacctgaattcctctccttgttctggggaccgccccccaccccaacccagaaggatggcaccatggctcacaagcacggtttgcatccgtcgccccactccagtcattaaccacattataaactgactttggtaaagtagcatttatttaaaactaaactgttgggatgggcacttcatggaatcattaatgtgcagtttgatgtttctgtcagtttatttatctctgtctttacttgctgaggtatttgcatatttaattgatcaatatgctccccgttcctcttgcacatctgccaagctggtcccagcctcttagacccctcatttctcaaagtgacagctcgccgctgcccctcctcccgcgcccaggccccgctgcgcctcccgcagcaaggctgcccggcccgcggccggcgtcccctctgcacggctattaattttgcatcctcggataacgtgcagcctcgagtaaggagaagacgtttttggtgtctgatctgtaaaaagttctcgagacagattttccacacggctacacgtcggagcgcggcagcaacatgtgtgcgccggctcccgttcagcatctgtcactgtctcctcctgcctccgcgcagccttgaatcggagctgcttatcagcagagtgtcagaaatccgcgctgccttctcttcctcgtttaatcttttattaagagctacattgtgagcttctgatagcgaatgtcctccacttcatcattcataaatcggagtcgacatcaataaggtgacggcaccatggaatcaaaagcagcgtggttaactgccaatgaaaacgtcttaaattttctaaacaatccgctggcatttcttgatgccagcagagtgccacaaagccccattatgtgtgtcggatggtgaggaacataaggaagttgttctcctccaggccccgcctcaccatggactgtgccggaggacggtgaggcagaggccggcgccctggaccagcctgggtcatttcaaacaggccaaaacaacagccagccatgtggctaaaatgtaaataaatacagccttcccgacttgctgtgcgagggaagcccaggaggagaaacggacatgtcccagttgctctttgaaatggccagatccagccggagggaaggccaggccggggaatggcagcagggttgaactcctccacaggtgaggacacaccaggggccacactcgcagaaccggaaaggacgccagcaccgtgcgtgaaaaaaaagccaagaaagtccaggtgacaagttcctatgctggaacccggccctgcatctacattctcctcttcgctgatagccaggatgcttctctctcctcttgattgatgttttagtctgagctgtcattagttaaattaattttctctccaagatagtggaataaggtccacaaaggcaaatcttatgaggctgtaaaaatagaccatcatttggaggaaattcagatgtgttccctgctcttgtcgttgctgcagaagaacactttaatttgatatgaattcctcaagagaaactttaaattaacttagatttagctgtgtttgagagatagcaattcaaagcaacaaaataaaatactctttgctgactccggtgtttccatgttcatgctcctatgtgctcttctttattttctgctcaggctaaataaatgccaatattcaccttgaaagagtcatcataaagtaactcccctgggatacaaaaatatccttctctcatcttccatccaaacagtgtcagatgaagttaaaagacctggtaaatgtgctaaaatctgcttatgtgaattatttttttccaggataactgagcagccatcacctaagctgtcaggatgcaaagagaaacgcagaaagaccgttttataacctaagagcaaggatggggggtaggagggggctggagagaggcacacggggaggggaggaaggacacagaagccacagattccccagcggtcagcaccagcaaggtcctgggggacatctggtgcagcctccagggacagaggaggcctggccagcaccggcccaaggtcctcctgggcaacccccagtgccctgacctcctggactcactgcctgatgccaaagggcctccagttctcctcactttgaggaaatttaacttgaacctctttcatgagagatcttgtttcctaaacagcccccaacattgatggtgctgtagccaggctttgcctgtgagagcactcatgaggagcaccgtagcgggggtgctcctgaacttctgcatacagatttcttggctttttccgtcacagcctttgacacccatcagccacaggcaacctgggtagacttccatgggagggcacctcagagcagggtgactgagttcatgaaggtcccagtgcaaacccaaaggtcttgggagccattgaaagcacacatcacccaacacccatagagccaagttcagggacttgggagccaataaaaccaggtattacccaacacccatcagagccaagttcaaaggcaggttccatgcataattctttgggctggtaagtctttttctggcacgccctctgataagaaccattctcaactgtaggatgctcttgacatctaagtgggtccttccaggtcagacagtcaagtacatctggagtgtctcatccaagtggctgtggccctcttagctgggaagaagccagaggctgccagtgctcagctgacatctccacatgacttaccaccactctggcaatgtcataattatgacgcctaaacttaccctgtttatttgcaggccagaggaatgcatgattgtttatttttattacaaatattgatggtaactcacaggcacttacttcattgccatttctagtgaaattgcccatcataaaatatctccagaattctgatcctgattagcttccagagctggtccagggtgcgatcctaccatttgtcttaattttattttgctctccctaactgcacacaccacttcaggaatatctggaattttgttttaattgtacagctttcaactcacaccacatttctctttgtgttgaaagcatcccggtgatttatcctcattattgtgtaaataggtttcggcagttctcagtaaataaaacaaagactgacaggaggagaagagggaatttgctttcctaccaattagagtagccttaggcagtacttttaagaggagataaatcctgcaaatcactaaaatgatcctgtcacatgcaccaaatattaaaatcgcacagcggcgccctcggtacagtttgctctggtttaatgagttggggtgggcctcgtggcgagggctgcaacgcacagttggggacccttgactgacagcagagctcacacccaactgcagcttcccaacctgtgtggccagatggaaaatcacaatccggcggaatccgcagctttccagctaacgaacattcccaaattgtctttacagcgtctacctgtaaaacctttccccatgataaataaatgcaaactctgcttcctattagctgaggtgatgcttttaatacaaaatctacagcctgtgcctactaggggagcaacatgttaacttctgcaactggggaagttttcggggaattagaagtgagtttacttcatctagcgccacacttagttccccaccacaacgcagctagttagttgtcctccacaactagttagctggggaaacacaaggaacttccagacatttttttttttttttttactatgtttcaatgcctcatctactttctccagctttggggtgaagtggtccacctaactccacggcaaggaaaccaatggaccccatgaacactttaacgagagttgtgagcccatcttcttcaaggctggtgtgtgacctggggtgctgggtgcacgggcgtctttccatttccaatccatggccactggggttcagaagcatggcacgctatctgggaggcacatccatatgggaccggtcacaatggagctgtaacagccatcaagatggttcaccataaaacccagcagaaagtcccagaacagacaacccaatgggcaggcccagtgttttgcgtttttcagtaaccacctttcttctctctgccactgtcaggtcttacctggtgacaatgacacttggtatattgagcaacaactgttagcttgttacagcatctttgtgagactctttatgagcgtgtaactaactgtacgaaaagaactcccataacccgagacccggggtcagtaatgcattaaaacaaaacaagacacacaggatttcagtacagcaaggactcgtgtggaaaggggtgcctggcagggcaagacagaaggagcccaggtgctctgagccagcttccgcccaccctgcccctgggcctacccagcctggtaaatgccaattcacatccaagagacggcggcctctctcaggattccagaagtatttaagattcacaagtgattctccatgaactcaccaccactgccttccaggatttggaatgaaaacgcctacaagacacagaagcaacacaacaaagagaacacaacgcaattctgtggcttcgatgaaagtcatacacacgtttcacctttttcttgacatcttagtttttagcctccaactgaagttccattccactagtattagatggaaccaggtgaagctgctggttttgagcatgtactggttcagtatatacggttcagtctaatattttatgcaaagtggatatcaaaaccataaggccaatttccaaagtaatattattttctttataagagatgtttggaaggcccttgggcatagaaatccttggactgggcttcccttgtaaggaatgacccaaagtgtctgcatttagtagctgtggttatcttattctacctgctctttttacccatgtagcattccataagcacctgtgctcagtgctaaatttatgaagaaagagattacaaagatagcatcacacccttacaaagttcagattacatcccattaaacaatgtcaaattgtcaagtactaaacctattcgatgaggaaatgtattagagagatactggtgcattgttttacaaatatttgttgagacatttcctaatggtccttctcgtggataaagatccacagaatcaggagtggggacatattgggcctggaggaagatgtgatttttgatgagagtaaaatccttgctcccaaaggtgctctgagaggcactttcttgctgtcatggggagtccatgaccccaggcagtcatttggtggaattttaattgctgcaaagtcatcataggaatcacagcattttactgccgggagaggagtctcagatagaattcaatcctaaagttgacaaatggaggcagaatgatcagccagtgaagtcccctctccttcccatctgttctttctgtcctcaaaaccctatacacgattccaaagggctccctggaaaagttgctgccactctcagaagagggggtcacatgactgaagaccatgacccaagtttccttcagctggttcaggataacatagttggtggaagatattcaggcagtttccttttttcctactttggaattcatgcccttccacctagaatgcccatccccaactcatctctgagggtgtgcagacccttcatcttcatagccaggaccccaaagcctccagggttcctgcactaccccttggttaggtcttaactggtgacaatgacacttggtatatttagcaacaactgttagcttgctacagcatcaccccagagtcatcattccccaacacattattctcctgtattataatcatttgtttctcccacctcctgccaaacatattaagggatacagggctatgaatatggagatggatggatggacagacagatgattaaatggacagatggatggatggataaatggatggatggacagacaaatggaagatagatgggcagatggatggatgaatgaatggatagacaagtgcacatatggatagatgaacagaggatgcatggataaatggatggatgaacggatggatggatggatggacaaatggatggatggatagacggatggctggatggacaaatggatggatggatggatggatggatggatggagacagacatctatggatagaactatataatacaaatatatagacacagacataagatttatatagatctctctatccatccatccatccatccaccctttagagcaggaatattttaatcacctcaactcaaattagattttgaataaatatttcttgaatgaataaatgaatggataattagttactcctaaacgaacagaagcaactccttaaatagctccctatattgcaactgcaaattttcatggagtaggaaacagacacaaaattataatcacgagacatttctgaagcaaagtcaaatttgtccataaggtgagggttctgccaccatgtccatgagataaccagaaagggcaaggctgcgcctttcagggatgagttcgtcccactagagatgtgccctctagggtgaggtgactctggaccccagggctccaccctcagctcttccctgcccttgtctttccatcaacttggggctggagactccagggaaagtgtagctctgtcctgaccttgatggcaccagaagggctccagggtgcactgtgcaacatggtggccacaagccacaggtggcaactaggcatgtggtaggggccggtcctcatggagatgtgctgtttgtgtccaatacaccagattcccaaacttagtgaacaagataaaatttaaaatatgtcagcaattttatattgactacgtattgaaataataatcttttggctatatgaaggaaaaaattctttcttatattttatattataaaaatattatctctttttactttgttagtgtggttacttgaaaaatttaatagtcaaaattttaggtggctttcatgtgtggtttgcacactgttcactggccaccactggtctagggagcaggctgggtctctccaaggactgaccctacctggcctccccactccatgaagaagtagggatggaggatcctcccaggccctcacacaccatctctagaggatggcagcctctgggaggccacacagctcagcgagaaccgcagcatcagcctctccaggacggtggcggggaagggaagggcttcccaaccgttgcaggtcctgggaaccctggaattgaactcgcctccaccctgcatggcaacctccccgctggaggctgccctcgtgggttgggcccccgaggtgacatttgtttcattaatgcaacgctcaggcactcaaacactgcttcacattctacagcgattccaaaagtgatttccacaatatgatttacatactagccgagtgtaaatttagaataatttggcctgaatgatccttactagaatagatggccacaagaaaagaatggtgaataaaagcagccttactcagaatctaagcaatttgctggcaaatacaagcagcatttccccagattataatttacactgtattaactgtcaagagcgcttttgagaaatatagataacaattcagatgcaatcgatagggagtgacagttgatttcaaagcttaatgcaagacaagaaagaaatgactggggcatcagctctggaagaataaatttgttttgtatttgatttttgtgttaaatttattactgccaagaagagctctctttcaataatattaagaacaagattgtgaaattgcaacatgttcgtctcccacagttttcacagcattgccaatataaaatgatgcccctgttcagtactatgtatagatcccattaaactgctgcagattcctctaactttgaatttccgcgccctgtacaggagccctcttaacccctctctgcactggcagggggctctgtttggaccctcaggtggaacgggccctcttctgggtgctgtcacaccctcctgtgagtctagggagaggacagtccctatgggaccagaggacgcttctgcttagttctgaagtggccttaacaataggcttatttctagaaatgcctacagttggctgtttctaagatcagagagttctgtgaaaacaaaaacttgaaaaaaacgtcaggctaaacctcaattgtttgattgagaagggttggtgtatccctgtcatagtcaatagaagctttttttttcgattctgtcaaaatgtccagtgtatataatcttagggtttcatgttcctctgtgcaataccacaagaaacttacttgacaagtaccagggaaaaaaaaaatttcccttttagcccaactctattatactccttattctctcccaccagctggggttgcctctccgcagccctgcacactcgaaaacccaccagcatggccagaaatgaaatgatgaaagttgccacagttcaaacttctccatacttctcacttatgacatgattgattttccttcagagtgctcaaacacaggattgtctcccttcttttttcactgtggaaacagctaatgtatacagcctcggcctgccagagaagggggaagcggctgacatgtagaagaacaactgaaatgaatacggatgaaatttgaaagtgcaattttccatctgtcaatcacctttcaaagggacccgttaaccaccaatcgggagaccctgggcgagggcgcccctgtttgcagctctccacgccaaaggccccttggcctcattaatcaagatattcactgctgatcaaagttttgcacaggtatcctgcactgacttggaatgctccaggaatattttattaggtttcttgagatgctattgataatttatattttgaattaaaacaaatggtctcctcttaaacagaatttgattaggtgacgacaaaatctatttctctcactctggtgatggtacgtggtggatcctttcccagagctgcctcagaaggaaatgtgaggtgctgtggcattaataatggatagtcaccccaacccttcctggccgcagcaccaagatgcctcgaaatacagccaattaaggtttatttaattattaaggttgaataaataacagcgaaacatgttaaaaatctttcagtttcagtcaatcataataaaaaattaatgagactggatagagagccataaaaactgatagactgcgatcgtgaattataaattggtattgattttttcctttgcaataacactctcaggtaatcgtacgttgtcgcatgtaaagtgcactctcctggttgagactaatattaactatcaaatatagatgagacggaggcatttatgacacttcagatatcacaaacaaaaagcaaaaaatacaatttgtggaataatagcagcactgaacagagaatcctagggtgtttatgggagctggccgggaccccactgagccatggatccataagacacagctacctcattcttctcctgccatttctcctctgatatgttaccttgttagtatcactaagaaaagcataaatattttttattatttgtgaggctcatcccgtcttgcttaatagacaggccacatggagttaaagccatattatatgacctggtgcagaagtgatcattcaaaaacccaaagcacatattttataccgcctggctttattaattctaagcccccaagaaatagcgggaggattttccagctttctgtttattgaagtaacgtggaaacaaataagacatttccctaggctagctcagataaagtggacaattactattggcattccgcatgtaaatatttaacacttcacagctagtttgcacctaaatacccattagatgttgctacaagcctggacaccatttcccagcagaactacatgggccgtcctgggcaatggttattggattagggcgaatacaaatctcattccaaatagcgctggaaggggacacgggctagaggagacgggatatacctgaatagggtggcttccttgagtgacacaaaccaactcctccaagaaaactcagacaaagccagtgtcggcgcagccaccgccgctggcccagctaattgataagccgcgttgcagttcgttagtggcgttgatcggatttcccttgtttgggggaagcatagaggagacatcatggacacaggccagctatgcacacatgtggctgcctgtctgagttcaatttccgcctcctttccactgtctggcctggaacaaacatcgagaggtgcaaggccaccatttttttaggatgcgagtgatccagtttacaccaataagtatggcccataagtcgactctttgcaaattctaaacacaatgcaactgcctctttaagtaactctgcttcttaaagatatactaaaagtattcttttaataagcaaaccgtagtcagagttaacaatgtggactttacctgcccactctgattttaagcacagctgctgaaggctttccttctgaattagaagttactctgccccttggctggcatttggaacttgaaagtgaatggactgggattactcttcccagagggtggctcttttatcctttaacttccccatgactaggaaatgccactgcccagaacccatgatctccccatggctgccctggatggaagaggccagacatggagggataggccctctgcatgggtctctcttgcaagaaagcaaatcccatggccatgaacacggggatccccagcctcccaccaaaccacaggcaattcacaccagcagctccttcctggacgcccttcctgtgcagacactacagactcttgaaagcaactttgttcacaacctctctggcctccagttatgctgctggaaaagtagatggccctgggaggtgacactccctcggaacagcagccactggacagggcacacgtttggtcaccctggctctcagagggaggtcatgggttctcactcacctggcctgggctgccatctttggagcagcagctaagccttaaaaatcagcctgagagcaactgtgacaaactctggaagtcaagcctggaaaacatacctgggaaggtggcccagtgaggctggtgtccgggcagcactgtgcatgctgggtgcctgcttgtaccccatccaagcctgcgaacccccatgctggccagggaccctctgtggcacaccgtcagccgccaaggccctggggtccccccagaacagcagcgcccacccctgggctcacagactctaagagcccttctcccaaccctttcctcgccgctctgacctctgcgctctggaaacaattactcctggaaggcctgtcaatatcattatttttacaagaaatcaatacgcctcacaaagttaatgggggattcaggcagggagcgtttacctcctcactgtcaggggctcgggctctgctcagcgccgatgacagatccgccgacaccagcagacagtaagcaacgcgtggagaggaggctggcactgcaggcaggcgtggaggccgtcagcagtgccgcgctaacgagcccgcccggggctggagcccactcggaccgccgggccaggggccatgtggggcagacaccccagagctctgcccaaatgaggcctgagtcccctctgtgaagggaatcggagccttcaattacttgacatgtgtcctgtaagcacagactgtacacatactcaagtcccttggccagtacggggcctgaaagaagagttaaccgcatctgttgtctttaacaaaagagactgcttctccttccctgcccaaccctaacacttacaaaattaaaaaccaagaaacagctatgtgtatgcacacacacacacaaatacatacaaatatacctgtatatatattcacaaaccaagtcagaagtaactacactgatgatcctaaaatccaaattggaagggtccgaagagccatcccccaccacagtttggcagatatacaccaaatctccatgaaaaatatctcaatacatcaattcaagtccctatttttcttatccgagatgccaggtgtacggattgtccacccagctcctacgctccctgctgtgggtccccccttcttttccccatcacctcccccagagccccaggtataggattaaaaattaaagttacaaagttgtccagggcacagaccttcagcacgctctagcccacactgagacagcaccctaaaatccttcctagacccccagcctccctgttcagcagcagtttctgtccgcaaacctggcctctgcatggtcacgtggtccaaggggagggttccaagcagctttactgctgccacagcctggcatatccactcctggggcacaggtgccagcagggccatggccgaagctgctaatgaaacgatttacccacacagagctcagcgcggaggctccggatccagcaccaaccaccagcacatcatgatgggtaccaccgcccactgcccactccaaacccccacacctgccttccaggtaactgcagggcccatggagaacggggtcattcctttataacagagcaaagcatgcctctgcccccacacggcacatggcagtgaccaagccccacagctgtgagggacctccagcccacgggtgggccagggccagaccaggagccatggtcccggagcacagggtaaggtcacagggatacttctcctggcctgacaggtgcagagacccacaggccttctcatcccacagccagctggatagaagcattgcagagccacagcccaagccttggcttagaggaccgtcctcagtttacccaacaggccctttctctctagaccctgtcctggctcctctctcactcctgctccacctccctctgctctgccccattcgccctcccctatccattctccaatcacttccctcttccatcccatttcagaaacccccatccccacccaggcccctgaagcttggaatagtgtccaaaaggccgccaagaaaaggcatccacctgcctcagctgctccagcctccttggtgggcacgggatgggaagaggggtgaggaggggctgggggctgctgctgggctcacggggcagggacagttagccgacctgtcattcagaaccgtgtatgccaaagcactgctatggaaaacagcatgaatgagatctcatagttgatatgggggaaatggtgacccctcactcctactccaagctgggaagcccaagcccaggtggactcccaagtgccctctcacccacagggaggccggttcggcagccgaagggagctttgccaacaaaggaacaactagagtgggcaaaggggtctccgcgaggcctcatggaggaaatgcatggctgcttcctccccagagcaacgcacggcccagcaagaacacgtgacctcagtcagatgtgcacacaaactcaacgcccgggtgtgcacgtccacctgcgtgggactccccgtgaaggaatgccactgaatgaagagggctcccgctaggacccacaggagcaactgccccaccaccaagtacaaaagttgggggaggtcctcgcgcaccaagaatttcacctaaactggctctttcctgcgcatggaatatcgccctccactcctggcctccaaggtagagggagaggcaagctggaccccggaaccctaggaagggccctgcggctcctctccccactatcaacagtgtggaatttacaccgggcctttacatccttaccaggcgcttcacagctttttaaggccttaatgcaaaccatatgcagagctgcctgctcaccaaggcctccagcagctgcctcctgattggctcctgcaggatgggaaatagaggtctcagaggggaaaaaacaacaaacagatctcttgtctacaaagcagaactcaaaacatttttcatgcattctcggcttctctaggagcagcaggctgtttaaaaaaatacctggcccaaattgagcatttgcttgacatgatggcaaagtgagtgctattttctgttatattgcccctattctacatcgacaagaatatattttttccctgttcccaactgatttcacagtagtgaactccgtttatgaattatctgacacatttcttgcaattcttctgacaacagtgctcagtggaaatttcaaggcccctctcttctgacaagtagaaatatcaatatttgaataaattgtggattttaaacttctcactctgatgcgccacagcaaggaagactgaattcttcttttactgggtctaatccccctgagcctcaggaagaaatctgtatgcagcgtttcattacaagaaagcagtactgagtgacatttgaaacacatctaagtcgacctgatgaagtttacttccttccaacaacaaatagcagctttgtatcattcccccttcttgggggaagagcagcacaactctggtgtctgagcaaaaaaccgaaatgttgattcacaaattgacagcccgatctttaaacaaatgtgtttcttggagggaaaacgcagctttgttcgagctaggcatttttctcttgcctgacagaagcattccgggcctgattagaagggccttgttagggtccgtctcagacactctgactccacgttttaacaagcatgcaaagaaaacagcataaagataacaaaacattgtcattaccatctccggtgactctgtgtgcctttaacacttgcacacattttctcctggtggcccccacacagttgcatgcactgggcagggcccaaggcttgctccagaggtccctaaatgagggactttctgcactcacagagctgatggactggcaggagcatgcaactccagcagcatcctcttcttttcttggatgaataaacatggatagtttattgctgaaaccatatgtgggcctgagcagtatgatgaatggcctgtattttccggggaacggccggcagagccgcctcctccaagcccagcctgacggtcctgaggctgcaacctcgagcacccccagagctatggttccctgaaatgtattccttgtaaaaaataaataacaagatacaagccagaggagaaacctgggaggtgctacgaatgctagatcaccaccggtgaggggcccaggggtctggctgtgagcctcagtttccccctctgtgggagggggtggcacccacccttcagagcaaatggaaggccccgtgccaaccctgcacacaggcaggactcggccaggccaggtgccatcttctcatcttctcatctaaatcccagactctcttccccaaaagctaagctgagtgtatccagccatatccttcattcactcatctcgcttctcatccgaatggaactccacctgaaaactctgcatggatgaccatggtctctcgtcctacctgtggatgcaagagcaaggcctggtggttcaagaacacccatcccattcacaaaacccactcatgcaatttggaagtatgagatcccaatgtaaaaatctgttggggtgaggggttcctcgaaggacctgaggccaggctggggccaggaaccaaagaggactccaggggacatgacgggcagaggggctgacctctcccctacccacctccctccagccctgcacccacatccagctttgaagaccgaggcggctgaggagggcaatcttgcacatttcagacaaagagcatctgtgattttcccttggcaggggcacggcgttgggcatcagtgctctgggcagccttgggagagggagactcccaggcctgcatcctaaggactggcctggggaaggtggggcacaggctggttcactggagcccagaggcgcatgcaaggtgctttcgaaaataccgttggccactcggaaccgcagggtggggaagccactccagcagtgagaatggcaggagagcaagcaaaatggccgaaaacaaagtgaatcccctgctgggcatgcagggcttggaacggggctggttcctcctctgagggtaggaaaggagaaggctaccccttcacctgagccctgggcagcaggggccacgggcacagaagacccactgtgcggccggtccatctgaaagcacggggcagggcgggcccatgctccacctttgccatggtagagccacctgcatgggagaccctgggaggctcctgcagaggcttcagctgccccggccactactcaccaggtgtcaggccccccaccttctccctgcacccaacgggtgtcatgagaagggaggctcagtgagcaataaaagaccctcagggtcccctagggcatcacatcaagtctgggaaagccagtggccagaggctgagagaacatgaggggcagggactgtatctatgcatctgtgaaaagagaacatgctttgcatggctgtgggacagagcccctgagccaagacacaaatgtgcttggcaaacccttgggcccttcaagagtttgctgctcctcactgtgtgaagaggtcaaggatgcccatccactggggcagtttcagcctcatggacagcactggggcagagggagggatgagggagaagaaactggacattcacttatctagacaacaaatggttctcagatgctgcaatggggcgctgggaactcagcaaaaggctctgtgatgtgaggcctcatttcaatacaagggcccaagacccagggcccagcccggagcaggaccccccaaaggatggctgggggttcctcttgttggcatctgggacaggaaagggggagcagtgagaaacctcaactcccaaagttactattactcaaaagtaaacacaaaaacactttctccagaagagttatgatttaaaacactcacccatgcatgcgcgcacacatgcacacacacacacacacacacacacacacacacacaaaaaagccaagacaagttgggtgttgctacgaagtgagtcggggagcccattcttgcggggtgtgacgtcccatgaagtttgttgtaacgagcgacagcccagacatcaatgctgggcgagcacagccgccgagagtgcgggaaagctgtgcccacagatggccaagcatgtggaggagagcacaatattttatttaaatatccaaatacgaacacattcccgcatggcaccaacagccgcctgaacacgcccgatgccggcttgtgctttttccgttttgtctagaaatttgggttgcactaaattctcagctgaatgaagatgagaaggggctggcagagggggtggctccagctctctgagaacctggctccttcccgggtggcagggagagatggcccctggggagacggggagggtgcactgcctcatgcccaaaccaccagcttctagttgagaaatcagaattttctctgcagaataaggaaaaagcattgtcaccatgattcacgtggagctggccacactcaggaaattcaatggggtcccacaggggctccgagggggaaggagagggcctgggacatgcccctccagccatcatggaacaggatgggcagggccggccctcactgctctctaacagtgaaaagccacatctccactttggaaaacacaggcatgtgagagcctgggggagagacgggcgggtgcactcaaagcctccctggcaggggtgagaccaccaggcccaggtgcaccacatgcccaccagctctgtgaccctggacaagccacggttcctcgtgagcctcaggctccgcaacttcaaaatgggaatgacagtctctctctgtccaccacctcatgctcagcaagaattaaatgagacaatgcctaggaaatgcttgaccagcccctgatctgccctggcatgtggactggattcaggacgggtgcagaaaacgacaccaagaatgattatccgtgcggggcatctcgtgttgtttccgaaattaggcacagcctagagaagcgtttgagagcagtggagttgaaggcactccaggaggctcagaggagcatgaaggccaggcttgttgcagtggcccaggtctccacagctcaggagccagcagggccagcgagaggctggatgcagggagtgtgaccccaaatctccagcaaagctcagggcctggccaccagggcccccaataatggacccttcgctgaggccattccctgacctctcagggctccggctcacgctcagcctcatgggccacaccagggacagaggccagcacagcccaagggaggcacagtgagcaggacgaaggtgctccctgggaaatggggaggagttcctgccatagcagaggagggcattcctgcaggggtgggaatgagggctagtgacccccaaagccacatccaggcctgagtttctaaaacatcagcaggaaaagaaatctagaattcccagaagaaaaagagatccattaataataagtacaatagatttgtaaagactaaacccataaacaaaaccggttacttgtcatgtattaaaagtgggacacaggccaggtgcagcagttcacgcctgtaattccagcacttgggaggccgaggcaggtggatcacctgaggtcaggagttcaaagaccagcttggccaacatggcgaaaccccatctctactaaaaatacaaaaattagctgggcgtggtggcacacgcctgtagtcccagctacttggaaggctgaggcagaagaaccacttgaacctgggacatcgcagttgcagtgagccaaattcacaccactgcactccagcctgagcgacagggcgagactccgtctcaaggaaaaaaaacaaaaaaagtggggcacatatcatatgcatattccacctcggcatttaattattacaatgataggtttttacttcaggaaaaccccactaggaaaataaaaaacaactaagtttaaaataaagacaagaaagccagacacaataatgtgcacctgaagtcccagctcctcatgaggcttgaagccaggagtttgaggctgcagtgagctatgactgtgcctctgaatggccactgcattccagcttgggcaccacagcaagaccctgcctcaaaaaaaaaaaaaaaaaaaaaaaaaaaactaaaaccaagctgagattatttgaattacaaatgggattttaccaaaagatttatttcagtaaagcaaaagtatcaggcttgctccctggtgatatttaaatataatttgacttctgtgagatacccctttagtggtctaggtttaccctctagcctcaagctcctcatctttaaaattaggtaaggaagctactaacagtagcagataaggtgtaattagtaaaatgataatcctactgctaataacaatcatgaactgtcctaccagaggacccagaatggggcaggtgccaggccaaccacttggtattgacttccttcaacccccatcagctctgctttgtagatgaggaacctgagacctggaagctggaaaagcctgcccctggtcacacagttaggaaggggcccaggtggccttccagcccctcactgcacccacaaaattgggggatgtgggattcactctcccacccagcattcctgaggccgagggctcccagcctggcatttttgagaagagctcaggcataggttctttgcgtactcatgtcacagcttagttcctcaatgacctaagcgggcagaggtgtccagctgggtccaggggccaagaccccacttctgtctcattctccatgccccacacatttcactgaagaagaaactgaggggagaagtcaagaagtcaagttttcacaaggcctcatgtttaatgtaacttaggagaaaagctaagaaaaaaattagatctggaggaagatcagaaatcaaagtggaccaccagactaaagaggatcggggagcgttgagaaagtaatggagcttggagctgccatttctgcttccctcagcatcaccaggcctgccctcctccgcaccaccaacctgcggtttaggccagacggaaccctgtgtgttcgcatggttgtttaacgatgatcagggccctgccctacccccctccccagctccctgccccaggggcctacaggtcagagccatcaggagtgaagcccagatgcgcctacacatctgtgtgcacatgcaggtgtgatttcatgtctgtccttgctggaatctgggacctgaggctacaacggcaggggtggaatcaggggagactcttggtttactcatagtgagatctgctcatctgcttagccctcaaactccagtccagtgttattttttaatccctgaaacgtggcatgtagcagagtccttgccccctgcagcagtcaataaacacttgagctgtgctctggaggaggctagagaggacttccccagccgggcttaccaagggcaagggtacatcaggcacccgcccatggaagcccagcctgggcacagtgggaaggggacccagccatgactgagactctctctgtccccgaggtgcttggggacagtggggagggcgagtacgcaggtgaccaaacacaacgcagaccaagccatgagttctgggagaagggctgcttgaaatccaagatggcaattaaaccacatgggcagcagggtctctgtgactcggaacatatcactggaaaagcaacattggagctgagcctggaagttggggttccagattctgacaagcagatacggagggaaggctgtccaggtggagggaacagtggaggcggaggctgggaggggtctggcccagcaggcagtggagtgtgataacagccacagggaataaggctggggaaggtgacgaggccagagatagcgagcttctctcttcatccaagagacccactcacggagcctggggtacattctagtagcacaggccacctgtgctgaaaggggccaacaactttcactgtgctctgaccaagggcaccccaggggccagcttaggagcagacttagaaagcacagccctgccccaggcgttgcccttggtaagcctgactggggaagtcctctccagcctcctccagagcacagctcaagtgtttattgactgctgcagggggcaaggactctgctaagtgccaggtttcagggatttaaaaataacactggactggggtttgatggctaagcagatgagcaggtctcactatatgtaaaccaagagtctccttcctggtggcccccatgtctctgctccctgagggcagggggagctctgtttgggttcgccaccatgagccaggagtctgcccagtgccgggcacctgtagatgccccagagatgccgcttaatcaatcagacagaacagcacaagagagaaagccgcccgcccacaagcccaccccgctgtgcagtctagggcgagtatctccaggagggccataaacccgccccactgtgcggtctagggccagtatctccaggagggccacaaacccgccccgctgtgcggtctagggcgagtatctccaggagggccacaaacccgccccactgtgcggtctagggccagtatctccaggagggccacaaacccgccccgctgtgcagtctagggcgagtatctccaggagggccacaaacccgccccactgtgcggtctagggccagtatctccaggagggccacaaacccgccccgctgtgcagtctagggcgagtatctccaggagggccacaaacccgccccgctgtgcggtctagggccagtatctccaggagggccacaaacccgccccgctgtgcggtctagggcgaatatctgcaggagggccacaaacccaccccgctgtgtgatctagggcgaatatctgcaggaaggggctgtctcctgcaccaagggcgggggcggcacagcatacctggagcgactctgggttaatgggtggagcattaagagctcctcctgacccagctggggcgctagcatggacaccactgatgggatagaatttcaaccagcctttctggaacctgactcattttatagaagaaaaaggaacgaatagaaaggaagacatgactccagtggtaaaaccccgaagaatcttggaaagccacgcttttgaaagcacccagcccaggacatctcacatgaaagttgtggccccgcactctgtgtgtggcagcaggtgcgctgccagatgagaagggcccagtaaccatgaaggaccatgatggctggtggtgcccagtggagtgatcactattgtctggggcagaagggggcaccagggtgggtgcagaggtctctgggcctagagtcagcagctggcagtcctagctctcctgcctgaggtttggtttcctcatcctcaaaatggggatcccagtgcccaccagaaggctgttgtgagcctgaggtgccctcggtggtctggggacagggaggggtagcctggaagaagctgccttgtgatctctgggcaggaccaaagaagctccagcatagacagagtcagcctcatcggctaaaagtacacaaagcaaacaagagaaaacagcgagtttgagcgggaaccaactgggaatcacgttctggaaaaagaaatcactttcgatggtcaggaagaatgtgctggatcgcagtgggcaaggggtccctgaagcagctttctccagctgggcacgactgacggcgggggtggtcactgcagtggggccatcctgggcaccgcagggtgttagcagcatcctcagtctcaactcactttgcctggaataaaccctccccgcattggtcacaaccaaaaaggcctctggatgttgtcagatgtcacctgggggaaaagtcaccccaggccaagaacccctgcagacaatcaccaagctgccggcgtcccctgggcagaggatacccccgaccatggggcctcaccgatccctgtggaggtttggccccaggcccaaggaccacaagaaagggcagcagcctccactaggccaccggctcctgtttcaaaggtctctgtgtccatgccacctttgcagccagcccacggcagcctgagtgacaggcctggctacctcaacagaggaggatgtctgcgtgaagaactgctgcccgtcctgagcacctggcctgaagagaggacccctgggggttgtcccagcacagaaggtgacagccacagactgagacccattaaagaactgggatgtggctggcatctggggatatgggcatcagcaccctcaaatgctgaggcctcaaacacgaaggccgccctgtcctcctgagccccacacctgccgtcccatcccagctcactagccagccacatccgcccaagcctggcccgccccctgtctcttgctcatccctgtgtgtcacatgccattgacccgctgtcccctgcagacggacatgagggcagaaccggtcagcttgttatgggggtggccccacgtcccagagtagcataggctcatgagggctgagccaaagctccctgaatccattgggaggccttgaggggtgaccaggctcatgccagccctgcctcgaattcccctgctgtagacataagttctggatgctccattctttgcccaacaagagcagagtcctctctctccctccagccatggcccccgagccctcctcaattatccgaagtgggctgattcccactcacaacgaggccctgcccagagtgggatgcatccccccagccaaggaacagaggatggagatagtgtcccaagacagcatagcaggtcagcagcagggccaggggccaagccaggccacacaggccccagtgcccactgtgtgggaagccacaccccacccgtgccccccggccctcagcacctactgtttgtgcataaatacaaactctgtagggtggggggtgccttggtcctccctataccccatagcccctggagggcaggtctgggtttaggggagctttgtaaacatttcatggggtgaaactgaacttcatggggacagaaaggcgtgcaccacactctgctctcttcccggctctcgccgtccttgcacggcaggctgtggtctgcgtacctacagcgatgccctgcatgatgccagccacaaggacccttccctaggcaaacgaacccctgcgtcacggactgtgaaccccgactgcagccctcctgaccctgatgtggggctgggggctgacgggaccacccagagctgcccacatcttacacaacccagcacacagccagggggctgaagaaaggaaggtggttggggctcctctctgcagaccagaggcatggaaggagggttccagatgggctcagggtgaggcccccccgaccatgtgaccagtcggagctggtcagcacccagaccttccccatctcctctttcaggccctggagtcagctgtgtgcctgcccctctccgggtctcggcttctctctctatagaatgggctgggtgaggggtaacccgaatatctccactcttgcgccaaactgtcagaatggcataagaacatcctgttgataacggcagcaacaatcatgtgttactgttgttattattttgaaccgcagcagcaggccacagtccacaagccacgtgccttccatagtgacttcatgaagcactcggtgacagaagctgctcaacagtagaatcattttgcaatagaaaaagtgtgatgccctcctcaggtctaattactgtaagcggggatgatgtagacactcagtaaaacatactgcagcctcagacaatcttaaaaagaagaacaaagctggaactcacactgcctgatttcaaaccttactacaaagctacagtaaccaaaacagtgtggtgctggcataaagacagacatacagaccaatgggacagaatggagagcccaggagtaaaccctcacacatatggtgaagagatttcaacaaaggtgctaaggccactgaacagggagtgggtggtcttttcaataaatggtgctgggaaagctggactccgacatgcaaaagagtaaaattggacccttacacatatataacaacatatacaaaaattaactccaaatggatcaaagacctaaaagtgagacccaaaaccataaaactcttaaaagaaaacagagggcaaagatgtcgcaacattggatttgatttcttggctacggcaccaaagacaaagtcagcaaaagaaaaaaaatagacaatttggacttcatgaaaattcaaaagttttgtacatcaaaagattccatcaaccaagtgaaatggcaagtcacagaatggaataaactacttgcaaaccaagtatctataagggattttatccagaatatagagagaactcctaaacctcaacaccaacgaaatgattcaaaaatggacaaaggacctggaatagccgtttgcccaaagaagacatacaaatggccgatgtatgtcttcttgggaagatgctcagcccctctcaaagagggaaatgcaaatccaagccacactgagatagagctcctcacccattaggatggctgctatcagaaaacagaaaacaggccaggcgcagaggctcatgcctgtaatctcagcacttcgggaggccaaggcaggtggatcacctgaggtcaagagatcgagaacagcctggccaacatggtgaaaccccatctctgctaaaaatacaaacattagccaggcgtgatggtacgtacctgtaatcccagctattcaggagactgaggcaggagaatcacttgaacccgggaagtggaggttgcagggagccaagctcaagccacttcactccagcctgggcaacagagtgagactccgtctcaaacaacaacaacaacaaaaaaaaaaaaaaacaaaaaacaaaaaacagaaaataggtactggtgaggatggagaaactggaacccttgagcaccccactgtgggtgtggatgagaaacagtgcgggccctgtggaaaatagtatggcagctcctgaaataattaaaaatagaactaccctatgattcagcaatcccacatctccgtgtatacacaagagaattgcaagccaggttttaaagaggtatctgtgtttctttcttttttcttgagacataggttctgctctgttgcccgagctagagtgccgtagcatgatcatggctcactgtagcctcgactgcctggcctcaagcaatcctcctgcctcagcctcttgagtagctgtgaccacaggcatgtgccaccacgcctggctaatttaaaaaaaaaatttgtgaagatggaggtctcactatgttgcttaggctggtctcaaactccacggctcaagtgatcctcctacctcccgaagcgccgagatgacaggcatgagctacggcacccggcctgaagagtccttgcacgtccgtgttcacagcagcattactcacaactgctaaaatgtggaagccacccaagtatccatcaatgggtgaatggataagcaaaatgtggtgtgtgtgtgcacgcgtgtgtgtgtgtgtgtgtgcgtgtgtacggttggtgcaaaagtaattgcagtttttgccattgaaagtaatgggccaggcgcagtggctcacacctgtaatcccagcactttgggaggctgaggcgggcagatcacctgagaatgatgcacagagcctggctggtgtgagggtgggggtgcaaggagaatggggtggggggcttcaaggcgtggctgggatttgggcaagtggagctggcaccacagaccctgggctgaaactcttaggacaatgtgcggtacacagaccactcaggagttcgagaccaggctggccaacatagtgagacccccgtttctactaaaaatacaaaaaattagcaaggcgtggtggtgcatgcctgtaatcccagctactgaagaggctgaggcaggagaatcacttggacccgggaggcagaggttacagtgagccaagatcgtaccactgcactccagcctgggtggcagagcaagactccatctcaaaaaaaaaaaaaaaagaaagaaagaaagaaagtaatggtgtgatgcttacacaacattctgaatgtacttaatgcactgaactatatacttgaaaatggttacaatgataaattttatgttatatatatttaccacactaagaaaattggaaaaaaaaataaaaacaaaaaacatgttccaatcacgctgaactgatgtttccaggaggtaaacatccaacacaaagcccacgcaccacgtagctccttccgctggtctagtgcacgagaattctcaaaagcccaccatgaagaatccaggacagttaggaaagcagcctgtgcctcactgccactgggggccagtgaagatctgtggaatccctaaactggaatttgtgcattaatagccctgatacctttagagcatcttgaacaagaaacacaaagtgggcaaagtgtcacactgaaatgctgagagacatctgaggacagggggcgtgactggcaaaactgcactgtttttaactgagaaggatttcagttccttatgaagacaccttcactgcttcccgaggtgctgtgtcgcagccattcattcattcattcattcattcataatgaataccgagagcatctgacgggtgccagtcccgtgccaggcaggacgagaatggcggaacgcacaccttggcgccagcccgcaagagcatggactccagtggggaagggagtcccccttcctgagaccctgtggagggactgtgcaaggcctagagagtgatgcacacggcctggctggtgtgaaggtgggggtgcagggagaacaggggaggcttcaaggtgtggctgggatttggacaggtggagctggcaccacacacacagaccctgggctgaaactcttaggacaatccgcggtgcatggaccactcagcccaaagcagtgaaacctcgtgtcaccccaaagctccacagggaagcatctcagggcttggggggtggagacagcctgtggccaagtggccagggagggggctgggcagactggagcacccactggcaccttcaagggcggctgggacaggcttactcactacccaaaaaaggtgtggaataaacaaaagaaaaacaaacatgggagaatggaaagagggtgctccaggaaacgaggatgcccctccgctggagggggtgtgcctcactggaggacacacatagccaaggccctgcatgtcagagtgtggaaccagcaggagccacggccagcactgcccaccccacgtggaggcttcaggtgtgctcagcgttccccgaaacggggctccagagcctgctcccgggggacaggctgcaaggtgggcaaggtgccgattcagggcttcttgggactctgaacaggtgggcatcctccaccgtggccccaggaaccgctgctcccttgggcagtgccattggccacgagaggaagtcaggcgcatcttttttggcttgttttgtttttagcaaacctaaaagcctgaagagccactgccagtccattcagttgcttattgcctgagaagcgacacaaccgaccaggctcccgggcgatggggacaaataaaaatgcccgttcccattctgttctcagctgcacaaaccagcacatggccaggaggaaccagcaccagcatgacgtgggcttggtccccgtggtggccattctggtttcacatatttttaagtgaaaagtggatgcaacatatttctaaattcaattaaatacataaaaagttaatttcccataaataccctcagagagcaacaagatctatataccatcttcatgcaattgtaatcaattcaaccataatctccccttacaaaaggcacagaaagccttggggcccaggacacgtggttccatctactaagccaacacgtggccccaccagagagactccaacagcgcctgcaggtggctgcttagcctgcaaacacaccctggcaacgacggggagctcaccccttctcgggcagccatgcctcctatgctgacatctcccaccctgaacccatgcctctggaatgtgaggatcttgcatttcttcatagtcgtcttcttcctttcggccctccctctgccctttgagtctacctgccctgagatgtcccctgaggacagttgggtcccttatccactgggttagggctcctccctgctcagttatttgaggagagtctgctatgtaagcagctctcctggccatcccacgtctgtgcacgatgctcccctcctctgccctgctcagttaggacacagggatggggaggtggagtctccacaggcaaactctatttccaccccaccgtctgcatgttgtcaagtgctcggtggagagcttgagattcccagcccaggactggtgctggcttctccaggcccccactgtctgctaccagaaatggggagaagactggcagaaatgagatctaacaggaaccgttactattccgagcaatgccacttgccctgcaaactcaagacgtccagccgagtaaagaacagttcggtcagcctcatgcgaaaacgactcaggcagaaacctgacagacgtgtgaacagacgtgtgaagcattgtaagctttaaaagcacgtttacgatcataaaaataactgatgcccattgtagaaacttttgaaaatacctaaaagtatacaaaaaatataaaaattaattataaactcgccagccagagctaaccacaattattagtctgattatttcctcacaatcccatttctgcatatttaaacaaaactgggatcatccagtacacacatttttatatcatttttgcctaattttacgtggtaagaacgtttccattgtatgcactaatccgccttctccaggattctagtacagggaccttccataatttatttcacagctccctgttgtggggcagaaagcttcctaaactttattgtgaaaacaccacaatgcagtcttcattcataaattatctgcatttctaggtgcttaggagatattcctagacagagaatgtggattctgtgtgcaaactaaggccctcaccgtctgctaccagaaacctcccacaggacattttggcaattgcttcctgggaggcccatcttcgcttactccactaggtcagagaaggccaggccattgcatgttttctgttctgagagtcagtttacggctgaccattgagatgagcactgcaataatcactgtctccactggcaaatcctgtgatgtgctatcaggagaacgctgctgacacggccatgccagtctgttctgtgaacttttccatatctttcattcatttgataatccattagcagttagattttgtcacatttgtggcaatattagtaaaacggccagagtggtctggagtgtggggagtccttgcaggtgatccccatgaggttacaaacaaggagaccctcgggctgtgctcagacatttcagaatgatggagtttcattccttgataggactcgatgtagcataaactcagccagagtagagtgggaagtaatctggacatatccgatgctatgtcaacatttgtaggaggatggtcttctttattttttatctttatttttatttatttatttattttgagacagggtctggctttgtcacccaggctggagtacagtggtgcgatctcagttcactgcaacctgcacctcccgggctcaagccatcctccaacctcagcctcccaagtagctggaactacaggcacctgccacccacacccaggtaatttttgtaatttttatagatacagggtttcaccatgttgcccaggttggtttcaaactcctgagctcaagcaatccgcccacctcagcctcccaaagtgctagaattacagacgtgagccaccatgcccggccaggaggatggccttcttaataatgccttggaaagccttgttgacacactgctgatagatattaagatggaaatagaatttggagcaaggacattcaaatcagtaatgcgtctggatgggcagaccctagacccagtccaaggaggcccccatgtcagacgtggagccccatgctttgtccacgagagagggccacagagcaccatggtgccatcaaggtggcatcctcaaaatgcacacacaagtgattgttctgcacccaactctgagagttactaagttgccacagaaattagagaccacagaactatggtgtgatgtttgttttaggtgtcaacatgactagattaaggaatacttagagaactggtcaaacatcatttctgggtgtgtctgtgagggtgtttccagaggagcttggggtgtgagtcggagcacactgggtagggaaggtccaccctcaatgtgggtgggtgccatcattggttaggggcccggagagaacaaaaacagaggaaaggtgagtgtctccctctgtctgccggagctgggactcttcctcccctgtccctggacatcagaacttcaggctccaggcctttgcactctgggattcacaccagcagtcccgtaggtgctcaggccttcgccctcagattgaggattacaccatcaacttctacagttctgaggccttcagacttggcctgagccgtgataccagcatcccagggtctccagcttgcaggcaatctgtcatgggacttctcagcctcataatcctgtgagccaattcccttaacaaatccccctctcatatatctatatctatatctgtctatatctatctctatattaacaaatccccctctcatatacctatatctatacctgtctatatctatctctatactaacaaatccccctctcatatatctgtatctatatctgtctatgtctatctctatattaacaaatccccctctcatatatctatatctgtctatatctatctctatattaacaaatccccctctcatatacctatatctatacctgtctatatctatctctatattaacaaatccccctctcatatatctatatctatatctgtctatatctatctctatattaacaaatccccctctcatatatctatatctatacctgtctatatctatctctatattaacaaatccccctctcatatatctgtatctgtctatatctatctctatattaacaaatccccctctcatatacctatatctatacctgtctatatctatctctatattaacaaatccccctctcatatatctatatctgtatctgtctatatctatctctatattaacaaatccccctctcatatacctatatctgtctatatctatctctatattaacaaatccccctctcatatatctatatctatctttatattaacaaatccccctctcatatatctatatctctacattaacaaatccccctctcatatacctatatctgtctatatctatctctatattaacaaatccccccatatatctgtatctatatctgtctatatctatctctatattaacaaatccccctctcatatacctatatctgtatctgtctatatctatctctatatctcctattggttctgtctttctggaaaactctgactaatacctatgggtttgtggtttttttgccctggacaggatagcacttaaagagaagcagaaaagcaattgagaacccaatgtcttggggatactttttggtgtaagtgcattgtagacacagccctttaaggggtctaacatttttctgggatccaagtgcatcttggtaccatcccctcaagatcaagaagagagcctgagtgtggcaacaagactctgccatgcacgctgaggatcctgatggccaaagtggactccagaattacacacaatatgccccagaagtgatgaatgcactcaggtcatctctgagaactgggcccttaaatgacatatagcaagtagccccaacagttgacttccctgtctggggccgcgactgtgagcgccctgagggcaaggccatggtctgattctaacttgctcttgatgtctgccctgatgcctgacacaggccaacaatcagaagtatgctctgaattttataaaacgaagtcttctcattctttctctattggtcttggtaacagcaccaatttgagcccactggttatttcaacttaaactgttgctatcatgaagcaatgcctgctgacctcaagctccctgagcgaccctgtgtcctattcttcccaacccagtagaccaggcaggagggaccctacagggcctagctgggtatctggagtgccctggggtcctggtacccaaatgtctccatacacactcctggcccaagatgtgcagatgttttcagaggtgaccaagcctctgaacctggcggttctctgtggccacaggctatgtccagccaccctggagagctaggccagccagaggaagaagagagggcttggtccgctctctccttatctctcccagaggagcagaggtgagggcaatgaaggacaaagcgggccactctggcaggcagttacacacacggccagggtagaagcaccccctccacacctggaagtcatttgactttctaagcaacctcttgggaagaaggtattattgttgctttcataactgtaacggataaaatgctaagacagaggccttcgtggataacccacttctcacattggggcattcattcctcaagctgcctagcctgggaggcaatccctggcagccagccctcacccctgcaacaaggcgacaagggccacttgcttggcatgtggcaaagggtgcccctgtacatggcagagcggccgccgatctgagagtgccactctgtgaccaatggctccctctcagaaaggtgaaaggagtgctctcaaagcttatatttatttgtcaccttcaaagttgattcccattgcctaaaagatcaatacatcaccatttccaagggcaggacagacagtgatcaggatggtgagcagggcagggggcacatggtgtatgtagctccacgtgcctgtgatgccatccctggaaaaatacttcttgccacgcaattttttttcctgcacattttgcatttcaaaccacagaaacaaactaaaatgtgggaaaccatcacttgttcaacaccacgaagttacagaaggtgcacaactcgctgacagagccggcatgtgaccaggcaggaggccgagcttcggaacaattaaaaccagccgtcatcctcaaacaacccagccttcacctataaccaaggcaaacaaacttcaaccatttcttttttttccttttttttttttttttttcaatttcagaatgctcagtgtagcagcggggctgggatgcatttcactcttgactgggtacagtgagattgctaatcaggattacttgattcagtcaacactgatttcaataaaaagacccaaaaattatcataaatatagagaaagtgcgggcggcagtgacaggtgattaaaatctcattcgcttggaatcagcctgattgatggacgtggaggagggtcagtcctgattccgccacggtgatcatatctgcctctctgcagccacttcggagcacacacgcacacacgtgcacccacacacacacatacgggcaccaagtagatccacaaacagcaaaccgcaggggatgcggcctctcgaaaaacaggctttgaataataactgctgcgaattatgcctggcaaggggtaaggggagctaatttggcaccagacgagctgggacgccccgagtatggggaggaccagtgccgaatagaaacatttgttgaaaactcagactggcagtgtgcatttagaaagatttcaagggctcaaaccagcctgcacagcagtatagatggcattcgattagagctaaagtgattccttgaaacacaaaagaaggaaaaaggatcttgaagccctcggaagccgctgaggctcaagtggtcccttgagctggaagggaatcccgctcccagcccagcagcctctgcaggcgggtgcccgtgcaagaggcacaagcgtggctgaatgtttcctaaggccccataccaaccttcactcgatgtcctctattcctttcatcagccagaccacaggggggctcctctgtgatctacagcagggtcagagcccacccagagtgagtaaggccctgcagggcaggccaggcacccccaacctacctcctcccagtactgcccccagtgccaaacactgggcctcagcctggccacgctgggcgccagcacctgcctctcccctcctctctgctcagccccactctctctcaactccccctccagcagcttcacggtcccagagagaaccatccgggacacagaccaaggccctctgctcctgcgccctgtccaggctgggcttgccagatttagcaaataaaaatacagggcacccagttaaatgtgaatttcggagaagcaatgtccctgcttctccaaaattcacatttagctgagcatcttgtattttgccaggcaagcttaaccctgactgaacatggcacctcagggcctagtattaatatcccccctctccagcctcctcttagtccttgatccattgcctgaagacatgcccctccctccacccttgaagaccccagagaccctccccacttccaggcagcgacatcacgctccccagacactcagagcaaggccccccaccccatccacattcactgtgggtccagcgggtactgaggagatcctgggctccatcttcactagcaacttggggtcaggcgtcatctgtcccttgcacatagtaggtgcccaataaataccagtggctctaactaaggcacctcgccgcacacagggacctgcaggtgctccttcccgggtggctcccccaggtccccctcctgcttcctcatctcagggcccatgtaaatgagtcgctctgggtaattgtttgactattagctcatttgcatactattaagtggcatgcttagcggtggggctgggagtttctaagttcactccccctcatttccctccaatttccagcccattccctcacaagctcctgctccagttgggaagaggagactgaacaaaggccagcaactccatgggcgccaaattagctgccaggtgacaggcacgatttccacatttggatctgagctgctccacccacagtcaggcctgcagtcacagacaaaggtcagtgctcaaagaagcccaaattcattctctgtgcagagctgggccctcgggaaacttctagaaccttctagagccctctggcacactctagaacccaaagcattctgggttgtcaggatgaggtctggatcaggaagatggtgagctcaccttgaacaagggcctactgtgtacctggtggtgatctaactagatcaataacaagtaatgtttaagataagtacatcccaaatatctcatgggatgtactcatcctaacacattagctgtagctggtggtccggttccctaagaaccggaccctctagtggatcatgatgtggatgcattttcctgtctccactccagccaaatgtagccacattgtgagctgcttctcacaggggagattcttgaaggtcccactcgcacctgtcacagcagccactgtggcccatggctgtcccagcacccagagtggagttgggaaccaggcttggatctgcccagtgactggcggcctgggaccagggtggccctgccttcccagctctccggtggggaaggtgggatcctgtcctgcctggctccagcagaaggacccagtgccatcattctgaccttccttctgtgctgcaaactcccaccaacgggacctccttgaggacagagcagctgccaattcctgtgtgaccccaaccctaagaacaagcctcccaactcagcgccaactgcggagcaccaagcacccatatgtaaggcatggggttagatacatgcaccccacaaggctggcgggcagcaggcggtgcctcctgatcagggctgctcatccagagcccagagcctgggcgtccagggcacagacagctctcagccaccattcctcctacgtcagcactggggagtccagaggccaaccccgcagtcactgctgcacagaaacaaagactaagcccatctggagcagagcttggccctgccacaccggggcctcaggcaaagccaagggcatagaatgtgggctggggacaggagaggccaagacaccaagagcggccacgatcagccacaggcaggcatggacaaaggaatggccggggaaggcagagcccaagcagccctggagcaccagggcccctcctccaccatcatccatcggggggcttcctgaagctgccccccccgcccaacaatgcagctggtgcccagggctgcgagtcaacggcggcaggtgcagatggttctgggggactgtgcagagcagccacatcaattacaattgctgcaattattaaattatagaattatatagaattccatttatggaatgatagaaaacattgcgactgactctcacacccacctgacagttataaagtcccctcccttcacctgcaaggtctcagtcctctaaaagtcaggcccagggaaggtgaggactggtttgaggtcccctggcttctaccaggtggaaccaggacataacccctgcccagcccaccaccccctcctgtctctggctcagagtcatcctgaggggcaggaaggccagtgcatctctctctggggatgatgccaaaggctgagaggacagagcacaggagacaggctgcccaggccccggcttgctgagggatgggagaggcccacgggaagtagggctggcctgtcaggggaccctcggcctgtgtgaggacccaagggctatgcaggggaccctcagctgtgtggggaaccaggggctgtggggggaccctcagctatgtggggaaccaggggctatgggggaccctcggtctgtgtggggaaccaggggttatggcaggggaccctcagctgtggggggaccagaggctgtgtaggggacctgcagcctgtgtggggaactaggagctgtggggggaccctcagctgtgtggggacccagggggctatggggggaccctcagctgtgtggggacccagggggctgtggggggaccctcagctgtgtggggacccaggggactgtgggggctccaaggcagggaagcactgctacaaccaagtcccccacagggaacctcagacacgaacaaatcaaggcaggagggccatgctttggccaagagagttcctaattcaacagaagcttttgcctccttgatgacctgggctccacggatcggacgtgtgagaacaaccctcagtcacccctcccgcgacagtgcatctcctacgtgatgcatgccgagtgccaggcgccagccagcttcattcgggccccaagggctgcagtgaggaggagcccagagaatccccaaaagctggactggctgtctgaaagtgggacagcaatcgtgccgggaacaagatccctgagtctacaactgggatcagatgggtgggacaaccacaggccgtagggggccgggtcgacaagggaaagagcctggggttccggggcgcacagagacccctagtttgagcagagggcaggatgatttagacagcactgcccagctaaaggacagaggctcaggacaccccaaatctagacaagccttccctgggtgaccctgagtgggaatacgatccttgagaacagagaggccccagggacctcaggtgggaaaggctagtggtgacagcaagaaaaaggagcaggctttgtcacatgctcctgccctcaagacacaccagcgctgccccaagcccacacaacctgtgggggtctgcaagcccacctgtccatccgcacattcccattcaggcagctacgcctgatcacaagggcttacgagctcagcctgcccacaactgaggccatgggaaagagaaccactgtccagtccccgccccgtgcccacgcagcaccagagacaccgctggggactgcaggtcacatctgtgttcctcactgatacctcatctcctcaccatggcccacccccaggccaacctgtcccgggctgtccctggcagccaaggggagcagctctaaaggagttcaagtcctctccgagccacactttccccaagacgtcactgtgcttgacaactgctgaggaattcccggggaaacattccatcccagcatcttataatattccatccccctaaaaggtgaagcatgatgaaaactcacattttttctaaataatggtattttcttttaagtaggcacatgggtacactttcacaaaatgcattagtcaaaatacttcgaaatggtacaagctattttctggcatgttcattgacatcacatacacaatcatactccacaaccacgcaaactgtaaagagaccaccatgtccttcagcagcacctggcaggagactctcttctgctcctgctgagtttttgtgcgaggctagccccccgcatgaggcttcatcagtgagcccctctggtacacagactgctctgttctagaacggaaattagtgggtttttttaaagttcatggcggggccgggtgcaatggctctcatctatagtcccagcactttggaaggccaagggaggcagatcacttgagctcaggagttcaacaccagcctgggcaacatggcaaaaccccatctctatttaaaaaaaaaaaaaaaaaagacaaaaattagccaggcatggtggtgcacacctgtagtccctgctaccaggaggctgaggtgggaacattgcttgagcccaggaggtccaggctgcagggagctgtgattgtgccactgtacccagcctgggtggcagagtgagaccctgtctcgaaaataaaataaataaaagtaaaaaaatagaagttcatgagggaaaagaagaaaacaatttagcatttttgatgggcagcccaggcaggcacgagcagaacgctcctcctccttggctgttgtccacgagaaaggtgcggctgcaaccgacgagcactgccttgtgtcctgggacctggcctgtgctccaagcaagtcaaggccattgagtcaataggggcaagatgttacatgggggtcttcgtggcccataaaaccaacctggggaaagagaacagaactttggggcagaaccaggaagaacccactgcaggccttctggatccagtcagactgccaaggccaaagtgaccagttggcatctgatgactcaattatcccaactccatcctttaaacagctcctagaacctctgacctgtcccaaacaaataaatgagggctcttgatgtctttctttttcagaggaaacaccaaaccactccactgcacaaaataatctgaatctcaagttcattacatttcagaagcaaacaatcccacccacccagaaggtgcccctgtgtgtcctgtgcgtcagtggcacacacagccttcaacttctaagacctgcctggagagcagagcagtggcagccaaactgtgttcgagcacactctgggggcagtggtgtcagtgctggctggcagccctggccctccttcctgccctccaccctcccctctcccaggtcaaaagtatcctgccacttctcaagggactgacaaatacgaaggacagggtgaaatctgaaaacagcatgatcatgccagtctacataagaaactccagacttcatcaaaaatcaaaccaaccaacaatcacattaaaagttcccactgccatcagctgaaacacgtgaccgttcctctgggcaatgttctgactatgcagatctcatttaaagacttggggtttttgtttttgttttttgttttggttctgttttctttgttttgccaagcgtggtgaggaaacagttcaagggaaattcaaacgacagctgcccactctgccacaacgtctgcgtctcctcctaatgccaccccggggccatcattctgctcctctgctatgcagacttcgtcagactggacactcttcccatgcttctcagcgatcaatggagttagaattcccacgtggaaccagagatcccagagtcaatggcaaacttctgtcacacgcaagctaataccggacttcgtcttaagttatttatagcccaggaaaatggaaccgaccttacggttgcacttaggagcaaaatctttctagataccacgtcctgaggacttacgaggagttatgctaagacctgtgagagcctctagtgctagagggtcccccatgcccctgtggcccacgtccccctctagaggtaccattcctggcagcttcccctctgacggggatgtatcagcctcttttccgagtacacaaccccgagggcccactggtgtccaacaggcaaacagggcacaatggcgtgagctcacctgtgggtcagactcaagcccctgcccaggcacacatctgcactgccatgtcacacacacaaaccagctgcttccctgcacaggcatcctgggctctgtgcgtgcccacagctgtaggtcaggagcagccttcccctcctcctcctcaccttgcaggccctaccctctgacctgtcctcacaaaaccccacgcatttcaagaaagccatgagagaaggggctcatccagctcagccctcaaagctcaaaggcagagccccctagccctctcaatgtgagccccctgggcctcctgggctagtccaggatggggtcttcaccacctgcccagccccaggcacagaaggggaaagaataaaggacccgacagcctggtttcaaatcccagctataccccttcccagctgagtgacctcaaacaagcttctcaatgtccccaaatctgaggaaatgacagtcattataataagagggctgtgagaggcataccttgtaaagagccccatgcttagtagcacttaaaaccatgagctgctgttatctctactgtgggcgggtgaggaatgatggcatctgcccctgccctcctcctcacacctgctaggaagtagggggctggcagaggaagagcagaggtggcctcaggagttctccaggccccctccccacccaggggtggcccaggatgccaggggaaccgcgggggagtctgggcatgggaaggcagagggcaccgcccaccccggaaacctgtcaccagggctgccataaacatcccacactcgatcctcccatgttgggccacagcaaacaggactgcagcgtaaaaccaggtaggtccccggtcccccagcctcggactgcctggccgtggagcagtcccatgtctacaatgggacccaccccagcagtgagcaagacctgctcttagagcttcccaggtcccaggaacacgtgagggagagcccgcccactccctgaatctctcttggaaactcagtgacaacatgtgggaaaatgcgtttattttaaattaggaaagtaaaacatcctacctccatagtagattgagataaataaccactaaattcagcctgttggcaggcatcaagttcaagggacgaaagaaacccatgatgggcttagcgagacttagcaaggatatcagcttacagggcagcaaggggtgtcagatgagccgggctggagctccgcacccttgctcagaaacacaaggcctcaaagcaggtggacacgtgacagggacaacacaaatgtctgttctgccccggtcatcacaaaaggtgtgccaggcactgaacgcctggaggtggcccagcagcccttcttgaggccttgcttctaggaaacccaccacccggggacagtgccaagactaggccacagaggagaggtgctgggtgagcactgggcactgggagagaggagactcggccacagactccgggcaggccaaagggtcaggggggagccctccaggcccaaagcgctgggcactctggcggcggtggaggtgagcaggcagaggtggcagtgaggagatggccagggcagtgagcagcgctccatccccagggcctggaggccagagaaaggggcaaggcagaggcaggaacccctcaaggaggcagagcttggggacaggaccaggctggccttccagaaggcttcctgagtaatgcagtgccaggcctgggtggagctaccaaagaagggctctgcagaggccaaaactgccaagggcagacagcagccatttgcggggtcatcccagggccaggtgctgggtgagatcccaatccagacccacaagggatgacacagggagcaaagtgagctcacaggacagacacacgaggacttggcagttccttgggaatggagcccccccaccccatttaaaagcagtggcccaagctgttgacccctgtgtccccgcagccaggagaaacacctcctatcctcagggagccccgcctcacccactcagggcaccaggcctctctcagcatggacggctccctgcaggttcttagcactaactgattttcatttacaagagcttttaggaagataaaaattgtgcttaagttttgaaagatcatcgcagcttttgagtgattttaggacatttccccaacaagaaaacatctttctagggtggtccaggacccttctttagccctgtggacctgcttcccaagacagtaatataagatgcattgacaaaaataaacccccaaaatcacaaaaacaagaagggtgctgaatactgacgctgggggaaaggcctacagttaggtaaatgccaaacaaaacaaaagcaaatcagtgtcaccactgtgttcacctacccagagcaccagccccagtggtcctgcaagagcgtcccacacgctgtagggacagctgtgcagccttcatgagctcagggacagtcaggtcaaacccaaacagcaaagcagacaactcgggccccggggcactggggaaaattggggactaccacgtccacacagggtgcattccagagatggcctctctgctcttttacgcatgccacgatcacatttatttcttctaaataacgcctgcctgtctgccagcgtggtgactgcattggaatgtaccatcagtaagatcttacttttaaatgaaatcaataaaaaattgtattaaatacttacaactgacttttaaaaaccaggacagactctcctcccatacaaatctaaattggggtgggagggacagaaattttctgtgcagaacgctcaggtacaggcgtttgttttgaagccagttgccagatcacgcgttgacattaattcagcagacctaggagcaagatacattctaatttacagcatgcacttatgtactgctttctaatgggtgtttttctctggattctaagaggaaggtagcagatacaaccgattcctgtcctccattctaaaccactttgcctgcacgatgggaatgactggatcactccaccggctgctcaagaagccaacaacttcctccacataaacaaggcccgccagagccagagagctgccaggcagctcttcattggggccaggcctgacccggccttcccagttggaggggatttcagcggctctccacaaacaaataaacagcaaatacttacaggagacagccttgtagaactgattccttaatcaacagttaaagaagcaaattggatttgccctatcacaaaaaaaattaattccagattgtagttattgtcttaagcacaagaaggttgtcttataggcttggctggataatttcattttaaaagtatcgctaaaatttgatgtcccttgggatttgtggttttctccatcattatataactgtaaacttctggaggttagagattggataatttctttcagctggacctggcctccagcgcacttggatgctagggatgagcctcaagtggttgccaggagtcgccagccgggcttgggaacaagacaggtccccggcgtgcacatccaaagtttgagtgtgtgagacttttcctcatttattttccttcagacattttttttttacctctgctatgaattaaaagaattgctaggaattcttttcacaggctgcatctatgctagccaatgaaaacaacacagaaacaaagattcagtctctttaaggtttttgggcttgatccttttgagcagtttttttctgtgctgagctctctggaaccatatgttcagcaacgttatggagggcgctggccttcggcgcagacccagctgaaaccgtaaaatgctcggtaaaaccagtcgctctgagggtgcagcgcgtgtgtccatgggtaaaatatctccccagaccttcccaccctatgcgtgatttctgagttgattaacatttcatctctagtgttatgttattatcgcctttatgttttaatccattttttacaccgtgggaaaagaaaaatatcaccgttctagtaatcaagttattcctgtaaaatcctaaataaaatgagaattttattaaagatatttatcttatacaacaagaataaaatcaatttgcaaggccggtccggcatccagttacaataacattaaaatatattgtttatttgcgggtggggtcatttctcctttcagattggtcaatgaggggaacaccagagtgcactgccttcagaatattggcttggtggctggacatgcagggaacatttttattgttaatcaatgccaatcaattctgagccttgatgttaaatagggatcaataccgctgggctgcagatgagatctgatttcaattggtgagcaaacctgcagaagtttttaatcataaggtaaatcaagacctggaacataagtcagatgaattaatataggcggtgtaggacctctcttgccactgatccagcagaaggaaatttctgtcatatttcattatcactcttagggtaggctgaaggcagcgtttggggagcattttcttagtggaagctggagcgcccctcacaccacacggtgaatccttgctgcaactgagcctgctggtccaccgagtatagttatacgtatgccccatgaatctcattttatgcgattaagatccataaaaattcaatagcttttcttctgcaattcacattttacctggtgaaatatcataagaatttcattatctttgcagctgttgcctaggatcaagcaaaggttattatcctcttcgaaaacactatagaatatgtacgaaaatgtcaggagaactgggcatttaaagcttgattttttaaaagaaaaacactgtctgaagtttagaataaactgtacttgacatttatgtaccatgatgcatttcttggtaaactgattttgcaaggaaattctttgaattcgactctgtgaccagattgtaaaaggaaaagggaagatgggcggggaggggaggggaggggaggggaagagaggagaagggaggggaggggaaggggggggaggtgaagggaggggcagggaggggaggggaggggagaagaggggaggggagaggagtgaagaggaggggagggaggcctggggggatctggaggcagaagcgagaaaggaagcagagggagggagggggagcaatggcaaagcactccaaaaccaaagctctccccacatcagtctgtataggatttcctaacctttcagataaccatccctcgaagataactcgggagaaccctaaccgattgcgatggtctaatcctatggatcattcaggcccgtttaaagcatttgaagaaaaatggccagtgcaaagaaggtgattgatcagagggctctgtaaatcacacggattccgtacagtcctccggcctccactgctagggttccatctatgatgataaattagcattagatggaacctaatgagtttactaaacatttgggatttgtgctaataaactggctggctgtgaactagcagaagcggtgcaggatcccggagctctctcttatctctgtaacatgacagttaaaccatgcgtccaatctgcgatcaattcatcatccgacaccattgtacattcttcacaaaaagataattactgcttccctggatcagaacactcatatttccttggaattgcaggtatgatagcagcccctgtcaccgctcccttcgagcctcaccatacagctctatttatgatcattattttcgcctaaacaagcctttttcctcaacttgataacaaaacctgctacaaggagaagggaacagttaagacattgtttctctgtggagtgcttttacgtttagtggaggccgctgacaaatattttattcagggcattagtaaaagtttccactcgttagaagatatcgctactatttccttccaaaaaaaaaaaaaaatcctgttcctggctctgatttgttaaacacagacagggagtaagagcagagcaagtaacgtcacagggaataaatcaaaacatgattaaaaagaccgtagccgttttaaaatcacatgcccgcggattccctgcttctcactgctgggccctcggtcctggcctcgcgcggacccgccctggcgactggtcaactctgtttgacccccagcacacgcaataaattaccataacacacaactctgaaacaatgtaaattagttactgctcacagtctaataaatgggaacaaatgtgtttggggctggaatggggttctggatgctgtaattgctgaaaataattagaatggggtctgaggaaacatgagcggcagttacttgtcatgacaaatgtcccgaacccggtaaatatgctgctgaccgcaggactcggagcagccaaataacatttttccttaaagttaaatgtctcataagcctcgctttattcacaatcacgtatgaaagaagtatttttaaaactctaaggcacatctatgtgtcataatattctgaaccaagacaagtttatttttgtttctgagctttctcttggattgttgttggcgtgccacactgcagacgaggccatgcgtcccaggcaagagctccggtgaccaacagaagagggagaggatcagtgcccccacattgtggggagcaggaaagggcagagtctatttttgagccacacaaaggtgcacctctggatggggaacctcaccatttattaacttgcataactcatttatttgttcaaggtaatgatctttggggaaagggctgttatatttagaacctgcttgtcaaatttaataaatgatagtgatcgctggcctccccctctgcaagcactttcccaggtccttccacctttccctggggcctcgctggccggggacctggcagcccatgtcttggtaactgatggcggctgcccagtggctggatcgggccgatgacctcggacagtggggaccagcagcacgtccaatccaatcccccacttgtttcctgacccaatcttcctcgtgtcaggggacgagccgcttcattgagaaaatggaaatggacagggagctccctttggcagcatttccaataaccaaatatcaaggaagaggggccgccgggggaccaccccatcccggcacactgatctgatttacaaacctttcctaatgggaaacaaatgctgtgggtgtgaattcatacttaaccataaaaacccttgcattactctgtctcgtattaaataccacatataactctcagcaggttttatgttgtgttttactgtcagcaatggctaaagctggcctaacattttgtttggcaattaggaaaatttgtactttaatttattaaaccaaaaaagccaacaactgcactgaatgctgaattcattctgttcttatgccacggtgcagtatatttgccttcccaataatttaatcattttccttttatggcctatactatttacatattccaaaatagtattattgaggaaataaaccccttataataagtgaaattgagcaatgccacttaaattctgaatataaagttaaaatgttttcatttctttctttgcaaaggaaccaaatgctttgaaaaaaaaaaaaaaagaagggcaggacgggcaaacttctgaaagcctggtgaaccccactgatgacatccaaacaccgaaacatgacctgctaccttgacaagctcaggagtgaaggatttcacttctaaaacaccaagacactgaaaggaaggaagcagagtgcccagtaacctttaagaagaaaaaaaaaattatattcaaagagagtattatcggtgagctaaaaagtcacaagaagacatgcaggaaacttaaatgcctactgctcagtgaaagaagccagtctgggtgaggcacggtggctcacatctgtaatcctagcactttgggaggccgaggcaggtggatgacctgaggtcaggagttcgagaccagcctgaccaacatggtgaaaccccgtctctactacaaatacaaaaaattagccaggtgtggtggcgcatgcctgtaatcacagctacttgggaaactgaggcagaagaatcacttgaacctgggagaaggaggttgcagtgagccaagattgcaccattgcactccagcctgggcaacaagagcaaaaactccgtctcaaaaaaaaaaaaaaaaaaaaaaaaaagcagcagcagctagcctggaaagactacataatgtatgctaccaactctacaacattctgaaaaagcaaaactagagacacagtaaaaggatccaggggtgccaggggttcaggaaagggggaggggtggctaggtggagcacatgtgaaactattctgcacggcactgcgatggcaggtacgtgccacgatgcgtttgccaaaacccaccagatgtgccacaccaagagtgaacccaatgtcaactgcagactttagttcatattcgtgtatcagcattggctcaggtgtaatgaggataccacaccaaagcaagacgttaacactgggggaaactggggggtggggggaggtggggggatatgggaactcagtactctctggtcatttttctgtaaacctaacactgctctaaaaaatagtctattcagtgtttttaaagcgttatgagaacacctttaaatctgcatcagatgcagaggaagacaaggccaggttaggggtgcctgttgctggtgtggcttcaatgtccctgcttcatgccctgccccccaggctgtttgcatctcccagtccttcctcctgactatgggatgtcattctgcagagccggacgtgtggttcttgacaatgaaaacttggaaaggacacctgcattaatctgtcagaagagcatttaggcccctgccagccatatcccctggtgctgaagttcttacaaaacttaagaggcactcgtgcagtggctcatgcctgtaatcccagcactttgggaggccaaggcccgaggatcacctgaggtcgggagttcaagaccagcctgaccaacatggagaaaccctgtctctactaaaaaaaatacaaaattagctgggcatggtggcacatgcctgtaatcccagctactcggtaggctgaggcaggagaatcacttgaacccgggaagcggaggttgcggtgagccgagatcgtgccattgtactccagcttggggcaacaagagcaaaactccgtctcaaaaacacacacagaaaagaaaagaaaagagaaaaagaaaacttagggggcactcagggaggagcccctccctaaaccagtgagcagcatcccaggctccagtgccaagaagactaagccggctttcctgggtgttacctcaaataaaagggacactcccccatggggcctaaatgaccctgttccaagtgatgggactcgtgggggaacgtgacctttgatgcaggccccatcactgcccagagttggggtgaccctgctagggatccccacatgcacgcctggggaaggcgcacgctgcctgcccatgcccataatcaaatcccgggcttgtactgcacatatgtcaccctcggatggccccagcccaggcacaggcctccagacctgttcttcagcagctccctaacatccagattggccatctctgtgcaagctttctgattcaatgaaaacttagagaaagcgggagggggtgcagttccttaccaaaccattgtggaaacctggactcagctggcaggcctcaatggtcagggttggtctttctccctttgtaaattcatcatcacaagggcaaatgcttttagggccttaaacactgccaaagttttgtctccttctgtgctttaacatggcaccctgcccccaactgctttctgctgagagggacagaggaaaatataggcaggagggtggagggtggagggaggagggaggagggaggagggaggggaggggggcggaggcaggggcggcggctggagctgcctgtctgggcaaatgcacggcctcctctccagatgtgcaggcagctccgtcttccagcagagacacgctggagccgactccttccgttcgcggggcctgggctccatgtcctacaacaacacaaccgcgagccccttcctttccgcacatgttaaactcatttcctagtgaattactgggaaggcgcggctgctgcccccaccaccgtttgcagaggatgcgccccatccactcgggcaccacagccctgcatgaattttgagtattttctagctgagcaacttccagcgaaggaattggagagggatcgttttcatttgtgttgtttttaaggggaaggggaaatgagtgattcaaaaacaactaaaataagagtttccctatacccctccctgcagtgctctctatcgaattgttggcaaatttatagcatttactcttttgacagatatgtctgacctttttctgaaaacatcgttttgaaaacagttttctcaagcttctacaatttaatgaacgctggttaccccaaagtctaagaagcttataaaattcaacaagaacaacaacaaaaaaaaaccccttaacccatgaaattactgcactaatttttctaaatgatagccatatttttattaaagcatgaataatgccagcataatgtctcattatatagagtttggaccacaaacatttttgggagatttgctattaagataaacaaacaagaggagcttgtgttctggcaagctgacggagggaatggttttcattttctccaagtgtaggctgcagaagctttgccaactgcaggttaagctccttgagttttcacttcctgtacccccacttgtcaatcacttcctgtctgcaatgacaatttccatcattagagcttggaatttttatcttcttcaacgtgtctccctttgccactgtttgaattctgataaattattcaccatctttaaaaagtaaccaacaattacagcatcacagtgagccacctatgcctagcaaagatcaccgtcctcctggtctgtctcctaaaggctttgacgaggccagcttctcctgctttcttcggcatcacgagaaggcctctggccagccccaattatcttctggtgcacagagtaattatttgcttcctgtaagcatgcgtaacagaacctcgagtttggacggctttccataaagtaatccaattcacccatgccatcctaacacaattacaggcactgcaatatcttcgctcctcacctgataaggctgccgcagcggtgcaggatgctttccgtcaacatgcctcccagagtatagcttctgacagccctgcttccagcccttgcctccacccctgcacgttcatacccggctgcatgctgctgcagggcctggggaaggcaacaccacgaggttttcacccttgcacaggcagacgggaatccgagttggtggagagtgatgcggaagtcattgtgggtgtgtagcttgttttcaaacccagcccttgactggcctggcggtggagtctttacccagctcaggcagccataaatctcgcaggcctcctaggcctaggccagagatgcaggcctgggcctggtggtggccctgacccaccgcggcaggcgaccacgcaagctgtgacacacagcggaggctaaccgtgcagccggcgtggtgcacacccgcatctcaagcttatgggcagggcaaacctacaaagtgggcactgttcctggcgcctccctctttaaatgaaagcatgccattgtgcctccataatgcagctcttccttttctgtttattttcagaagtttagggggaaaaattgaaaggatgaatgaatgcagtgaactttttgcctctccctactggcgctgccagggaataaaacagccattcacacctgagcccggcgaagccaaatggggccggtgccagccagaatcagattctttgtagccacatccattcatccaaaaggtgttttaatattgccaaatttctagccaatactttcccttcactgaaggcccaatgtattaaaacagaccctgaaccaaagagcatctccaatgcacagcctccgccaagagaggatctccaggaccccaaggcctatccaatgataattatattcacatctttaagaaaactgagaaggaaaaattaacaccaaactatactgttttcattgcattatgcagatgaaatgacaagttgtcatttaagaagttaataaacagtctccgttttgcaggttatccaaatgctactgaatagaaaaccttggatccctaaatgatgtgtaattaatattatttttaaaatcctccttgacaggccggggcttagccaaaatgtaaatgacattaaagaagacaatgaatttaattttatttaatgtccctttttgcagatcctcatttacatagcatttttaacaaaagcgttgaccttataaatgctggcatttgtacagcttcagcagagttggatttaatcacgctcgtgcaaagccatgagggaggaagctttaagttctctgcttggagatggagtaggaataaaaacattgggactggtcaaatgtttatcctccccgcttctgaaaacaacctgacaagaagatgtaaagggctagggaataacccggtgctgtttgtaaggcttggtaataatcatacataatcgtttggaaatatagctaataaaaaatataatgagtgttcagcaaaatcggcattaggcccaaattacacgatattaatacttgaacaggtgcagaaaggcgctttaaatgaggtaaatgaataaaatgtcccagagcacaactgtgtgtgctgacaaaaagtcaatcccatgaataattcagtgagcaggactgccagcaaaggtcggctctctttgacctttgtgacaggaagtgaaaggaaacactgttgactaaaaaaaaaaaaaaagaagaagaagaagaaagaaagaaaagaaagaagaaagacagaaaaaaaaatctccaatcgttgggctaccgttccacagtcactttaaaggtgtaaacttaaaacgcacatatgaatcaaagtatggctgtgcagggtagggggggcgcagagctgaaatgggggtagtcaggtcatctgactaaagacaatgtgaaatcacagacaatggaaggttaagcaaataatatttccctatgacacaacgtcaattacgcataaaaatctgaggtcagctgaaaagtattttcagagcccacaggattgaaattttataacagctgttaaatatgacaaaacttcatcctcccccctcttcaacccccaccaaaactaaagcaattccaaactctgtatgaaagaaaatgggataaacagatgtctggcttccagacaggaaagtaggacagacttggaatgataagtctcccaactctatagactaatgccagattgattggggagggggcaccgcctgccgcagagatgccagcgagtgggacgccggagacggtgccatctggaaccgccccgccgagcccgctcccagcgctgcatggagcccctgcgtgtgcccggcctgcctgggcagccacagcccctgctcccaccacccctacagttggcctccccactttgcaacagttggaccttgcaccttccatccacccagcccaagcaaggagggggagaaaaggagtatacaccttcctgggcatttccagagctccttgggaaacagaccgggatggcacgagcaagtgatgggagccagagtgtggtgttggcttagcagctacaccgacatcctggaatcatttgcagcccttggaatgcacgggtgaaacaggagagatttatctgttcatagttgggatatgtggacaatgggtgttcctaatgaagaccatctgcttttgtgttttcccagaaaacattattccacgaggaaaatgatactcccatccttttcagcaataccattaaaaatcatttgtgtgtgtatgtacagaaggtgtacatgtgtgtttgtgtgtgtgcactcttcctttacttgcatttggttctctgcaggtcacacaatctaccatagatacttttttcctgtagtatctctttattgaccatgctttttactttacaatgttatgtttcttctttgctccgtaagttgttatattattttaaatatactgcatatagttataaccatggtgctattaaaaacttgttcctctagcaatgttttatgagaaagaaaacagttaacataagtgaaacctttgcagtgcatgaaatggttttgtaatgggaaacagcctcacttcccccccccctttttttttctctgaagggtcttcatgccattcataagtatttaatgcttctgaaagataactgaactaaattgtgtaattaattgatttaaggcatcagagtctatagaatgtgattaccctgccagagcgaggagcttacttctctgttctcataacacagaaaggcagtctcaacgtgccgggagaggctcggtgtgggttggaacaaatgtgggcccattgatctcaattcaggttggaattattggtttatatcctcaggacaaatatgccttatctggtcagaacctgctaaatgtatccaaaggccacaaggagccggcaaagcacgttgtatataattcttttttaagccaactaaccaaatgagacactgctgatggggacctggaaactgactccccagtctggtgggacattttattctgcaatactcaagagaaaagacaggctagaaactcaacataagcaactaattttcagaggcaacatacaccccacagaaatgattatcattatgaaactgaaacgcatctcagttgcaaaagacggtgtcagtctaaagagattgccctcctataggtattcctctttctctgattaatctaacttgccctagtgaacactaaattcttcatttttttcacgtagaaatatgccgtaagctggagacagtgccaatactgcaatcatttcacagggatttacaacagacaacacaatgctaatagtactttgccattctaagtgacagctttcttaagaatgctaaaaatgtacattgtatttgtcatttcataaaactaccctcaccttaaaatccctaaaatagacggtgattaaaatttctataaaattgtcatatctttgaatttaggagcagagcagatttttcatcaataattaagacctccaaagcatttatgccaggcgtaaatggagcttcaatcctccttattcaaataaacatggtaaacccattaaccaaatgtttttacgtttttcccctcctctcatgcttctagaatatcaaataatcacacacttctcttaggttataaaaatatgagtaatcttagcacatattttaattaaccaaatataagacaacattcagacgagaattaaggaatatatttctgcatatctggggaaaatatttcccaccatatgatgaacactgagtattaaaagttattcagcatcaatagtcaataaaggattgaatgttgcacaaatccaaagtgattttgaagggaaaacacagcatccaaaatgtgagccaaatcaacatggctacttcatcattgtggcatgctagaagtctcacactttataaacaagtcctcttttaaaatttaaagtatcacacaaaagatgaaacactttcgcaatccttcatttaaagccaacatgcactgccttttcaagcaacttagacaagactccaatagttcaaacacttctagccaatcaagaaaataaaataaattcagttacaagacaataatctaaggctatatgatttccatggccacaacactaaagacagatataattatattgattttcatagttcgagttctataaagtgttgaacttgttctcaattgcctgagtgacagccacaactggtcaaccctatttgattactaataagagagctgtcccttctgtcagataccgaacattctccactaagcaaacagctattccagctagttaaacattagcattgctctccactggtggcgcatatttctttaggcttaactcatggagttttccgggtttaatttttcagacactggacagcaaagttcatgatcaaaagataactttgtaatgaaagctgcggaaattcaacccctcttcaaaaccgtctaaacctctgcttcgcaaaactggtgtcatatgtacacgtctaacatttattcaatttgggtaccaatttcaaaatctgcagtcaatcacacgctgggccttttgctgctacccattgttggaaagaaagaaatcctcctctcctgcacggcaccgaaacccagcgagttgggagagggctgggcgaggagggtggtggtgtttttgttgcttcaactaaagctatgccaaatgcacattagcaccattagggctactgattggtatcttaaaaggatgcagcattgcccaaggaatatgagaaacagcaagatgaagagcagcaaatgtaaagaatgcatacagctaatcgagttatgaaaattaatgttggaacatgtaaccagcatgtgtaattagtttcaattataacaagtttggtttgttagttacatatttgctacttgacataaaacgacagctacaattggaaaaaaattaggacacattttgcaactaattgagagcagattaaattcattctaacgctgggcaacaattacaacagtaacatcacccaagtctcaacttcaactatcatcagagataaaaataatgtaaaaatgaaatacttgttaacaaattagcaaaaagcattttatgacacatctctaggtttaaagccagaaactctctaggcataaagtgctcctcacagcgagagcagtggcagatgaaactgcttcccttgacaactcacaagcaattactgaatccccacagagcgagccaccaggtttccaagtcaacccacctgtgcatgataacacacgcggacaacaaatggtgcaatgcacaagatgggctcgacaccagcctcaaaaatatggagcaactggaaaccaagcaaggcaaaacgttttgttgctgctgcggttttgttttgaaaaataaagaagtcatccttacctgtcaatgattacagggtctgagggcgtttcgtttctattgccacaacttttcttgtcacagcaccggctgtggagcaattgtaaacagtggttttaatatgcatttcccccttttatgcccgacttgtatttttttttttttctgacgtctgacaatgaagcggtaggagtcaactaccaaggcagtttggagaatttaaacccagtgagttcacgtgttctgcggctaaacttacgatgtaactttctaccggaaggagcaaagttgaacctatctgttaataccaggagggtaaccagagtactatatagattgtgatgctaaaatatggaaaacatgttgtcggtgtttgtctttgcaatgaactgaggagaagggaaggcaggaggcttgggaataacttttcacagcttcggcttttgtttacctctaattgtcaagctgttatttctggaaaagatgcaagatgccaccttcaaccaatatttctttggggcatttattaattataaccacaaaagcatgcatccatctatcacaaacttctattgttccttctttaagcctaccttaactctgttattgaaactttaattaaagcagaaatgaaacaaaaatgttatgcttcttgcattttaaaaaagcatacttgtataatggttacatgtctaaattagctaaattaacaccatatggtaggcaaagtatataaagccttttaaagctgacagctaaagtgattaaagaaagtctacagtcttccacttagagcttaaatcacatctgtgcgctttctatgttaattgcagtacatgcagaagtggataataaagaaattccactttattggttgtaatttatatttattacctgatatgagaaaaagtcagcttttgtatattagtgctgtaacaatatgtctgctcagaaatggcatttaggcaaccggcatcatagccaggcggagtatgcccctcagagtatgcggcctgctactgtagcctggaagcctgcaacgctttccttgctattccttgcaactatatttcacatgccacacatacaaagtcaatgatgcatttttatttgccatgtaggggtgaaactcttgtggtagttagaaaaaacaggtgggaaattgctcttctgacagagatctcaagtaacgggcacgctatctaacaacgacacgaacgctgcatcgctgctctagggaagaggttaactgacagaatcacaatccaattctcacatacacgcgcgctatagtaagtacaaaagagtttcctttttatcaataacagacaattgtatatctcaggatgcgagcgcctgagaaggaagtagtaaaatgattccgagtgatccctgactcctccggcaccgcggacggatgcatcacccagacctgttttcatttttgactacactgcaacgacacggcccacatattaatccgctctgctgagcagcgggtcgcgttgatcgtcagcgctggggggaaggagcgcgggctcctccgcggcccggcgcgcggcctcgggccgattacatttcaatcgatgcccttcccggagctgggcggggtggcggcgcctggacgcggcgtcctttgtagacgcagctggcgccgaggcagcccgcgcccccgccgcccgccgcccgccgctcacctgcacatgatctcgtgggtcagcagcacacggcacatctccgggttcttgtcctggccctcgtagacgatggcctgcgcgagggacaagcagaggctggggttacgcggcgcccgcggctttggcgccaaatcgccccgggcgctgcaggcctggctggcagcaggtgcaccacgctcgaggggaggcgatgcgcccccctccctcggccaccctcccgatggggtcaccctcggagctgggctaggccgcgatggcttctccctcccctgcctcccagcctcctcccccgggcgcccgccaggcctgcgaggggccttcggctgcagggaaggcgccgactgggctcgggccgcggggagggcagggcgagggaggccggggccggggcgcaaggagcgagagcccgctggcaccgaccccggaacccggggctcccgggccccttcggcattccgcgccgccgccaggccgcgtcctcaggccattgtctacaacgagttccaatctgcatgttgggagaggccgatcagaacgccccgaggctaaagaagcagggaaggatggtcgcggcgcaggagcagtttgccaagggccgagggccgcgcccgccctgccctgcgcgctcccccggctctagcaagtctggcgccccgcggcttcccgcggcttcccgcgttccaaacccaggcgcccgcggggagcaggccgccctggaccggccgccgtcccgagctcccggggcctccctgagtggtgggcagcgacctggcctctgcacgctgcgggcggcctgggagcccaggcgggaggcccaggagcagcaaccgcacgtgggccgcggcgtcgccagcgccccgcaggagtgccggggccccagggcgcccgagcccgcgcggccacgtgctcctcgccggatgatatttggaaagaaagtgctaatggccaatctggtgtttattttgaaactgctaacagtgatttttctcgggtaaaaaggcagtctctgcgcgcacgctcgggtgggttttgagcagaggctccgccagatggtgcgaagccctaggtgcgctcacggccgcgctcagcccggctccgccgctgggaacccgagctggggatcgggagccgcccgcccgggctgggcctccaccactggcctcgcgaaaaaacagaaaagaaaaaaaaaaaaagtctactgggggaggggcgggaggctggggccgggagctccaagttccctgcataaaattccacggaagggggagggatgtcctcttctccggttcccgcccccacccctgaaaattatctggaaattccttccaacctccccgggcacttctgacactttcctctacttccaggcggacaaagccctttctggtgaaagcccggggctgccctcctgggaagagggaaggttccccgcgaaccccgctcacccagcctcctgcctggacccggctcagaaccacagaagtgatgggtgtcaccgcaggccaacgagtcgcctggcgctgcagggcgcgtggccgcggcgggcaccagcgcttctgagagagtggcttgtcctccgatggatcgccgtatttatatttgatttattttttattttgtagcacaaacagaaatccataaactgtcggttcagcgccattgactctttgatcagttactgggctatttctttcctttttttttttttttttttgcccctccatgcccgtcagtgagaggagattaaatgcctttattttcagccctgtttatactgcaaaggtacaaggctaaatgaacaataaaagtgtacttaaaacgaagcctcctcctcctctgtgcaacaacagagaaacttagggctgcctacataaacctcttaattagactatagcgatttccgaaaacatttagccattatatacaaaggaaataaaatcaccctgtcaaccagcagccggagttccagaggcttctctgaatcgagtgaaataattacagaagggcacaccgcctctgtctttgtcagaaagaccttagtttacctgtcagatctgttttactctaagagaaaagcacactggtttaccactgcaggcattaaaatctaacacccttgctacctaggtaaggacaaactttttaaaggggaaataaaatgtgcaaactaattgcatgcagagagtgggaggcatatgtgctgggctgcaggaagccccaacgagctctcctttacttggctcacaattcttaaagttagcatcaaaaccgaagaagccactttcatttctaagtgtgaagtccagcttggaagtatattttaaaacaatctgtgccgagtggatttaatctacaaactggacctgcccccctccccaccacaacactctattttaagaaaatgggggcggggggaaatctttaaaacaaccaaatcaacaacaacacaccacccagcacaaaaccagcagccagagactgcacaatgtcaaaaagcagtgacgcacttttctccacttaatcacattactgatagccaatagttatcatcggaaaagttgaccaagacaggttaaataatttaataaggaactgcttgtaattatgttatttacaaggtatgacagagggtgggagagggggcagagcagtggacgggttggagtgacccctggagcttggagtttgaattatggagctggggggctgcgaggtgaagatggactagaggagaacaaggtgacttttcaccccaacacatttaacttttaaatccaaataaacgtctcgtgttactagaccatcacactggaaaggagaaaaaaaatgaactaatcaagtccaactcgatgggcttaggagttagctgcctttgttataggaaaaaaaatccaaatgaactgattcctagcagagagagaagcatttaaaaataaacaagaggggggacatcttgaaatttttgtcaaatattaattaccataattaattaagacagaatatgattccaatcacaagacatttaataaagcatatatgtcctgttctaatgacaacataaactattttaccaatcgcttcattcattccaataaatatggaattctcattagcatgtcaaggaaactcaatggaaaacaaatacacgagatccatttgtcagtgcccttgcctctgaagcccaggacaacccaggcccagcagtgaaaactcgtgcagaggcataaactttctcacctgtttggtcattgaatctatgaggcgaacatacagatcttgctctgttctgactcctgcaaaaaaacagagacaaattctcatcaggatttgagtgctgcacctcggggagggcacacggagcacaggaagtctgtaactcaggactgctgccacggtgatgcagcagaacttaggcaatccctttgaaagggagaaagagaaccccaccacttctcgcttaattttttttttcttttcttaactaagaaccttaaggctcttagggcttgcatttcaaggtgcaaggaacttgcctggtggagagcaggcctggtagctgtgtgcggtgggcccatgtggtcgtttatttttagaaaagaaaaagcaccaaatggaaactgagtgagaggctgaactctttctaatgtctctcgaggatttaaaaaaaaaaaactcgttcacaggaagtaagttatgctccgtttatggagttacccccatcctaataattaacattaatttgcaaaattgaaaaaagtcacttaaaagtgatgttctgctggagcccgtatcgatctttttcttactttctacttcaagccccaccggttaatcatgtgaagtgccatcgacttattgatcgtttatgttttgttttccttctatgccatgagaagatttcgtgtttacatccatgtcattttaatctcaaatctttatgtcctttcaccagcgcagaaaaggagagccagccgctgcaggggcggcgagcacgcagcaggcacttaccgttgctgtacaataactggagtttatagtggatgccgttgttggttttctcgttgtttggctcctgaaagtaacgataaataattgcatttagtgcgatcggtgtcaggcgcggccaccacgctcggtccccctccgcgaccgaggctctcggcctcacacatggcaggattcctagctcgaagcagcgcggtgatgtcactttcctgctggaagcccagcgttctcctcgccccgagtaagtccgagggcgcagagaagttgcccagccctcggcggtcccgggcggccgcacgtggcggcggcggggtggcctggcggagccgagcccgccgcctaggggggcactcgaacccccgcgcaccggcaccgcctgcctcccgcttctagaaagagagagggtgtgatcgtgtgtttgcacttactttctctttctccacaaagtccacaaaagcggtcctttcaatctccaccggctgcccctgcctatcgtagagcgccagcacgaagtggaagaaattggatttccggaggttggaaggcggctgcttctcgaagtgcgcccgcgccagccccacgccgctgcgggaggaaagagacagcggcccggtgaggagcgcggcgccggccggcggagggggccgggccgggccggggccggggccagggcgcgcgggggcggccggtacgtacctctgggcggccgtgttggcgtccaccacgcccgccgtgtgcatccacgagcgcaccgggttcatgccgctgcccagcggctcctccttcatggtcgtccccccgcgcggaatattctcctgaatcccaaacatgaaaactgctggcggcggccgcagctcccggccgaaagcgtttcctcgagcagcggcgctcggggcttggcggcaggcggctgccctggccgccctcgccctgctcggcgcctgcggtccggccccgccgccggcttcagcccgtcccgggcaggcgcgacatacaccagcggccgggcgctccggacggccaggggcgcggaggcggctccaccggcggcggcggcgcttcgaaggagcaggacgcggtggccgcggcggcgcttgttgttgttgttgtttgcaggcgcgctcaacgtggtgtcatcctagccaggcggcgtccgcggctgcaggacactgcgggatcgcccgcttctggcgcggcccgcctgctccaaagacaaataaacggggcagtgagtgctgcggcgcagtcccgggcgcaggcggggcgcggcggggcctggagcggcgcgcgcagcggacggaggcgcacaaaactcagccctctctccccgaggaatggaccctttcccgggagccaaaactcgaagcccccgggagcggcgctgtcagagggtgacgtcggggggcggtgcctgcgccatatatgggagcggccgcccctcgccgcgcccctcgccgccgccgccgccgcgctcgccgactgactgcctgacggcgccgcgagccggcccgagccccgcgagccccgcgagccccgccgccgccgagcgccaccgagcgccgccgccgccccccgccacgcaccgcggctcctcgcgtccagccgcggccaaggaagttactactcgcccaaataaatcttgaaaagaaacaaacgcagccactgcacaattgcagtttggccccttaatacctccctgcaaaacctgccacacagtcgaacacgatgggcggggcggggggctgtaaaatgctgaggcgccccaagttgcccagatgcatgcaataaatgcaaggggctgcagcttgtcctggggccgcccgaaggagaagtgggaagaggcaggtcgaccgcagggagggcgccggagggaggagcgggcaacggactgggaggaggggtgcccagggctccccggccaaggctggacgcgcagctcagcctgatttctaagcagacctaaggctgctgcagggccggccggtcccggtctgagccccgccaggtaccccaagcttcctaccccggcggaggccgccgagtgccgggcagggaatcacgtcggaggcagggtctgccagatgctccctctcccccggtggccgcggcagaccccggcccctggcctgttcttacgcacagcgagtgacaaagaaggctccggtctctccgggccgacgggaagcgcgcccggcctctccggcgacccggagccgggtgtctggctgcgcgacctgcgcggtggccagaccgccctggagccaactgctccaaaaaccaagcggacgccgcgggcgctgtggcccggccctcggagccgccggacccgggtgagcgcgcggcgcgcggcttcccgacctggtttctaggaatcgggagggcagccggg

SEQ ID NO: 178 - DNA, 83048 bp, Homo sapiens
  source 1..83048: mol_type = genomic DNA
aacccttcacctgaactggccatgttcctttacccctttcacatttcttggatgatagtaatttttccagtaatgccattaaacccttcttagcttagcaaacttcctttaaggctcaacttgagtaccatcttcttggatgagttctcctaaactccgggattcttactatgcacatatctatatttgggtacctaaaatgtattaactgcctttatttgtttatgtgtctgtgttctctattagattgtgagtttccagagggcagtagctatgccttttgcatttttgtatacttatacattggtggtattttatatagtacatatactaacatgtattgattggatgtaagaattagtaaatatattaatatttatattttatagataattaaactgaagctctgatatgttaactgacttgtttgaggtcaactaaattgcagacacaatcaaggatatcacactttttggactttcgttgtttttctgatcatacatacttcctttctaacatgatagggttattccctctgctcaagtgagtcttgaatccgggaagtgttcaacaggacttctaaatttgattatacttattcaatcttttgatttttaaatgtgtgtcatttcaaaggctgactaataatgtttgctagtcagtcagtcatgccagagtcactgctttctataagcttggcctgtacaatttttgaatttctggacctctacatctttgagctgcacatctcttggttttcttcggcttatgtaaattatattttttctgcatacttttactataataaattgtgatggcattattattattattgcttaacaactaactgttcaagaaaacaaaggctctttttggcaactgctctacgagagtatttcctatgttatccttttctgtacttctcatatggcccttgggattcagaacacttgtattttgaagtgccagctaaaattaggcagctgaaatccaggaaaggtcaggggtaaatgatagcaacctctggaatactcggctgggtttgaccttactgtctgggaaaaaagcaattgctaattctggattatttttgttgggtgaagaaagggattacatgctgagagacacagacaggtgaacttctgcagcaatcagtatgcagttatttagtgctcatttcattttgcctcatattaaagtttatcatcactgtctcttatcaagtagggaccttgcattttgtgaatttcatctcatctttcacatagaaaacactcaaaaaaagcttgtgaaatgcaatgagcaatccctaaacctcatttcaaactttcacctttgctaaggtacaataatgatgaaacaatgaagtgctccaaaggcagggaaccaaagaaaggaagaccaaagaggccattggaaactattacccggaaaatcaaccttgggaagttgcatgtctgtatatctgtttcttcacaacaatgaaacacacagtccagcccagagaccagaaatgtggcattttaattgaataacttcatacttgcttgataattgtatatttaacataaataatgtccacttgtcacatttatatttcttttaaacaatcaattagtatttaatgaattagtgtctgtacagtgaaaaataaggtagttgttaaaaaaacttaaatttttattggttttgcttacataataaaaaatcagtaactatagccactttaggcaaccaaaaaatcctcccagatatataattttttacattgttatattacacttttataaagttagctacagcatacccatgttttgctataaactgtattcctttggccatatgtaagctatcaatactaaaaggtgtttgaacatacatccacattagcagtggataataagggagaaaataggttaaaatcttttataaatcttttgagctgtaacatccatgttaacaataattttgtctgttgctatattaaagtccttaatactaggaaacatgttttgaagttgaacgatagcacctttttctatcttggttttgagtatgtaaagaaattataattgtttcttacttatcagtatgttaaagttttgaatcaaacatttttttaaaaagccactgaatgcaattttattataaataatgcaagtatgctttttgtgtgtagtttcaaaatttggcaagataattagagaacatgatactgacatggagaaggaaaaggtatcaggatgtaaaaattcagtacatggtaataaaaataatctaaaatttaaatagaaattaaatatattaataaactgtgaaaatattagtgattcaaaattaatttaaaattgagagtctaaaatgacttctatgataacaggcctctgaaaaagtgattgggatgaaattaaagaacaagtttgtgggtgatttataaatagaatccatatggtgtgtgaattaattattattgctctttctttctggccacattgttgggttttggtttactgtaccatcacattcaatattgacagaaaacaacattactagcttatttccaacatgtggcccagcctattaaaagaaaaacaaagtaaaaatttgggcatattttaagaccgagttaaagctcttgggcccaatttatttcgaaagtcactctgagaacattgcactgtgttttgctggaacaaaatcaggaccttttgcattgatgtgacgaggcaatgacgaacgttaggctaagaatgggaatctgtccccatgggtttcctccaaccccacctcatttcctctctcttccgttttctcttgtacatactttcacacacatctcatcccaagctatcctaaggcactttgcttagaagatataaaaattaggcaggaacgcacaaagctaagaggttcttacggtctcaaaaagcagttttgcctctagatgaaagaaaagcaccatgtcaagcaaacttttctattggctatttacaaaaataatacaaaaattagtaataagctttacaggtagctgttaaatgtactaatctgtatgattttgaaaaatagtattttaactatagcattatacatatgctagaaaccattttaaccacagcatgggtgagagagggtgctacctgcccctttgtcatgtggacactgcaccaggcagttcacagtctttattatgaggtcactggcatctctccatcgtaaagctatgagcacagggcctgccctcatttaatcatctacatgcagtgtatgtaggtaagtatttacagatgacaaaaccaaacagagtttaagctacgatagtgaaagaagaagattttaataatcctgaaaaaattgtagatagtattgtcttcacagggtatgtgaatgacagattcaaaaaagtcttttgggatagcctttcaaacattctatttctctttgtgaggtttgatcttaactgaatgtaaaggatgtaataattttctttttaaaagtattatattttaaattcagctggcacatgtgccagtctgttacatgctgcttgtttgtgacatgttggttacatattgcagaatgctgaggtttgggcttctagtgaaagtgtaatgattttcaaaaacagccttgctctttctgttactccctcctgatcatttaaatgtttccagtgtccgaaaaatgcaacaactaaactgctctctcatttgcatctaattacaatctgataatagtgtgataatattaattgaaaagttgttttaaaggattttaaaattttaaattgagtaatttaagcttcatttaaaagttctgttttacagtgacttattcttcctttatatcagagtcccattgatttaaaaataaatctctttttagaaagaatagaaattctgagtgagctcatttttaagcctaagtgttgtgtgaatatcctggaagttgttaagagctatgttgaagtgctaactgtaaaaaattaagtgctttcacgacgaggctttcttaattcccactgattttctttccatgccgtaaacagctcataaaatgtcatatgtagctgtgagtgttaaaataattacacttaatattttaatagtgtgctgtgcaaatacatagttttttgttttgttttggcaaatgtttcattttgttttaatgacttcggtccaatataaagaaaatgaaatacagtgaatagttcttctttcaagatgagctgtatttattactggaacggaagttgtcatatccgtgatcattagctttgaactttaagcacgactgcttttcctccaaggactgtttttcttcaaatgactggcaccagcagcataagcatgactgtacaaaacaaagtaactcattatatgttaacatcagtcacctttcccaactcttcctcctctccagggttctgactttctttgtatgattaggagttcttgggccctttctttcagtgctcttttattttccctcttaaaagaatataatcacagtagtagcatatgataattttttaactaaaaaaatgcagagaagaaaaaaacctacatagttaaaatttctcaacaagagaaagccacttttaattgatatttactcttggttatttgataatatttgataaacatataattcaagacttttccccatgaaaacagaaatatttgcacatacatgaaataaataaattatacacatgtatatgtgcatgtgctggagaatgtgagtataattattttactgagactgtactgtatgtatactccataaccttgtagatactttcacaaacacctcatcccaagttattctaagccactttgctgagaagatttaacctgctttttctcacttgacagtgacataaatatcttctcatgtcaatgaatttaatactgctttcctattttttcagccatgtattctcatatctcttttcaatattggtaaacaataaggttatatagtacaaaagcatctcagttttcttcaatttttttcttgaagtttttttaaatataaaaattttttcattctgcttgtcttctgttcattctatttgtaaaagaaaatgagaagtccactgttttatgtcttataaaatgagggtgttgatcctgatggaagttctcttccaactctaaaatttgagttatgagtgggcgaagaatgttataggctgccttagtgtttacgcgggagctacgttcttagctttccagtagtgaaataccatggacaaatggatgattttcacattaggggaggggatattttatttcatgttagattgttgaaggagtgaatgaatagaaggatgataaaatgcaagcagctgaagaaggaattatatgtatttcacattgaacagcacatcactgttatacaaaaaaggaagaaagaggtaaaacctaaactattttttttttgtttaccttgctattctcacagtccatgtgaaaaaggaactaatttagttataataataattgcagctgcgaagttcagaatctaccaaaaacagggaacagggcctttaattcatgtttagcccttattttattatgtgatgcctatcagacatcaatgcatgtaatttttattactttttggtcaacaattccatgagtgtaactgattggctgaggcagtagggagtggctgactaggatttataggaaaaaacaattatagtgatttacaagcaaaagttgtatttaaaaaaatcatccatgatgtaataaaagggaaactataagataatttactaaatctgtctggatagatatattagcagttttgaaagcttatatttgagccatattacaaagagctttttattttgggatagtctcttaccttaaagcagtttttgaatcttttgctcaccaaatacagagcaattgggttaatgcaggaattcagtgaagccatgttgataccaatatagtccaataccaacagaaagctgcaacaaaataacccaaaatgtgtctgaaaaatatgctattctgaacatgtagtcattgtagcttctgtgcttttgtaaggaaaaaaaatgccaatatacaatggttctaaatttatcactcgtctttgctaacaatgattctctgcctgtctctgtctgtgtccccctctaactctagcatttctactgactttcctccatttccccttcccaggcccaattcttctcttttaaaataaaatctcatttggaagtactgaagctggctgaaaagaagaaatttagaaaacgcgttggagaatcggacctgacattttccgccttggcactcactcatcatcttgacaactctgactctctgtacccagtgttcttcatacccccccttccctgtccctctcaacaggacctcagataaaaattgggagtctccatgacttcctaagggttagaaaaatggtagtctgtctttctgcctataaaaaagatcgatggaaacacttctgagtggcatttatttacaaaaccatttctagtttgcctttcttacctcaaaagttcacatctattgggatcattctgattataaagagtgagcttcagaatcctgctgaggtgaaggggaagccagcagagggcaaagacaaggaccaggcaaaagacggttttggccacttcccgtctctgaaataaatccatagtttgacccttaaaagatggctcattttactcatagcattctatcttctaaaacgacatttaatattgtctacaaaaagtcagtggcatatgtaaaaactcaggacactgagctttatatggaatagttaatgtgaagtggaaccgaagtgactagagattcatctttaaaaagttctgattctccctagatccttttagattatatagaatatctccaaataaataatataaaaatattctttatctatttaaaactaccagaaacaagaaaaaggaaatatgctctggtatataataatgttagtttatcatcatcatcatcataattttcatattcataattataaattcaaccacgagttatcaaatatttgtattttcttacctgctttaggtgatcatttaaagcaatctgcatgccacttttctttctcaacatttcacaggtcattagtgtataaaaaaatgcagtgatggccaatggcaagcagaaatagaaactgaatagccaccaatcttttgctgtcttgtaaaactatagggatgagagaatttttacgattaatactcctctgtaagaaaatcttatataacaaatgttaaacttaaaaaaattcatcagggaatgattatcttctaaattagatccagtttgtatatatcatacagaatctttcaggccacacttactgaacaaataaatagtcatgttaaataaaacaaattttcccaaaaatatttcagttctctaagacaatgtgttataagcatgcacaaaaacttaagtagttaggcaaaatttgaaatatttggtaattcaatgctttgtcttcacataagaaacttatccttagagtattttttgtgtgaaatataacacctaaatatgtaaagataacttagtgtttagatgaagttctcattttttagcaagtttgtttaatgggaacaacagatacgaaaaggtctaggttaaccatttagctcagtaacatataaatctaacctcgcaaaaagacaaaatctgcttttgacttatgtcgtatctcttattctttttcttctctgttatctttttcatattgctttagatatatctgtgttggagaggaaattatgtaacctaggcagcactttttttttctttttactaataggaaacaaggaaatagcaatttcattttcaatttcacattatgtccttgattcttttacttatcatgatatatacagttcataaagttttatttagtctccttatatattcaatagaaaataatcattgggaatagttaagccagccccctttgcattaatgtctcttaactcattctgttgggaagagccttttacactcaggatctatcttctggaaacgagtatcatcattctttttctattccctaatcaaatgttctttaataaatgaccaggatgaaaagtttcttgcaatggcagctttctttttggcatcaaagacagagagaggggagtcttgccattcagactccatccatatcagggtgacttctatctgaatatttgctggaccatccattcctctgacaactactgggctatcttgtgcagattacgtagtagttgtcagtccttatggggctgtaggatacagtaaattcctcttcaaagaaccaatatgtcagtgtgttcagcttccctgttctttgttctccattttaaagtttaactccctcattctttacatctccttgcccctagtttcagtaaacaaccccctcctagcctctatcacctgctctttccttagttatccttcatcacctgctctgtccttagtcatccttagtcacctgctctgtccttagtcatccttagccacctgctctgaccttagtcatccttagccacctgctctgtaactgtccttcccgctgaaactactcaccccaccactccagctcgtacccctgctctttttaaaatagccaattggaattaacttagactgtgcggtccaaccctacccaataggggaaagatgcagcagtgggaactagctacatcagggataacacccccttcccctcccttgtctggtgtgctctcgccattgctccattgtgagacacaaccttctatagaagtaaattgccttgctgagaaaacttttgcctgagtgctattttcactttgtggcaccaaacattttacttctaacatggctttaggtagaaagctataaattcacatcaattctttcatgtggacctggtttatctatgccactgagatcaaggggattcttagagaagtagtgatctagcttcttgcagcttgagtcattgatcaccattaactccacagtccttggatctatactcttaatttatgccaaggacagtcataaatcaacagtttcccaaggagtggggaacaggggaaaaatagctaaatatttataaggcaagagcagaaaggaaaataaaaaaagtgaaatttacctgcatgaaagctgtcttctgaacgggatgaagcaagcagattcgcagataacttcctttgtagtccatcgtaattatatcaaaacctatggcttcagggacagccagaaccacagagaccacccaaatcaaaacaatttctactgctgtccattttggaaccccaattcctttaattctactccaagaagcaacagctcgatatctgaagataaaaatagaattgtattttaagctggcataccttagttttattgaattgcacagtttattttctaagtaacatggaaaacaatagtatatattcagaatatacttggattaaatagaagcttctacctgtcaatactcagagcacatagactcagcacagtgattcccacagaggctttctgtatgaaaggcaccagcttacacatctcagctccaaatggccagtcctctgccagcagctgcattgagaagacacgaagctctgttagggggtttcataagatgccctctgaattgtatcacttagtgaagagtaattaacatgcagagtaggataaactctggttgtcattctttttctcatggactacttctttgaaaagcaccattgtttgatatatgtatgggacaggaaagtgtgttgggattgatgaaaatgcagccagcttataagaagtcatcatgcgtatacagtagcttagagttcagctcacctcatcagagcaaacttgagccagtcgcttaagttcctcctgaaaattgaacctgtatactgtcatggagtctgaaatgcccagatcatggccaaagcaaaatatgggttaattaaaattgaatgataaacagtccttagctgaggagaccagacttccctactgaagtagtactccatgcagaacagcatgtgcattcaggcacttgttcttcattgcagtcagtttacctaactgaacaatcattcagtaggagtagctacacagttgctcaaacacaccaggcacattcctacttagggctttcgctgtaggtccttccttatcctagaaggctctttccccacagattcacctggttaactcgcttatctccttcaggtcttactcaaatttcatcttttcaacatgacttaccttgatcacactattagataccgtaaccggtcagacatccctatctccctactctcttttcctttttatccatagtctatcaattcctgtggcataacacattaacttatttgtttgcttagatttttttctgtctggatccctggagtgtaagacagactatgagctccacaactgcctagaacagtgcctgacacatagcagatgtttaatattaacagtgcttgattcatagactctaaaatataacagtgactggctgtataaggagcaagaagacatagttattgctattatagatatatatttatacacacacatagtatgttatatatatatagtgtgtatatatgtacacgtatatatttctctttatctgactgcagactatgaaaccatctattattaaatgtggttattttctttcttaggacaatatggtgtgtcccacactggtaaatgaatcattttaggtgaacatctggatcaaatgttcatgaggttttgaaaataaaagtatttcaaatccatgggtcttaaaaatagtttgaaaaacaaccttgcaaaagtgaaaattattttgagacacaatggagtctttccatcctttcactagtagtgaagactctaccgagtttgtcaagctgagttgattgttctataactagaatgacgtcaaaggctaaaatgtttgtctcataatgaatttgacttggagattcaacataggaccaacttcatttctaagttagatatcaaaacttacacagacatgtaggacaaaagttggcagacttatcatatatatgcttaatgtaggatcctgaagacctacagggccaggcaggtaacacagagaagtggagggtgccaggtctcagaaagtcattggtgtcaggaagatgacagggagtggggtggggtctggggtaaactttgtctgaaaggagcagctgctagtagacatcacatactttttgctaaggggctccaaatacaaaaatctcttgatttttctaaagaacccagattggaatttttatatgaatctcacaatttattaaagtccaattcatatatatttttaaaaaactctcatataacattgtattatcaaaatacatctgtgagccatcatagcctctatcttgtgacttctgggttaatcaactgactcattaattctgcttgttcattcattcattcaatgaatatttattgagcattcactatgtgccagacaccattctgagcactcctgctctcatggagtttacactatagtgagggaggcagacaaaaaacacatacatacttaaaatggtgttaaacagaggctgtgatcatattgagtgagggtgggatttgaggtgttttcttgataagcttctcagtaaggtcaccctgaagagacagcatttgaggagagacttgactgaaataagacagtaagccatgcgaagagcattctaggcagaggcaagagcatgtgcaaacgccctgaggtcaaaacaagcctggtgaactggaggtacagcaatgaggctactagctactaaagctggagaagactgacccagcccaaatgcatggaaaatgaagttgtagagggaagaatttgaatgctttttttgagggagttcattgcaaggtttgaagaagggaaatggcatgatctaacatatttttcaagagatcactgttgctgcccagtgtagaatagaatgtagggccaagaaaggaagcactgatgagaactagtggtgagctggatcctgtgcgccctgaggctgtgaagagcgggttataggctgtatatattttaagggtagaggtagctagcaggacttgctgatgggttggacacatgatgttggaagtcaggacactcacagaggtttaccatgtgcatggtgaagccatttactgaaatgggggagactcagtgcaccacaggtctgaaccagctttgaacccatgtagctttaaaagaactgccaattacccttagaaataagaataaaaattatccaactggtttcaaggattatgctagacccagcctggtacaacttattcagacaatattctgctattgattactcctcccttcaaaacatgaagcctaatttccctgcctttgaatgtggattggacttagtgatttgttttcaatgaatacaatgtgacaaaagtgatgatgtgtgatgtctgacactagttcctaaagaactggcttcctctctcttggaacacttattctgggggaggccagctgccatgtcatgaggacactcaagcacctctgtggagaaaccagatggcaaagaactgaggcctcttgaaaacatcaagcactaatttgccacgtctgtgaataagaggatcctccagctttagacaaacgtttggacaactgcatccccagccagtattttaaatgtaccttcttgagagaccctaagccagggccacccaactaagccactccttaattgccaaaccaaagacacaatgtgatttaaaaaatatttactgttttaagccactaaattgtagggtaatttgttattcattaggaaacccacatgcctgcttgcatttgtttgctcacttaagtgagtaatagatccacatttgaacccagatggtctagagcctatgcttacaaccactataatacctgcccgacagtggtttgaaggaggtgattgtacaaaacaaaatgtttagaattaaatcaaattttttttaaacctatagctatgtgtcaaataatagtaaaatatctagatgcagagcaaaatcttctgctcacctagtgcgatggttaactttatgtgttaacttgaccagccactggttgctcaattaaacattctctatttctgagtgtgtctgtgaggatgtgtctggaagaaattagtatatgaatttgtggactcagaacagcagattgccttaccctaggtgggtggccattatccaatctcttgagggcctgaatagaacaaaaggcagaggcagaaggaatttgcccctttttcttcctatctggaatgtctcatttcatctcccctggccctcagactggtttctcaggcctttggacttggactgaattacaccactggctttcctatatttgcagcttgcaaatggccaattatgggacttcttagcctctataatctcataaaccaattcctcattatctatttatctgtctgtctactaactacctatctacctatccatccatctatctatcccactggttctgtttctctggagaaccctgactaatccccctagttattttattcaaataatgtacaaacatttggatattttaaaatattttattctgtcttaaattatttccaaatatgttaatattgttatcctgtaggtatggctatcagaagaatcaagatgaatgagcgtccagaccattgaagggaaagaagtctggctgatgaaaatgagctctgcactgaatccaggccatgttttgaggtttccattgtttttggctcagcctagaaattggattattgctcttcataccactggaggcctgcagcccaacctctgacccaagctatcacagaaaacagggaaacacaaactgaaaattataacaatgctcttcaagctcaacagagagatagtcagacacgtaatcaccacggagagattacagttttctagtctacacttttgaagggaaagagactgcaaaaaaaaaaaaaaaaaaaaaaagagagagagagcattaacctttatcagctttcagcatttcatgctttcaatttagaactggatgctattggctctggaaggccatagaagatgtgggaagagcatgcactgttgcttccattattttgtagtgagaaggatggctttggcgagactctaaacgctcttcctttaaaaatcttaacctctgcctcactgatcagaaggctttgtggagacccagcaaagcctgatactctgtgacagaaaccatgcccactattgatgctcatctctgtcatcttaatggcctctagcaagaaagtctttaggcaagctagtgcttgaagcttacctaaaatataaaggtatccctggtggggaaaaactatgaagttttgccaaaaaaaaaaaaaaaaaaattcactctcaaccaagatgccatctttaaaatttggtgagagattgttcttatagatgggtatgattcttagacattcatttcttcatcattctttgggaaaaataacaacatctaacatcaataatttgaagtctaaggatacagctttccccactgaagaggaaatggattcactttattgcaagaggaagcaactctaactttaaacccagcaataacacattccttattccctatttttagttttttctttggactttaccccattaaattagataacttaagggcaaggtctgaacagtgaagacaattcaaacatgtaatcaaaaggctgtctctctgatcgcaaaaagggtgtttagagtttaatattgacactatgtcgcttccacataaattaaaattttaaatcctgtttaaaattcagttgaatatatgttacctaacattgatcaaatatgagccagttggcaatactcacataactggcactggttttcatatcatgatgtctcatctaactgaatagctgttgttagtgttaagtcctgctggcaatatggtatccatttgacaaaatgatagcctatgtttgtgctgacccattttaccctaaggcttatactgcttctctagaacatttcttttggatgataaacacaaataaataaacactagattgaaaaaaggtgtggccatactggctaaaagatttctactcaagaaagaccgtgattttataactttaccttggaacagctgcttgagaaagaaacaaggcaagagaatccaaataaattattctattacattataaagtcattttgatattatagtttaaaatttttctaaaaggataaatagcatgaataagaaacaaatattctttacttatttgagggttttgtgaagtgaatcctacaaaatctctctaaccaggggatttacatgtttcatttctctttttaattaaaaatcacatacttgagataataaatgaagaaaaaaaatcctgttaacacacacccctgttaatgccaaaaggagtcaagccccataaagtcaggaaatgtcaaagttaaccatcttgtacaagcaaatgttcactcacctcattaaacatagatagcattttctttttctactttattaaattacaaatgtacattgagctttaactgtttatttgtttcagaatattctacaacatttataatgcctagtacagtgattggcacacagtggtcactcattcaatgtttgttaagtaacgatgaacggatgagtggatgaatgaatttgatcacacggcagaaatcatctatgacaaaacatttgtcatgagcttttcagttctcatactctacatatattctttagataattgacatgactgtatatttactatttatattttctagtactgatgatcaggtcttcttggcacatagagtcagaaactctagaattgaggcttgagagtgggctggactcttgttggagttctgctcttccatgcagggcggaaaaggtaacgacaaaaattcctctcccaccctctctctcctactcaaacttgtcaaggcaatgactgatacaaaacagaacctactgtttctcactatgtaatgggagtctatgaagagcttcagctgtggagaggattgttaagtttcgtggaagtagatgcagtaaacataggagcattgtaagagatgattgttttagaggatgagtgagtggtgtaattaagaggacaaccaagattactttgccagactgcagtctattccatcctgtgataagttgtgaacgtttctttaaacgactggcattatataaatgttttcacagtaagagtcaaaaaaggaaaataatggaatggctgcatttcacaactttaggaaagggtgtattctgtttttgtctctgtttcctgtagtagttaagagtttttctgtgtttgaactagagttttaatgagatagggcaccttcactaaaggacttccatgccagaactctttctgtattaatacacaaagaaatagttcaaagtaagctttgaatttggagtcaatatgctgatcaagtgcatggaaatattttcttcttgacatacagtgcaccgtgccctgaaggacaaatataaattacaagttctaccctgcatccatcagaatgcccttaatcacttaaagattagcctatgtgagttagaaatatgtgggtcagaaataatgttagcttatcccccaggggtgccatctcaatagattacaataagtacagtgccccctagagttgtgcaaggcagcggttctgtccatgggaatctatttcacacacatccacaaaacagaggccttttcacagctctggaaagattcctctaacttgctgaaatagaacaatggcttatgaaaatgaattaaagttcttgaaacaaaatctctaagagaaacatagagatagaaaacaattttttaaaaatatttcttaagagaaattgaagtttacctcaaatatattttcctaccagaaatttatttctgagtctgtaacaggccaggaaagaaattgattgtactcttttattatctaaatttaaaaatatatccatagtttgagctttaaaactatcaccgacatattacatattttgaaaagatccaactaagggaaataacaaaccccattcacaaacctggcctattattagttcacttatctgagctggatcttctaagatcactggtgatatctgaagacacagaagaatgagaacctgagggcctcctggctcagaacgagacttgcaaactacatgaattcaacaaaccttattaagtaacttcatgccatacctaagcctaattctatctgtggaatatcttatgggagactaataagctgtgatcagaaaatgtctgattactatggaatctgaaagctcattaaaataggctgaacacactgagtgagtgggaagaagacagcgtacagtgtaaacattctgaggatagttttcctcctttctggaaactacaatgaaactgaagaagacagaagtggggaaaagacacaggtcagcaggcatgagtgcagttttgagcctcaaaaggggagacttgcttgagaaatgcttcaatcaattttgctaataaatttctgattcaagaatgatcctcttctatcttctcccttcacgccttctcctctctctctccctctctcccatccaccaccacattttggccattttcttgttcctttacattttcaccagaggccctacagggaaggataaataactctctaaaataaaagccttggaaataataaaaagtctaaaattagagaagttgttggctaaggtatacccacacaccacattcagctatctcccaaacataaccaacttctttttaactgtgcaaagtcctgaaagagaatgtttcacatcataaattacatcttgaatcttatttcagctcaggctttatctgtcaacaccctttaaagaacttaatcatttattagcatttggcatgtttctctaaaaataatcaactatagcatattagctacacagagatacccttatatggttttctttgtgaattgaagaacatggctccctggcctggagacaacagggtcttggctacgttatccttttgtacaactatggaaatatcttcaatcttgaaagactcattttaaatgagcaaactgagaaatgtaaaccttttgatagataagccttaccatattgaaagaaaaccttaccttgacatttgtagaggcttggatttacggagtgaccaagtggcagatcaaaggcacacacaagaaataccatcaaattgaacctagggaaccttgcattgcccaaggccaagtgcttactgaccattttgtcacagaaatctatgaccaacatgtgaaacagtgaattgggaatatgaagtctgagtttctggttgatttgaattctgctatcaacctgttatctgactatgacaatactttaatacagaaggaatcaagctttctttttctttttcatttggacatcagtaaaaatatgagtggaaaaagcccactactcttatgtcttctgtataacatcatttgtctgaagcatttgtgtagtattgacagttgcagccactatgatagatgggtgtcagggtatttgctgtattgttaactgattccaggtcattcaagctaaaagcctggcttttaattaacacgttttaaaagttaatactttaaatgcacttaattggtgctccttaaaaattattttgctttacataaatcatacaggttccacttttggttcagaatgcttatgctggtaaaatatctttaaatattactaaaatatttcagttacttgactggaaatgagaacattgttattaaactgggataaattagactcctctcccaatgatacccttacttcttgtgttgctatatatgcatatgcttcagtttactgattggaatatgtgaatatacttcagtttactgactggaaaattataacttcaaaagttggtggtgttccatcaacttttacttttaactacaaaactagttaattatacataaacttgttaagtaccagaagtagtctaagaggatagtgcaaaaggtaaatttgttcagaaagataatcctgattgtgtcacaagcagaaaatgtctgattacctgccaaggtcacttcactcgaaactcatttgtgggttcagtgaagcaattccgcattttgacataccagcattttaatgttatatgttcccacccttaactagttaaacgttaaagatcagcagttttgcctttcagaactatgaatgcagcctctttgcctctaatagtagcctacagttcttaactgtaaaaccatctagaagcactccagtgggtcaccagcctaatttctagctctccatcaccactggacacctgattacctttggatccttaccaaactagttaatgtggatattggtatttgtcttatcagtttgcaagtagatttgtttttaaatgcaatttctttacacataaaggaagctatatttgagagctaacttctttaactcagttatccatgtaaatataacataaagagagttaataaaattcagaagtaatttaagaactcactatttgctcaagaatttttaacttctcccaacctacaaccaagttttgttaaatatcattgccaaagcaaaccaagccaaatcaactaaccaaccaaacaacaacataaacacattgatagcatccccaagtatacccggctgtcttgctttttatccagctttgatatctatgcttctacaacttagtagtggaacaccaggctctcatgtgaacaaatatctagattaccccatttattttaggatatataggaagggcaaaataagtagcttgtgaataaggagaaattcatcctaacgtcaggtagtcaagcactggcttttggttctgatgtatatgtagactatgtaaatattaagcatggtggcccatatacatattacagataaacattaatatgcatttacatccatattgagatattatataaaatagtgattaataccaagagtacaagaataactttctagcacaatatggcaatatctttcaaaattacaatgcacacacattttgatttaataattccagttataaaaatttacccttcagatgtagtcacacatgtgtgcaaagccatatgtacaaacatgtcgtttgtagtcatgtttgtcacgacaaaagctggaaaacaaagaatactcaaaacgcacatacacacacatacacacattttaataacatttatcatttcttgctatatgccatgccctgtgccaaatgatagtcatctttttacttatatattcttataaaacttaacattttaatgtatgtacatgtacacgtgcatatatatttaaataaatatctcctttggatgcctgaagttttcattgttcttctggttggtgttgtgtaatgtaggcatagccctagtgtgtgcctatgagaagcgtaagcaacgcttattattttctgcatgtttacatgagtttaaagttcttcagcagcctcaacttgctaagtgtcctcagacacttccctagccttcaacacaggatttcacccacaacacaggagacctgtgagagtggtatgattcttcctaaaagtttccagggacccagctccttgaggaagtccaggcagatcagacatgtttcccaatgcttttcagcttcccactgcagcaactccagataaagtcccaccaattccacagcctgaagactgtagcttccaataagagctatgacattttgtgatttgtcaactttactgaactctatattcattaaactctagattaatggaatagattcacattgacatttctgggcctctgggcccttagtgtgccaacaagagagtaggagaatttcacaaacccccagaaattgtgtatattgaattctcaaagagaattataaaaccccaccaaaaaaattagaaatcactggtttagatttaagcctctcatattaggatatattaaatatagccttcataactcatttaaattacttttttctgaatgatcatacctgactactctgaaattctaaatgcattaaaaaaactacgttgccacaattatttaggagaataaatggcttttaactggtcctggatttgatattttggtaaattaagccattagaataacttccactgatattacacactacagaccagctgaagggggtttcaagagaccgaaatcctgactcaaattaatttctgaaaatgtttaccaagtattctactgtgggatagcatattatttgccataattccaccaaatgctcccaaatgagatcctaaaacaatactcaaggttggagatgaccatgcagtgcctgagcatgctttgtgcagtgggatggggtggaccacagggtcttgggctggatgatctgctttcaagccccagtttcattactttgtagtggtatgacattaggcaagttacttcttcacctctctgacaagtagtttgcctagatctaaagcaggaatgataacgatacctcctctacagggttgttatagtgacttaatgaaataaaccaagtgcctagtgcatcattaactggtagccattattatgatattgtgtctcaagctaaacctaaggccacaaggtaggattcaataatgatgaccttagtgatgggacgtaatgtgatgaatgtgtttgtgacccatgtagattaatggatggacagatttataatgactcattggcttatttcagaagtaaaaacacagtcatgttaagactggatggcttcagggaaaaggatgtaacttcctagggaaatcatatgggagtttgaaatgaaagggaaactgtatgacctcttggggagtcagaaattctctagtttattacaaatactcatttaaccagacagaggaaataagatggttctggaagagctgatttatatctgtcctggaggcagcacaccagaactaaaaaaatgttctcaatcccaccttctacacagcacttcagctactgtctgatttagaaaggtttctaactgggctggacatgtggggtttcctgaccccctaaacagaactttcataaaatcctgtgccaacctagcaaaactagattttaatctccctttgggaagagatcttgttagatttattttaaatttatcacaacaccttgtactgaaaagttctcaattcggttttgatgaattgaattgaaattcctttgccaaattagaatgggaagatttagtttgtgggacgccttaagaagtaaaagggtcacttctggccctcatggagttgtggctgcatttagagattcaatttcagctcttaccaagtaaatcctcacagttcatcagaatcaattgccatacaggattttaggatttcttcaatcgattcccccatttccgggggtgattccctttagagaaaactatatcctaatccactctcaccgctaaacctcagaaatgttcggaattccccttaaaatatagctattgggttaggatttttagagatttatgaagggaaatttacaggcatgccttatggtaactactcctgccaataggtcaaagcattccctacaacatttcccaactttacattccatttttttccccttgtactgaagtactgaagtcagggctagctataggcaaatctgcaaagcacaattccatttccttacactgtgattgtgtttttatgtgcaactttctattgctgctgctgctgctgctgctgggaaagttttaaatattttcatatgtctttgaaattttccaactgttttatttagactgcttttttttttttaacaccataaagcctcagtaagtgggcactggcagccttattgtggaattgaggaaactgaggcccagaggtgctgggatgtgtctggagttccaaagcaacctggagcaacctggctctttgtgtgtttctactgacgcccatggtaatcacacaataatgttaactaccgaaacccttacagattttgagtgctccttggtcttgtccatgaaataattgatggggtgccatcatatagcttgcactttggaacctgacagattgggtctgatccccagctccacctctaattcatttactttgatcatcctaccagtcatctgtaaactaattgtaatatctacttgtgggctgctggaaggaataatggaagtaacacatctcacccagtccttggcccactgtagatatttaatacaaagtagctacagtccgtcacagcaggtgaactgtgtttttcctactcaccagtctggatctcttttttccaggccatttatttcctaaatacctactttgtacctgctactttcaaagtcttccaaaacagtccttcccaaagttagtgggcatatcaatcacatgaagatcttaagatgcagattctaacttagtaagtctgaggtagccttgcattcctaacaaactctcaggtaatattgatgctgactgtccatggaccacacacttttgactagaggatgtaccccattaggtgcacttagggactagatccttcaggactagtggttctcaaactttacagttcatcataatcacataaagggcttgttaaaatacaaattactgtgctccactccagagtttctgattcagtaggtctggggtgaggccagaaaaatcttcatgtgcaccaagttcccaaagtgatactaacattgctagactggggactacgcttgtcctaagcttagcagaggtctactgaagacctgaatggaattttattccaatggttactgacttttatgagtggacagaaccaaatggaatttggttccaaagattactgacttttaggaggggcagaaccttaagagggagctaaagggaagctccctctacaagctttctcatctccccgtctccaaccaggcccccttcctcaagcccaccatgatttcagcaggcgccctttaccttgtagacattgatagggatgtcaatgacgatgtgcagcaggtctcccagagccaagctggcgatcaagatattgggaccgtttcgcatgcacttgttcttgtagataattctcagaagtgtggagttcccgatgatccccagcacgaacacaaggcaggacacaaccgtgttgatgtatttgaaagtctccttgatctcgatgggtccttggcacgggggaggggagatggtgcgtggcggagatcctgccgtcctgtctcctttaggcacctccgcaggtgccaacgaccgcgccagactggcgttggaacccttgggccataaggtcttagtgggtggcgtcattatctctgcggtttgcaaaagcggagtggccctgtcaggcgggaagcctctctcctctccccagatccgcgacaggccgcaggcaagaaccagcgcaaccagggcgcgtccgcacagacttggaggcggctgcatgctgctacctgctccagaaggcgtccggtggccgctccgcagtttcagagcctagagacaagcagaggaaggaagacaggacacttgggtcagctgcccgagccaagtcgctgcaaacgctaataccgcccgcagcctcttcgccagtatccacgctcaaaagtaactcaagtttgcgcgccagtgggaaacttggcgctcatgactcgccagcgcgggtcgaaactccttcctgatgccctctcagctgtttttcttcccccgcgtggccaggaggggtaaataatatgcagtggggcggggcgttctggaaggggtgtgccagggagggaatgatgggggtcccaggcaaagctccgaactctttcacgtaacgggaggaatacagacacgtcttagttaagcgtgcgtgggaaccgcggaattaaggcacctagaggccaagggcttgtgtcaagctctgcattttgccccgcaggggaacctctataccccgcgattgaactcgaaagactcctcccggcggatgaaagccgctactccctggctggctgagctacagctcccgcagcgcgcccaggagtgcgccggagattcggaaacccgcagagacttctcaagtcagcaggaacttggaaaccgctgttccctccaaacggcttcaaacactcgcgctccttcctttacccaacctaattttaatttgccctctctataggcttaatttttatttttttaaaatcccaaactagtaagccaaaccgaagccccagaataaggttcaatcaatgattttaattcaacaccaagcccgaatgtttacctctcggatctgacaaaccagatgcagagcgacgaatggagaccaccttcccgggaggcggaacccagctgggttccagcctgctctgggagaggagcacgcctcccttgagctgcaggcgggtccggctctgacgaaacgctgcgagaatgccagacagtgtagcctccaccgtttgctcggggtctctgctgccatcagacaagtacttttattcattcatcccttcccatcaatcaccgccagactcctcccgcgccttccgaccccgctgcaacctttccccttgggcgatgcctggacagcatcagtagtagttgcccgagggaggggggcagtcctcgtccggggacaggtcccaaaaggctgtttatttgttagagttctacgctcttcaaatgaacccaaatcaagggcaagttatcacgcaccatgtgacacccggcagctccagactagaacaaggctctgcactgaacgtgataattgaacttttaatgccaagtgtcacttttctttcaggtaaatgttccgccgctgtgatatttaaggttggtttgtgggcgctgctctttgctctgcttcattttgccctgaagtttcatttcaagccaacattaaccccaacacggaacagctcgatcttttcttcccaggccctctcactgccccgagagaggattacaagtactcctcattttccccagtacagctcttctcctctcttcctgccacagtatcggtgttaggcaatctcaggcatttttatactgtacctatgacagacttgatgcttatcggagacatgaaaataatcagaaagctgccatgcaaattcaacatgatatttatttaccaggtagagcaatacaataaggtctttctatccattcttgagctccatgtttaccgcagagaggaaaataacagcgactggtagttttgcccagagattgtataaaagaggtcaggaagtcaggcttggagatgcactggagagtactgtgccgtcctccaatcagcaaaatccctactggatctgtggaacttcaaacccagaagcacccattccatgtagcagtttcacccagagacaggaggctcgttttttgcttcatgttagttaatggaatagatgggacaagaaccttggatttttggctcttaggcaatgctttctgggacagtggaagtagaaaatcaatttctatttaaaaaggtgaactttaagtgtgaaatgtggttaggaacatggttacggagtaaggctaaaggaatgagaaatatggtctagggttgtgagtgctaattccaaatctggctattttgaattgcagtccttatcctccctgtctcgtaagaacgaggtcaacattcaattgctgagccaagtaacaatatacaatgttgtctgaataaggaattatatggaagctttggaatatgaatattttgcttagttgactccacccagtgttggatctgcccttcctatacaagctttgttgggttcatgcctatggctcctgtggggtgacttttctctctccccactggccttctcatcatctccatctccattcaaatttcctccactgagtcctggaagtctgctctaatcctcactgaggtctatctctttacttttcttggagcacttttggactgttaaccacaacttagcaagcacttgatcacataagagacatctatgggtcactattgatttcgtgtgacttaatttcttttacaggacagggacttgaatgagttatatgttctttctgcaccatcccactacctgccacaaaatgagcttaagaaatattttttataaattgataatgatattttaaagtattcagttatactttattaactggtcattgggctcaagaataaggccaaacaattttaaggtaaatatacacattcctcatttggaatttaaaacacagtatcagctactccttacagggtctaccacctgcattagacaccttttcacagtacctcattgattctctgatgtttgtcttccagctctgtattattttctatgatgttataggcagtgaaactgagtctcagtaattcacttaaggtcatgtggctagttagttgtgggaccaggatttggagctaggatttgaatgcatgtctaaatggttacacagactatgctttttattattgtaattgcagaaagcctaagcaaatttttttcttattttggggaaacagtgttctagacatcagtaatatgcaattgaagtttaaccttaaatatttcaccttaacatgtaaagacaaccatgtgaaatgtaaagaattgttcattgatcttcatgaatgactgggtgtcagtttccccttttgtaaaatggaagaaaaggattaaagttacttcttgctccaataaatcagtccgactgacaaactgcctctgtaggagtgtcttaaagtgcagaaaagtggaaacagattctaggccaatatttttttttaatgttactttcattactcatgccttgagcagtactgctatggatatagtttttttttcatcttattacttaaaatctgttatcgataaattttatttatgaattcactagcaactaactactatgtaaatttcacttctatatatgagcaaaaagttgtatcaaattttaagaattcctacctgcaaacttgtgaactaattttgcatttatgagaggattttttttttttggctaggtaaatgtggagtcttttacaaagttgcttattttaaacgtttatgaagtgtctaggaaatctatcaaaattccagattggctaagatcacttctcaaagttagaaagttgaagatagacaatgtcccagtatttcctttaaatgctttatctagaagttcctgaagacagggtttaatgcaattcggaattcatttctcaaagaggtttgccatggggagcattcccaaaataaaccttttcgcctggtgacagaacaaagaaaagcccttttagccacacaaaaaagttagtactttcatgtaatcctcttgaaatgaatgtgccctcaaaacctatgttgaactctctaaatcatgaatgctgagagacaaggtgtgcgaaaaacacagaaagagttggttcaactggttctccacatattcctctgggaccagattcaatgatcaaatagtggttgaagtaagagaataaaaaagttttaaagtgactgcaaaagtcaatagcaaacagcatgagaatttctatttcttgagttttcttttctattaagtgactgtagctatctggatccatgataaagaatcttttttaattaagtataatgtatgtacagtgaaatggacagggcttaactgcagcttgaagagttttgccaaatgtttgcaatcctgtgacccatacctaaggggctctttgaaaattcatttattctttaaaagtggtaaaatttgaatattttagatttggacgctattcctgttaaaacgctcattaagacactatttctgctttatcaacttatctgatacatcttatcagcttctataactaaaatgtcactcataaattagaggtgtgattaaatgagagaatctgacatttgaaacgttatcaatgattgcttgatggtaccaaattacacttcattccctgatgtaattaaaatttgataggtttaatgtaactagaaataagacttcattaattcttttctgcctatagaaaatatgagaaacagacaggatacattctttttttctgagaaaagcaacatagttcagctattttaggctatggtctactttaattaaaattagacaataatttgctttcctacttataacttaagtaatttttatattcctttctttgacatattttttttcaccaatctcagtaaaacaaaaaatgagtgtaacctggtctacaaacttcttaaaactgttcacagaacttttgtaacaactttgaaaagatattagaaattccagtctaagaaggcagtcggacctgtgccgtcttggtttgtcaatgcacactgtatttattaaattattcttaggccactcagtaatggagaaaacactatcattactgtatgtcagcacagtcttatcatgtgtaatgcactctttggggagttgttatttcatatggaatataatttataatgagtttatgtattttctgtgactctaattgttttctttaatttttacctttccttgtttccattcttttgatacctgaatgaagtgtccaaagagatgtgaaatagtcaaaataggttagaaagcaaaaagaaagagaaacttggatctttagctatttactggtaaataaaagagaggtactttttttttttttttaaagaaagtaaaagttatttgtagtacagaatagaatgtgctaggagagtccaaaaaggagaattcccacagcaggctttttttcttcttcttttgtttttaacaactgtacttaatcaatgagatactttaaatttcatttctgctaattattaagctctggtaatggaaataccttttaatcaaaatctgccaaaatctgtaaaaagtttccgattatgctttgagatttaattgtaggggaatagaactatttgtatgaaaatttaaagggaaacaatgattttactgagtgtttatttactatacattagatgaacaatttaactttcaggccaagagtcatggcatgcttttgtcaaagcgagggatcatctggggcttgcaaagccatgccaatttcataaggcgatttttgcttatctcttttagtgatgcatgtatagcaaattgcttcttctcttttgggccctgctagagagaacaattattgctatccgtgaagaaagtgattctgaaatggctttaccagctgtgaattatccaaagaaaattactcacagaatctcatgggaaatgcacaggcgacttacttcttatgagggcagcagataatgcaaagctggcatttgagggggacatggccaaggtaacaggtgccaagtaccctgcagagaggtaggcagaatatagaaatgggaaatccaagaagcggttaattccttgagtatcttttaatgtggtaaaaaaacacataatataaaatttaacatcttaaccattttttaagtgtacacttcaattgtgttaaatacatctatattgttatgtaacagatctctgtaactttttcatcttgcaaatttgaaatttgctattaaagaatgatatggtttggttctgtgtccccactcaaatctcatctcccataattcccatgtattgtgggagggacccagtgagagatgattgaattatgggggcaggtctttcctgtgctgttctcgtgatagtgaatgggtctcacgagatctgatggttttaaaaacgggagttgtcctgtacaagctcctttttgcctgctgccatccacctaagatgtgacttgctccttcttgccttccaccatgattgtgaggtctccccagctatgtggagctgtaagtccaataaacttctttcttttgtaaattaccctatcccagatatatgtttatcagcagcctgaaaacggactaacacaaagaacaactccccatttcttcctccacccaatccctagcaaccaccattttaatttctgcttctatgaatttgactactttagaaatctcatacaaatgaagtcatactgtacttgactttctgggactggcttgttttatttagcttaatgtcctcaaggttcatcaatggtgtagcatatgacaggctaaattatattatttttaaggctaaataatatcccactgtttgtatatgccacatttatcataagtctgcaaatacctcttttaattcttttctccgtagatccagaagtgggattgctgaatcatatggcagttctattttttaatagaggtatttgcagactcatgatcatggcagcaccattcacaacaaccaataggtggaaacagcccaaactttatgcatggatgaatgcacaaataaatggctaaaaggggccaacatgcagctcaggctgtgccttcagagggtggaagccctaagccttggcaccttccatgtggtattgagcctgcaggtgcacagaagtcaagaattgaggcttgggaaatctctgcctagatttcagaagacgtgtggaaacgcctggatgcccaggcaaaagtttgctgcaggggaaatgccctcatggagaacctcggctaaggcagtgtagaagggaaatgtagggtcggagcccccacacagagtccctactggggcaccgcctactggagctgtcagaagagggccaccgtcctccagaccccagagtggtagatttaccgacatcttgcaccgtgcgcctggaaaagacgcagacaatcaatgccggcccacgaaagcagccagaggcgaggctgtaccctgcaaagccacaggggcagagctgcccaagaccatgggaacccacctcttgcctcagcatgacccagatgcgagatatggcatcaaaagagatcattttggagctttaagatttgactgcccttttggatttcagacttgcatggggccggaagcccctttgttttggtcaatttctcccatttggaatggctgtatttacccaatgcctttacccacattgtatctgggaaataactagcttgctgcacacagcatggggaccctgggacattttccccatggtctttgggattaacattaggatccttgctacttatgtcaatttctgtagccggcttgaatgtatcctcaaaaaatggaggagaaagaaaatgggtttttcttttctattgcatcgtcaggctgcaaattttctaaactcttatgctctgtttcacttttaaaatggaatgcttttaacagcacctaagtcacttttgaatgctttgctgcttagaaatttcttccaccagataccctaaatcacctctctcaagttcaagttccacatatctctagggcagggcaaaatgctgccagtctctttgctaaaatataatgagagtcacctttgctccagttcccaacaagttcctcatctccatctgagaccacctcagcctggaccttattattcatatcactatcagcatttttgtcaaagccattcgacaagtctctaggaagttccaaactttcccacattttcctgtcttcttctgagccctctaaactcttccacctctgcgtgttatccagttccaaagttacttcacatttttgggtattttttcagcaatgccccactctgctgttaccaatttactgtattagtccgttttcatgctgctgataaagatatactgagactgggaaggaaaagaggtttaattggacttaaagttctacatggctggggaagcctcagaatcagggcaggaggcgaaagacacttcttacatggtggcagcaagagaaaatgaggaatatgcaaaagcagaaacctgtgataaaaccatcagatcttgtgagacttactcagtaccatgagaacagtatgggggaaactgcccccatgattcaaattatttcccgccaggtatctccaacaacatgtgagaattgtgggagtacaattcaagatgagatttgggtggggacacagaggcaaaccatatcagtatataagataagtacatccctatctatttatcttctctggagaggttgttgttgattacctagttatctacttctcatagtagacgcctgagattcaagcatcactgtgggatcattgagccctcaggtcctagatctagatgcttgagtaagttcagagaatccaaagctgaggtaggttgagggctggactattgaactttatcctgtcttgttctagattaacacagtgactgggcttgcctgaaattatataagaagagtacaagttgacccatctgggggtgtgaggttgaggaagtctgtgtctaggaactagaacaaagttgggtactcatgataaatttaagacaaatttccgctttttgacaatttggcaagaaagtagacctgatatttaggtgaatttgacaatcaggaacctgatataggtgtattcatatttttccaattccaaattagttggaaaagtcagtgaatgattatcattactgggatgctttgcatgaaattcgtccacagcaagagctgtaacatatttagactgtcacaatttctgttcttccagtatctttatccattcattaatctagatattcacaaggaataatccatagcttatgatagagtcaaatatttgtaagaaaagtgttcttattactcaggtattgataaggtctggctgtgtccccagccaaatctcaccatgaattataataattcccatgtgcatgagagggacctggtgtgaggtaattgaatcatgggggtgagtttttcccatgctgttctcatgataatgaataagtctcatgagatctgatggttttataaatgagagttcacctacacaagctctcttgcctgctgccaagtaagaagtgactttgctcctcctttgccttctgccatgattgtgaggcttccccagccatgtggatctgtgaatcaattaaacctctttactttataaattacccagtctcacatatgtctttattagcagtgtgagaacagactaatacaggtacatttaatcatttgtatgcaagcaaattagacaagtaattaatgttttataaaaatttggaggaataagacatcacttttattatatatatgagtgggggcttacttcatattttattatactatcatcatattttaaagctgtactgttaaccactgtcttatatcaagaagcaagtaacctgatatttggtgattttgattttccactaagaggtacacttaggaaatatttcattccctttatttatcacagggtggtttcagtattgttaccaaatattttgtacatattttttcatgatactatttttttggtgtaaaattagctaaagaatatgatattttaaggagtttcgttttcaagaggaatgtctttcctgaaaatgtttaccactggagggatcaacaatgtgtttggcttaaaattagccctaacaacacatttaagttttttaatctaaaatatataaatgccaatgaatttgccagaaaaatacaactggcctttttccttcagaattccagacataacacagcttctctgaagtcaagagaagatcaagtctgagaacaatgctattcttacctttactctagggaaaagctgaatttgctctagggataagaagcaaagacaaaatgccattgtcttagtgacgttttcaccaaatcatttaagaagaacttccaaagtatttcccaaaatatgtcaaatgcttaatttaaaaataacaaaaaacatcttccaacctctcacttttaaatcattttttatagtgattaaatttacttaagttctaggccattaacaaaagatgaagtggcatccaaagtaggcattttcagttgagaaactcagtcctatttaaacgttcatcagctataaattttaggttcagacgttgatgaaggtcaaaaggttagtgattcatttcctgtacttgtcactctgctgcttgttatgacacatttctggaagtgactgacaacagaaataatcactcaaaggtctcaattgtgtgacatgagcaaatatattttaggctccaaaccatgaattgttttgattattagaaatcctcatagcatacaaataagaggaccaaaatatacagggccttatcttcccaaacagtcatctataggacatagggagaagaaggaaagataaatgtataaggtctggtcatggtagatgcacctatccatctatacatatgtgagaatattctttgatatttccaatattttgttggcatcagcttgatctcataatgtaacgtatgtcctctttaggtggcctttattttcctaagagaacattatcatagatttccccttctgtaactaatagttgccattaagatttggggactaagatctgtctatgttagagcaatgaaatatcagctatcttagttcttctgaagtttagatgctggttcatgccctgaaaacccatttgtacaaggcgggtgactattccaacactttcatgctaacagccttccacttaaacctctggtcaagaaacaggaaagaatcatgcccttttgcaaggaaaggagtctgggaaagaggagagcatggacttcaggaacgctgactcctggccatttacctacctgagaagccttatgcaaatcattttacctcgatatatcctctgggtaaaagaaagagtaagaatagtgtctccattgtgagatttaaattctattatgtttgcaaatcattcagtatagtgcgtggaatacagtgattgtctaggaaatgtcagagatcatttttactaatatatgttctggtttctggaagataataagaagagaacaccatcagacctcgtgataaactttcttagcaaaggtgcaggcttggaatggaattctcgtagttatggattgattgaaagctaagtttatgcaattattggcattggtggttatgttggattgcctttttttttgatgatcaactatacgaggagcaggaaatgggcaggactgactgcctcagttgttggtttactggtctgcaaaaacatggttcaggtctttatgacaattcaacaataagcacttgaaaataaaccaagaaaactgaaagcagtaaaaaatagtttagtagacagaagattctgcatcacatacagagctacatagattcagatgacttgtttatttcaagaagttcttaaaatgtacttacatgcatgaagtatgttcccaagaagctactttcagagagggttatatggataagtggtctgtgatagtatcagttttaattattacttcagaacacctcttcttaatttatatttaatattaataaacatttatgatatggaaccaaaaattagcatgtctgatttcttaattatttggatgtttgttctcaagaagacaatagtgttgtgatggagagatggtttcaggtaggaacttccacaacagtagacataaaccatgcacattagtgcagagctgaaactgaaatcatgtcagaaatgttgagtttgtaacttattaacttttgaaaagtacatacaacaagctatttgtaaagctcagcatttattgatatatctgcaatatgccaaaatagaacttctggcaactctgaaatgttctcagaaataatgagttttggctaaatgcatgcagtgcctgaagtttggtctttgaggagtttaacacgcacagctgggtctcgttaatggtgccagtggaatttgtagcactatctattttatgacacttccacacctacttttaccttataaggtaaagacccaaactctaaatgtgtattatccataggcctatatttaacagcaaaataatgatttttgcaagccaaagagaaacaggaattcggtctccagatgctgtttttgaaaagcggcatctaaatagttgctgcccaatgtcatgatcatgttgtttactaagataatttcagcctgttttactaaagccatcgtgtaaggccagatttctatttttttaataatacatctaaaacagttacatgtgtagttgagactaaaataaaaataaagacattaatggaaaggctgagttttattagagtttgtatttaaagtcacactcccaaatctgcctttccttgcattgttgaaaaatttcacaagttttctataagaagtcaagtatttttttttaaagtttgaataaacctgcttataaatgacattcttggaaaaactttggaaatagtctcccaaagactatttttgtatgatataatccagccttactggctgtagctgatcggtgggggaattacctgatccaagctttcctctcaaggaccttctctgaggtggttttgttgttgtttgtttgttttcaaagtagatcagagaaacacttttttataggagacatcagtggcctctaacaaacgccagggcgtctaattgtgtcagtgcacaattagaataatgtaatcaactaaccaagagagggagagaagcactcttgctgaatttgagttccttcttccagccttttttgagtctcagctacagctctatttttccttagcattgaaatactgtagtagcaaaaaaaaaaaaaaaacaaaaaaaaaaaaacaaaaaaaacctcctctttttatcaaattattttcagtagggcatttttcaataggcatagcaatgaaaatagttatgatttgtgcaaaaatcatgaataagaactgcacgaattagctacagctttctttagcaagagatagtagctcacaagttagtttttatacaactgtttctgtaagatttaattctattttctacaatacaaagaaaagataaagtaatatttgaatctggttttacaacatagacttaattatgttggtgaattattaaaaaaaaaaaaaaagtgaagaaagagccagttgagactaggttaggaatagacccaaaactggagaagagagaagtcttgtcttttagacactggctgcctcggaagaggaagatgaaagagggcacacatatgagggggtgaaaccaggactggggaccaaagatgctgaaagtctctggagtaaagtggacatcaaagacagctttatgtctttttcaatcttttcagtgtctctccctggatcaaatttatcagaacatatctatgtagggacatgttgaaaagatatgggaaatacccatctttatggctaatttaacacgatttattatttaaaacaataatggtagaagtggcttccatctattgagatctcaatgatgtgtcactccctttatttatttatgtctactttattaaagtcttacaaaatccctgtgaaataggtattatttctacagtgttaaacatggtaataatactgaggctcagagaagcctgtgcctatggctacagcgtaagacagacagatctgggaccttagaccaagtccatctaactccagtctcacacttgtaaccatatattttggacattgaaattgcatgtgtatgtccagtcatagcttctttgcctgcttttccttgacatactttttgaaaaggactataaataatcaagaccaaaaatactaagtgaatctgttcaataattggtgtttgccaaagccgtttttctttcaatcccattttaaacagagctcaactttaatgttttaattacatgcatttctagttcaattcaaatctctctaagattaaaacaaatgaataaatcaggaagcataatgacttttggagaatgtccatttataataaatctgttatgaccaactaaagaacacataacattaaaaaagcaaactttgctattttgccaagcattaaaatatgcaaatttccctcgtgctgtgttatatatgtttaagatatgttgatgacatgggctattttgaaatctctgcaaatatcctttttaggaaatatttgtttctgtagcaattctaagatactagcaactcatatgcccatttcaaaacacctgtgaatatcacatataggttacacttcaaaatttaacttgtggaacttttattctggtgagcagagtttcatgcgcgtccgtgtgaagagaccaccaaacaggctttgtgtgagcaataaagcttttaatcacctgggtgcaggcaggctgagtccgaaaagagagtcagcgaagggagacaggggtggggccgttttataagatttgggtaggtaaaggaaaattacagtcaaaggggggttgttctctggcgggcaggagtaggggtcacaaggtgctcagtaggggagcttttgagccaggatgagccaggagaaggaatttcacaagataatgtcatcagttaaggcaggaacaggccattttcatttcttttgtggtggaatgtcatcagttaaggcaggaactggccatctggatgtgtacgtgcaggtcacaggggatatgatagcttagcttgggctcagaggcctgacattcctgtcttcttatattaataagaaaaataaaatgaaatagtggtaaagtgtgaggatggcaaaaattttgggagatggtatggagagataatgggcgatgtttctcagggctgcttcgagcgggattaggggtagcgtgggaacctagagtgggagagattaagctgaaggaagattttgtggtaaggagtgatattgtgggactgttagaagaaacatttgtcatttagaattattggtgatggcctgggtacggttttgtatgaattgaaaaactaaacagaataaaagaaggagaaaaacaggtattaaaggtctaagaattgggaggacccaggacatctgattagagagtgcctaaggaggttcagcatagccttgccagcaaagattatttatttactttaagagttaagagtggcggtttggggttagcaccaagagatatcagctgtgatggcttggagaagcagcgtaaaccatcagtgtaatcaagagcagggcatgtatgcgtagttgagaacggtcaataggagtatgactagagagaataaggagtgtccatacaggagcttaaatgggctgtaccttgtagcattccgaggacaggcctgaattctgagaagggaaagtggtaaaagtattgtgcagtcctttttaagttggtggctgaacttggtgaagtgtgtttttaaaagacctttagtccgttctacttttcctgaagactgaggaccgtaagggatataaacgtttcactggatactacgagcctgaaaaactgcttggctgatttgactaataaaagccggtctgctattagactgtatagaggtgggaaggccaaactgaggaattatgtctgacagaagggaagaaatgaccacggtgaccttctcagaccctgtggaaaggcctctacccatctagtgaaagtgtctactcagactaagaggtattttagttatctgacttggggcatgttagtaaagtcaatttgccagttctgggcaggggcaaatccctgagcttgatgtgtaggaaaggggggggggggcctgaatagtccctgaggagtagcagaatagcagatggaacactgagaagttatttccttgagatagatttccatgatggaaaggaaatgagaggttctaagaggcaggctggtggcttgtactatagcatagcctggctttgctggtgtgtggtgattatgcctggtggaactgccatcaataaatcaagcgtgatcaggttgaggaacaggaaagaaggaaatatggggaaatggggtgaatgtcaggtggatcagagagatacagtcatgggggtcaggtgtggtatcaggaataatgtgggaagctggattgaagtctgggccagaaacaatggtaattgtgggactcaacaaagagtgagtacagctgaaggagccggggagcagaaagtatatgtgtcaggtgtgaggaagaaaatagattttggaagttatgagaactgtagagagtgagttgagcatagtttgtgattttaagggcctttaaaagtattagggcggcggcggccgccacacgcaaacttgagggctaagcaaaacagtaaggtcaagttgtttggataaaaaggctacagggcgcagtcccagttcttgtgtaagaattccaactgcacagccctgcactttggctgtgggtaatgaaaagggttcagatgagtcagggagagctagggtgggggcagtctctaaagctgtcttcaaggaatgaaaaagagtggggaaaggatttaggatctatggggtcagctaggtttctttttgtgagtttatataatggttttgttaggatggcaaaaccaggtatctaaagtcgaaagtatctaaccatgcctaggaaggaaaggagttgttttgtagaaggtgttggggtttgagagatcagtcagacacaataggcagggagagcatgtgtgtgtttatgagaattacgccaaaacaggtaacagatgaggaagaaatttgggcttgattgaagtaatgggggctgtctgtgaagccttgcggcagtacagcccaggtaatttgctgagcctgttgggtgtcagggtcagtccaggtgaaagcaaagaaaggctgggatgaaggatgcaaaggaatagtaaagaaagcatgttagagatccagaacagaataatggattgtggagggaggtattgagaataggagagtatatgggtttggcaccatggggtggataggcaaaacaatttgattgataaggcacagatcctgaactaacctgtaaggcttgtctggttttaggacaggtaaaatgggggaattgtaaggagagtttataggctttaaaaggccatgctataacaggtgagtgataacaggctttcatccttttaaagcatgctgtgggatgggatattggcattgagcgggataagagtgattaggttttaatgggatgataaggggtgcatgatcagtcgctaaggagggagtagaggtgtcttatacttgtgggttaaggtggggagatacaaggggaggatgtgaaggaggctttgaactgggggaaaaggcggcaatgaggtgtggctgtagcccaggaatagtcagggaagcagataatttaattaaagtgtctcggcctaataagggaactgggcaggtggggataactaaaaaggagtgcttaaaagagtattgtctaagttggcaccagagttggggagttttaagaggtttagaagcctggccatcaatacccacaacagttatggaggcaagggaaacaggcccttgaaaagaaggtaatgtggagtgggtagcctccatattaattaagaagggggcggacttatcttccactgtgagaattacttagagcatctgtgatggtcttgtaggcttccgaggcaatcaggcagtgtcagtcttcagctgctaagccgagaagatctgggaaggagtcagagagccttgggccagagttccaggggctgtggaagtggctgccaggtgagttgaacagtctgattttcagtggggtcctgcacagatgggacatggcttaggaggaatcccaggctgtgggcattccttggcccagtggccagatttctggcacttgaagcaagatcctgatggaggaagtcttgtaggaatgcttgactgctgcggcttaggcgtgtgcagcttaggcattttgaagttcttgtatgctggaggtgtggctgggttttgtctcacagcagaggcaagtaattgtaactcagaaatgcattgccgtttggctgcttcctattattgtacaccttgaaggcgaggttgattaattcctgttgtggggtttgagggccagattctaatttttgaagttttttcctaatgtcaggagtggattgggtgataaaatgcatattaagaataaggcggccttctggcctttctgggtctagggcggtaaagcgtctaagggttgctgctaagtgggccctgaactgggctgggttttcgtctttaccttgggtagtttctttaagcttgtcagaattaacaggtttgtaagctgcctttttaagccctcaaactaggcaggaaatcatgtaatcttgtctagctatacctggggaatttgcctgatagttccattggggatcctctcagggaactgctctaatgccttcctggaggtctgactcgtgaagccagcggttatcagcgtgagattgggctagagaaaaaactctttctctttcatctggggagagggtagaagtcaggatgacatttaagtcactccaggttaaactgtaggacagagttagatattggaattcctgtatatatttaatggggtctgatgagaaagagcctaaatgctgactgatctgagagaggtctgatagagaaaaaggtacttgtactttgactatgccttcagctccagccacctctctaagaggaaattgttgggcaggtgggggaagagctagtcgtgggactaaactgtaagccggaccaaatgtgaggaggggaggtgataaaaggattatagggtggaggagcagaagctgaggaagaattgggacctaccttagcctggcgatgaggggagaggtcagatgggtctgtagaaaaggaagattagaaagactcagtgacgcttgaggttgggactgaggggacaggcaggagggaaagaaggaagatttgggatgagctgcatcgggaacagagactagggagggactgttgtgtaaaagaatgcctggatgtcaggcatttcgactgtttgcacattttacgacaagaattatttagatcttgtaggatggaaaaattgaaagtgccattttctggctatttggaacaactgtcaagtttgtttggggtcaagcggcattgcagaagaaaataaggcatttaggttttaggtcaggtgtgagttgaagaggttttaatttcttgagaacacaggctaagggagaagcaggaggaatggagggtggaaggttgcccatagtgaaggaggcaagcccagagaaaagagagagtagagacacagagggaaagggtccgggggttcttaccctccagaaaagcgggaaaggagtcagggcacagaaataaggggttggggcgcagagattagaggtcacagcagagaaataagggatggggcacagagataagaggtcggggtatggaaattagggattggggggttcttgcccccagaaaagcagagaaggggtagagacacagaaagaaggggttggggggttcttgtcccctagaaaagtggtacttgctgctaagggtgaaggagaaggggttggggggttcttaccccccagaaaagtggtacttgccgctaagggtgaatgaccaaggcaggcgtccccgcgtggtcagacacctctgaaacatgggtgaataatcagagaggcatccctgcaatgattaaacaccaagggaaggctgccttcccaagtccatgaccagcgctggagttttggatccacagataaaacgtgtctcctttgtctctaacagaaaataaaaggaattgaaattaagagaagggagagattgaagggtggcaccaagattgaaaggagaaagtggttgagggatagtgagagaggttggagaagacagtaagaagaggccacttacccgatttaaaattggtgagatgttccttgggctggtggttctgaggacccgaggtcataggtggatctttttcacagagcaaagagcaggaggacaggggattgatctcccaagggaggtccccctatctgagtcacagcaccaaatttcatgcacgtcagtgtgaagagaccaccaaacagggtttgtgtgagcaataaagcttttaatcacctgggtgcaggtgggctgagtccagaaagagagtcagtaaagggagataggggtggggccattttataagatttgggtaggtaaaggaaaattacagtcaaaggggggttgtcctctggcaggcaggagtgggggtcacaaggtgctcagtaggggagcttttgagccaggagaaggaatttcacaagataatgtcatcagttaaggcaggaacaggccattttcatttcttttgtggtggaatgtcatcagttaaggcaggaactggccatctggatgtgtacgtgcaggtcacaggggatatgatggcttagcttgggctcaaaggcctgacacagagaaatagttggaatcctaaatttggcactttaaacttgtttgatctttagaaaattctctaatttgagttttagtgttgtcatgtgtgtatttgccaaaataatactttcttcataaattcattgggaagattaaatgaagtcatgaatgaaaactgctttgcatgttgtaggtgttccatgatgcctatcttaaaaattgcttgcaaattaaatgagataatgatgctaaaggattcatacattgtaagcactcaacgaaaatatctgattctctttcctagatgttttttatattatggtagcatgctggacttaaaattcttatgtatgggctgggcgcagtggctcatgcctgtaatcccagcactttgggaagctgaggtgggtggatcacaaggtcaagagatcaagaccatcttggccaacatggtgaaactctgtccccactaaaaatacaaaaattagctgggcgtggtggcacgtgcctgtagtcccagctacttgggaggctgatgcaggaaaatcactggaacccgggaggtggaggttgcggcgagtcgagatggcatcattgcactccagcctggcaacagagtgagactctgtctctaaataaataaataaataaataaataaataaaataaaaataaaaattcttatgtacagacccatgttcttataaaattcatgtcatggttgtattcactattaatacagttattcatttgttaagttattcagacatttgtgcaagcgaagaatattaattaaccactgtattccaggtgctattctaggcactgggggttgaatgaacaaagaggaatgacatatgagcttcactataagagattcattggaggtgtgtggtaaagatatgaaaaggacagagggaagacataaaagaggaaatggttaaatttaacctagagaagagtttaatttttttttttcatagagaaggtgataatggggctcagctataaaatatgagtagatgttctccaggtaaaaatggagataggggatttcagaaaaatggaataccttcataaaattttgaaatacataaaaccctctcatcttcctgggaaatttaatctcagaatgcctggaatggcaactagaagatggagttttagtgcaataagtctggcaaagtagacgtggagaaacaggaagctctaatacaccaacttaagatgactgtggtttacctcttaggcatgagaagcatgtatactcacactgcgtgttatgaacagattagtttgtcagaaaatctcattcaaagccaaggaaaagatgaattgggtgtgtgtgtgtgtgtgtgtgtgtgtgtgtgtgtgtgtgtaggtcatgatgcacaaagagcagttgggttaaaattgccacagtctatgagcaagataaagagactttggcttggaatatttgaaggggagatggaaggaggttaagcgtataatttatgattcagaattcacaagatgtggtctctgtgtgcgagttgaaagggatgggaacaggatcctagatgccattctggcatggatccatgttttatactattgattaagacaggaatcctagaaatttttggaaagctacaatgatttcagttttggtctagtttaatttatgatgcctgggagatacctaggtgtgatatctggttgaaacctggaaatgtgagcctgaagctcataatatagttcttagacacagatgcatatttgggaattatccacaattaatttgtacagggagtgagtaaagaaactatcccgttaaaagactgagaaggaagaatcaaataaaaaagagaagaatcagagaagccaagggagggaagagattcaagaagtagtccagaggttcagtgtgataagaattaagaaagtcattggataattttttttaactaccaataggcactcataattatttctaaaagtcttactagaagggaagggatggtatggttggtttgtctattctctgttctgaggaaataaatgtaaatgaccagagttcacaaggagccacagttacttgtattgcactatcatctactctttaacttacataatgaccagattcttctagtgatttatcaaataactaacactttcataagttcacaaggttcttctctattagctagctcattttcctcacagcagcttcatatctattttacagatgaggcagtttctcttaacaggttaaatgagggggcacaggccattggaaaggtggaacagaacgatggtttaacactttttcaaaaggatgaggagtggtggtgatggaagttttctaagttggacagtaggacagggacagttgttttatattttggaatctgtttggcacataataaatattcactcaacatttgttgaactaatgcttaaataaagcaaaagccttgtcgagaatactgagttatatacagtaccattttgagtaaggagttataggagatgtttagtattttgttactattcataaacatcagtgcagagagatggaagaatagaaggctttgtcagtattatgaagcagtctgataaaatttaaacattattaaccactgcaaccagctatgctgacctgcaaatgttctgcctgtcatgtgcttacctctgatgtcaattcttgtgctttgtctaaacaaaaataaaatccctaccacctttttcagggaaccagctattgaatctttgtgccttccctctgctgtctcccttgcacttgagcacaatccctgaaataaaagccttgtctgggaaaaaaaaatttaaacattatttcataaagtgcttccttactgtttggtattatattatgaagaggaaaaaacttgaaaaataatatcttacatttataaagtgtttacaaacaagccttgtttctggtgttctgtattacctcatttaatcttcacaacaacgctgaaagatggttagttccagatgaaacattttagagggaaagaggttaaatatgttgcctaagcctgcacagaaatgaagctgtgcagagatgaagccaagaaacctaaatccagagcccacacattagccactagattatacatacttctcagatatgccaaacagacttttcataatatttcgtcttttcttagattgcatcacattgcacccaattaataagcgagacgatttgaatcatttatagcaatatttacaccaaataaaggccaattggcaatatgcaaacaataatttattcaaccttagaaataactgtatttacccatatctaacatctagataaaactacataatttataatttttctattaattaaaaatatctatatgactcataagctgctgattcaaatcaatgaaaaaaatgaaatagagaaaagaagcattttcaagaacattgttcttaagcgattattatttgttttctaaattatataggctttttcttaacagattcaattattcttaaagtacttccctctacttatagtaatggataatattagttcagggaatattatgtatttgcaaagatctgcctaatacatcataaattgtttttactagaataaaatttctctttttgacagaaacgtttagcctgccatttaaggcaatatcagtctaaaatagaaatcaattcctgacttaagttattctccatattgtagtcattacattccagtcagagtctattgtctccttccataaaagctattctttgatttaaattgcctgaaaatgtataaaaccctttcctgtagagcaatatgtgctgtgtggatatagtaattgacttacctaaattatctctggtacacagacagacttgaatctattagaatttatgtatctcatcctgttaaatgctcacgtagagtctcaactcttgttgaaacccatgacattaaagaagtctaaatgttatggataatctctattaatgatggaggtttctcatatactcatgcatttcatctctctctttataatccttagaacttagctattgctttactgaaactctgctttagcctattaaatgtcatgtagccttacaaactgaagtaactgcctgtttaagcatcccgtaagtactactgcttctgatttcaactaaacttcgaaagatattccctagttttattgttttaaaatctaatcattcagctaggtatgctgtactcaataacttaatggttttatatgtttttatgtcatcctcatttcagcctttagcattcttgacttatgaaatctaattgtttttggcctttcctcatggaaacttcaacttcctcttcattatcttagtttctcttctattggctttttcaccttcattttttgtttactgacttcagcaatcagaaatatacccacacttctgagttcaggtgccatattcttttttttaaataagtaaatagatttttctagaaaattttaacctacaaattcagataccagcactttgctaactttctataatatagtccttttctttcatattgaaataaatttgggagagataaaggaaatttcagaaaacccaggaaagtaaagcctcaatacttgaggtagttatagtcaagcgaaatgaccacttaacagaatctacatagagaagttcatgggggtgctaagtcttgtttcacctttaaacattctggaggacaaattgcaaagtaaaatcattaaaatctcaaactccatgtttttttctggatgataaaatacagatttcatggaagctttaccaggttgtatgaccagacataaagatggccaatgaggctcagtgtaagcaataatgctctatggggaatattgctcaaagtgcattagaagattcttggtcttgaatattgaaccaatctaacataagggcctggttataagtaacatttataccctgaatgcatctatctaatatgttgtcttgaatgtgtgtgattcctataaactctgagtttatataattgaatgaactttagtaactcactgctcccaaaacaaacttgatctcctcccttcatgcattatatttacaagttttttttttaaccatgtataggcatcatgtataagctacagcctaaaagaaattagaaatcatttactagaggagataaataggtgcacataaattccaacggaagtcagaatatagtaaatgcataatagaggcgtacataaagagctgtatagttcaaagatagaaactctcacatagagttaggtataatttgtgaagttcttatcattaatttaaaaaaaatgaacaggatttctaaaggcagaatggagggagtagtgtttccaggcagtggaagctgcatgaataaagcttccaaggcatatttcagtgaacagcaagttgtccagtttacctgcatgttagaggattagtgcttgcatgttgagtaggagccaatcccagaagctaagatgaatttcacctaacaaatagacatgggagaaaagttttaaagttagtagtaaaacacttttgttatggatgcctggggtaaagaaatggaagagttggtaggtaattgtgtttttttagggaaatttccaagtgtgaaatcttggagggggtgtagctgttgaatgactgtgtaaataccttagagttactgtgaactcaatgccctttatgttacaaagatgttggattatgacaggtggcagcggtactagtgtcctatgttgacaatttcagtctcagggttgcatggcttcactgaggtgtacatgtgtacattttatgttttggtactgctgattttatttttagttgtgaaaatatacagaactttcttgctattgctaaaaaaaatccaagacaattactaaactaaaactctaggaagattttgggcaatcacttagattctttttgattgaacaaataagtgaacctgttcactgattcccaagacagtgatgtggacttctggtgtgtgcaccaatattttgtaaatggcctggaagtcgtcattcccattcttacaacaagaaaatgtgagacaaactgaaaattaacaacttttcttggacctatcagagaactgagatcacagggaaaaatggtcacaacaaaatctggagcgaaaggcaaatccagggtcctggccaatatctgcttacctggagcagaagccacataaactgtattccagtttcacaatgacttgtagctgagagggctgcaggactgagagtctctctgaggaattgtacttacggaaggcttaaatcaacaaaagacataaaaataaggacactagaaaaattggaagcctctggcacctacagctatagcaaatattaagcccagctaaattcctaaacagattaatataaaacctcacactaaaggcctatttcccttagttcctattatctgatacattatatccagctttcaagaaaatactctaagccatgcaaaaaaccaaaaaaaaaaaaaaaaacaaaaaaaacacacaatccgaagagacaaagcaggtatctgaatcagactcagatgtgacacagatgtgggtattatcacacaaagatagtcaggctttgccaccgtttggcattgttcagtattccttgaaaaatttaccatgccgtgaatcctgtctcatgtctgaggcatgaataattacaaaataagattcccttaaaagtcacaagtatccgaactgtgatatacgtgtagaaaaaccacagaaagtaaattcagaagtgtagataaattgcacacctgtttctctatagaacagttatctaaagaaaaagccaaaaatctcctaggataagctacacctatattctatagtatagaatcccattctggggtttgctgtcttcagcttttctcttgaatgttagaggatgagagggaaggggggaaaagggtacagaggagatacggaaggaatggatgcatttggcatggtgtaaagctagctatgtcattactttcaatggtttagaagcttgaaacaaatacaattatacagaaggtttatatttaatatagtttcctttggaaatctctagttttgcagctaagatttgccttactacccagttgtttttcgttcactctgatttgtggctgagctcatgaatcatttgccttttctattataagagaaaaaaaaacccatttccagtgatttcaactctatgttggtggctccatgtgacaggctagatgataacctcagccacaggctgcaagtttgagactagagagactgatccacaaagcacaatgacaggaattcaagtgagcatgtaacagtgtttttatttccccagagatagttgtggaagacaagggaaatacactgacgttattagtgatgtatttataacagtttgtactcccaccctcacttccattgttgaactgccattgttatttccataaaaatcaccctagacagtttcaagtttatacaaatgatttatttccacacttccaaggggcaagggtgagaaatggttctttaaagcaagtatttacttgagaaaaatttcaaacaagtcctatgggggtacaggattaagaatgaaatctatgactgtttttcaaaagccttagcctaattaaataagcttttctaaacagcaagttactgttaatgttgacattgctcataacactaagtgtaacagattgaagaatgtatatttaaactggggacttatttgagccctttattataatgaccacatataaagtaataatgatcactaatcattatcactaaaatactaattatcattttattggcactgtttttgcaatcatctaaacataaagaggttggtttttattagatttcctattggatgaccacctcaacatctgttttttttttttttctatttttagtagagacatggttttgccatgttgggcaggctggtcttgaactcccaaccccaggtgatccaccttcctcggcctcccaaagtgctgggattacaggcatgagccaccgtgcctggcctcaacatcttaaaagataaatcaaattcattttagctctctgaaactttgtctttttatttttatttttattttttttagagatgagtgcaatagctatttacaggcacaatcccactaccgatcaagacgggagttttgacctgctccgtttccaacctgggctggttcacctctccttaggcaatctcctgggggctcaccatattgatgccaaacttagtgtagacacccgatgaccatagtatgttacagcgcagagctcctgggctcaagcaatcctcctgcctcagccttctgagcaactgggactatatgtgcgtaccaccacacccagctaattaatttttttttttttttttgtagagacagggtctcaatatgttgctcaggctggtctcaacctcctggcctcaagcaatcctcctgcctcagcctcccaagtagctgggactacaggtgccaaccaccgtgccctgtgctctatgaaactttctaaatagatctcaatcaaatatatatggtgaacttttaactctctcaatagcaattagaagggagtgggtaattattgtgagaaaatagttacctgcttttattcttaaaatatctaagccttaattagattacttaatggtgccttacaagtcatattcaaacaattttgccttcagagtgacctctgaagtatattcagtccaattctcccaaaagtctctgatgtgctagacaaaagtcttctaggaaggttgaagatagatttacttttgattgaactagatttccttggggatcaaataggaatttttttttcaaagaggaattttaaagctagagttaatgatgttatgggttaacgtgcatgagtttgatagtaaaataaagtcagcttcaaatctttgctctaaaaatagaatctggctttggattaacacataacctccctgagatccatgtctttatttgagcttggggagaattgcacagtgcagtgcttggtactacatttgataccatactggcacatggtaaggtgcttaatatctgatacgtctacaattctccatgttttcatatactagtggtctttaagaggctttgcaaatggatgatggacattgaggagacctgaaattcacacctgatagatggctttagtttctcagtgaaatgggagcttatcaaggctgtcgaatggagtgaagaatgagatgaaggtttagaatagctattgtactcacatgcacatgagtttgatatccttattataagaatattgatattctgtttcttttattccaactcaagacttgtagcgtcccttctctaccatttactgcaaaaaattccacagctattagttggtgagatgaaattaatacaaagggaagtcatagtagaaaatatactttcttaatggtttatgatgttctcacaaagctaaagaaaataccttgggaagtaaaacataaaagattgctgcactgctttttcttgtgttaatttattcacacatttatttggaaaacgcttacttaacatttatctgcaaatatgaagatttgtaagataatgtctacacatctcaaaaattaacaaatacttttaaattgatcactgatttttaaaatttagtttatttttaaggcacttcaggattaagaaagataagtaaacaatgagtgacaatatacagtctatgatattacagaatatgcagccacacaggtatgtcacttagatttctcttcaagagaaaatctacaacaaggagggaatttaggtgacagattccagttgcagcaaattcaggatctcttgtagcattcatttgtgctgatgctacactctttctggacagcccttgttaatgactgaacatagcagaatggatagagcttggtactgcccaatgctaagttcttctacggcagtctgagatgagggttccctgttgtctggccaagacttcgcactgcagtttgagacttgtccacctttactctatcttcttataggttttagacatgcatcacagtctgtagcctctacttgctttctcctgcaccttttgccctttgtcttccaaaaacttttaccccagtaaatctcttccacttcaactcagccttagaccttaattgacacactgagttctgtgggaacacggaaaccaaggtatctaagtccgcttggggatgaaagaaaaaaagctactgaaataatgcttgaagtcttgaaggccaaatatgaacctacctggcaggtaggcaggagacagtgttccagacaattggaccagcatgttaaaggggcagatacagagcacaggatctgtgagtaatcccacaaagcacaggattgcctcaactaaatgcccttgaaacaaaactagattttcctctttgccctgagaaacttccttaaccttcccatagttaacaggatttttcatacatttctcatcccttccaaccaaagagtgaccatataacctctcctccccaagtcctcactgtccctttgatagttctactctggatcttgatctggaactgctatacctcctgcctgatatatatcatggtttgggttgcaagccaatacctcgtgtgcatgggtcctagctgcccccaaaatgtgttgtttctcttccactgtacaacacagagacaataaaacatgcagatcctgccaagttaaactatacgtcagagttaatttctcaaacttatctatgaattttcccgggtcttcagagaaatgaccaaactcctctttatatacagccaaatcagacatagaaaagggaacatgtactctcacagtgacttcttccccatttgtcacctctctaagtggacaaaggtttccctttggaggttgataggaggctccactacaagtagtacttgctgggctgagttcctcagggagtggtgggtatagtgtgggactagatgggtaaggaataggggacaatgggtttccaatagaacattcaggtgggctgaagggagaaaggaccaacacatctgaaccttcagagctgacagaaggaggctctgctccacccaaaagtgcccctaaactggggcagtagggggttgcattaaagaatcacctagtatgtctagctctttttcttctttacctctcatcaagcatgcacacacctgctgcagggttttatcctgactgagcagcaaaaatgctcgaacatatggtatttcatcccagtttccctccagcttacaaaacaaatcaagttgaagtgcagtattaaagactgtagttccagtaggaggctctttctcttgtttttacaaataataacaaggccaaatagtattacatagaaacaccagttttctcatcttaagcccattcagtttaatctggtcccagtgttcaagaatacatcctactggtgagttctttggaattgatgccacggttcccatgaaggaggcaggtgatttttgaaagaaaagttccaaacctgcgagattgtattgccactggccaagttccactaaaaaggataagagaggtttttaaggccagctacattaatgaggggatccctgtcgaaaattgaattctcttattcacattacccaaataatataggtgagctgagccatgaatcttagataaaccacaacatggactttgacaaaaatgcttaataaggcaagggaaatgagaaggatttagatgggaatgaccagagcaagcaggttttgggcaatagcagtagggtggattggataagcaaagccagtctgcctgaatctaagaaggaaagaagtgttttttttgttgtcgttttgttttgttttttcagtttgcaaaatgaaacaaaacagcaaggagaaaagtcccccgattaccatcttagtgcttctcaatcacacctagtcagcatagtgacaacaaaacataaccacatctatctaatcttattggctgtagctgttaaatatcaaatctcaatcagcaattttagagatggagccttcaatgctttttgttcccaatgtttcacaaactaatggacagaaattgggaggggcacaggagaagaataagttcaaatacagttaagtaaagtctcctgaaaatgacagtgaaacagagacagcaaccaagaaattgattggtgcagcaaagagaacaaggctgatgaatacgaacagcatagcccgtggtgtcaaacccgttcttagccaaaagggactttactgagaggggcttctaatcccctaaattttagaagtgattctaacctctcaagttgggcctctaacccaaggtctgtcaagtgtccgtgccttttattgagaggaggctttaaccctcttagtctttaggagagactgtaactcccctaaattgggcctctaacccaatcccattctttactcaagtatgcaccccacttacccaaagtcgtccaatcagtgctgcagtctatttcctttgggttcggggtctcttcagtatcatccatttggtggtttgccagaaatatgttaccggacaaccctacttacccaaaattagcctttgggtcgggggtttccccactgcaatcccttcatggtcaccagaaatgttgcagggaagaggtcccgatccagatcccaagagagggctcttggatctcatgcaagaaagaatttagggagcgcaaagtaaaagcaagtttattaagaaagtaaagtggtgaaagaacagctactccatagacaagaggaggacgttcccgaaagtaggagaaggaatgcatccaccctggctacagtgcttatatatgtgggggagatgtgctctgctacaagggtttgtgataaaggattaagtttcttcattactatattttgcaaaaaaatcagtgttattatctttaaagcaaaattaggaatgcttctgttctccagatattgggatatgtggacactcctaagtctgagtctgtttaataaacattattagtttgttcccttaactgcaaacatctggaggccaggaatgcctaactttctaagaatgcagctcagcaagtcccagcctcattttcctagccctcattcaaaatggagttgctctggtttgaatgcctctgacatatatatagaaagctaatttaacccaagaaaaattaaagtactacaatatttagggtttttaaagtaaaaaatactgtggctgaagaaaaaatttaatgggaacagagaccctctattagataatgtgaatatgtttttaagtagaaatcaattttaccctgaatctcatgatgccctggacctaagatgttgtttatcctatcaaggggcccttgtattgctctgtagattgatattgtataccccatcacattgctgattttcatggatgtgctgtggaggccttgaccccaggcaaactgcattcctttgaggttaacacaagcagggctttatggaaagcgttgtacaagggacaatgactgcagagtaaatgctgagggagccagccagctcaccagtttctaggcagctttagtctacagtaaccaaatgcatctcaagacactggattccaaactgtgagagaaagaaagaacaaccatcttatattttccaatgtctttatcttttagttgtacatccttagaaatgctttgaaacaaccaaaaatcaaaccactaccccaaacaacacctcagaaaggtagcatttaccaaacttggtttagatttaatgccaaaaactagttttgagatgacaaagagctgtcctttcattatgaatattcaaatgaccagttcctgagtaactgacattattaagttggtccaattaaataaataccatagagttactaaggtggaagatatatattacatatgtatactgtatttgtatttttaaagattaaaatataaatatatatatatatcttttattttccatttatttgaaatcgaaaaataaaacaatcattcagggaaatgaatcagtcttaaaaggctggtagaattggaatgcatgaagagagaaggattagccacctacaaccagaatgaacatggcattttttagacgagtaaagagattgggctttctactatctgttgggttagagggtagtgaaataaatagtctggactaaacgatggaaaaccttaaaagtagagcaaatcaatttgcatacagaatacccttgaatagcatatgtgtgtttgaatggaataataaaggctagagtgactgtggtagagagatggatttggggagatgttgaatgaagtaaagggcattaggtaggagttgattgcaggaacccagggaccatataatgaatatctgaactcggatggctgtgacagggaaaataaaatggacaggacagatagaagtatcaattcatagggaaaaattagttgtttccaactgtcctttaaatttggcatcaagtaaaaaatatatggccaatctttctaacctgtagtattttttaaaacttcactttttggagaattttatatgtacataaaaacagatacaatattatgatgaaccccaatcactcaactccaacctgcaggcaatgctgccctatctatatccttatctacttcccccttcttttgatttataatttgcaattccaacattgcatcccttttttcttttgtttcttgtgttgacatttaacatgagctctactctgttaaaaaaaattttaagtacataagaccttttgttagtcataggtactatgttttacagaagatctctgaaactcatttatttcctatatctgtaaatttatacaagatttataaaaactccttatatgccccttctcccattctctggtaacaccattctattgtctacttctataccattggctattttagaagtatcttatgtgtaagaaaaatcatgcagtgtttgtccttctgtgattgacctatctcacttgggataatgtcttccagattcatccaagttgtcacaaaaggcaggattttcttttttaagaaagtatttatttatttatttatttatttatttatttatttatttatttatttttgagacagagtctcactctgtcacccaggctggagtgtagtggcacgatctcggctcactgccatcttcacctcctgggttcaagcgattctcctgcctcaacctgtagctgggactacatgcatgtgccacgacacatggctaatttttgtatttttagtagagatgggttttcaccatgttggccaggctggcctcgaactcctgacctcaggtagtccacctgcctcggcctcccaaagtgctgggattacaggtgtgagccaacatgcccagccaggattttctttttttaaggttctgttttaggtatatagcaaatttctgtatccttcatttgtaatggacatatttgttgtttccatatcttggctattgtaaacaacactgcaatgaacataaaaatgtagctatctgcctaaaatcttgattccaattcttttagatacatactcagaagtgaaattgctgaatcatatggcagttctatttttaattttttgagacacctccatactgttttctacagcaactgcaccattttacattcccacctacaatgtacagaggttccaatttctccacctcctttctaatactcattatcttttatttatttgttgtttgataatagtcattttaacagatatatgatgatatctcattgtggttttgatttgcatttccctaatgattagtgaggttgagaatcttttcatatacctgttgacatttgtatgtctttggagaaatgtctattcagttccttgcctttttaaaaattaaattgttcattttcttgctattgagtcttaggagtttcttatatactttggatagtaatcccttatcagatatatgatttgcaaatatgttcttccattctgttggttcccattttattttttaattgtttcctttgccatgcaaaagtatttagtttgatgtaatcccacttgtctattttggcttttgttgcttatgcttttggtgtcatattcaagaaatcattgccaagtcaattgtccatcatcaagaatatttttccctatgttttcttctaagagttttatggcttcatgttttacatttaagtcttaaacctgatttaaattttgtgtaccatgtaagataatggttcaatttcattcttttgcttgtaaataaccagtttttccaatactgtttattaaagagactaccctttccctattgtacattcttgacatccttgttaaatattagttaaatttaggtgtgtggaattacttttgggctctctattctgttccattggggtgtgtgtatgtgtgtgtgtatctatctatctatctatctatctatctatctatctatctatctatctatttttatgccagtaccatactgttttaatcacagtagtttttaatatattttaaaatcgagagtgtgatatctccagctttgttcttcttgttcagattgttttgtgtatttggggtcttttgtggctccaaatgaatttcaagattttttctatttctgtaaagaataccattgggattttgacagagattggatcgaatctgaagattgctttgcatagtatggacgttttaacaatattaattcttctcatccataaacctgagatgtctttccatttatttgtgtgtgctttaacttcttttatcagtgtcttacacttttcagtgaatatgttcaccctcttggttagatttattcctaactttttttttgatgttactgtaaatgggattgttttctgagtttcattttcagatgtgtcatttttagtgtacaaaaactgaactgactttttatgttaatgtagtatcttgcaaatgtactgaaattatttttgcatcccatcgctttttttgtagatactttggagctttgtacatacaagatcatgtcatccccaaacacagataattatacttcttcctttccaatttggatgctttttcttgcctaatttggagttccaaaactttacggaacataagtggcaaaagtgggcatccttgccttgtattagctttttattactgctgtaacaaattgccattaattttgtggctaaaaatagcacaaatttattattgtgcagtaggtcagaactctgacacaggtcttactgggctaaaatcaaggctgtgttcctttctggaggctataagagaatattagttgcttgcctttagcagcttctagaggccacccacattccttggctcatggcctctttctctgtcttcaaaatctacagaagtgggttgaagcctttccaagccacatcactatgacattgtcttctgcctatcttcttctactcttaaggacttaagtaattagatggggcctatccagataattcagtataatctgccttcaaaaggtccttataaagtccctttagccatgtaagaaaacatattcatagggactgaggactaggacatgggcattttggaggagcccattattctacctaccacagtatctttgtgatttgtgtgaataatctttttctggtccatatggattcagttgtaataatataatattgataaatcattgaacaataaattatgtcactgcagaataaatttgtgtgtatttgtttaaacatgagtctactgttctgtagaaattgagtcactgtctgttttcttagaactccattttaagtattatccaccagctgcactaacagaaccaaaaaagttaatgtattttggaagggaaagttcacaccatggggttttaggcttggaaggcaatgcatttatgtgatagcgttaacagactttcatttaatatattcattagaatgcaagcaggcaaatcttggtatttacaggcataaaggtcataattttgactacttttatgttattgtgaaaatcactacgatatagtaatttgtaattttacttaggcatcacagttctatgaagctgataagcaaaagcatcacttaagcttcctaatttttattttcccagtctgtcatttgggaataacaataatacctatcctagaaggcagtcataagaattaaattttataatgcttacaaggttgtcagaaaattttaaacagataataattgttgaataaatgtcagcttttatttttgtttgctagtgagtaatcctggatgaactgcctgcacgtacactttcatgtggttttgttcttgtccactcatatcctatgatatattttgtgaaggaaaccatatatatttcacagcattcacgactttgggtaattttgaaaacttcagaccagggcatagtgattaggaatatctatttgcagacagtaaaatgttggccactcaaaagaaatcacataaaaggattataaattgatttactccaaggccacgtttttgtttttgctatatgttagagtctgtgacaaattctttttaaaatgttgagtgattaatttttgcaaaaaactaaacaccatgtggaagttattccattgactagagctgggcttcctattttggaccaatgaggaagtgtgaatgtggagtaatgagactcaacccattactctatattagaatcacttgcaaagtattggaaactacaattgtatagggagttcacatgtcagagattcatattcagctatctggaaatagagaacaggcatgtagatcattaaaaacacccacaggtgattctgatggatagcctggaataagaaccatggctttagtatatttaaagcagaatcttcaggttgtaatattggcatcagtaatttcaaattttcccaggttattttatttatttatttatttatttatttatttatttatttatttattttgagacggagtctcgctgtctcccaggctggagcgcagtggtgcaatatcagctcactgcaagctccgcctcccgggttcatgccattctcctgcctcagcctccagagtagctgggactatgggcacccaccaccacacctggccaattttttgtattttttcagtagagatggggtttcaccatgttagccaggatggtctcgatctcctgaccttggaacccgcctgcctcagcctcccaaagtgctgggattacaggcgtgagccactgcccccagcccccaggttattttaatgtgcagccagcattgagaacctttgctttatattaatgagactaaacaagatctaaagaagttctgctaacattttgaggaatgactcagcctcaggtggctgatgttaaggaagaaattaatgtaaatgtgaaggcttatgttcaagtgtatttactaagatatcaccatcttcttacttcattctatctgatctgagcaccttgagtggaatgtggtatggaatatgtatttacaagatggttgtctgttgcctgcaatggaaggacaatatccacaatggcatggtggtgttgttgggagagaagggattgtggagatgacaaggaggggtgaatgatctctcataagtgtacttgaattattgagagattataggcgattaaaatagaacattaatattacattttctcctatactcaaatatcttttatgcaatccttcatcattacttgaacctctgcagacttaaatgtccctgtctgacagctttgaagagagtagtggttctcccagcacggagtttgaggtctgagaatggacagactgcctcctcaagcgggtccctgacccccgagtaacctaatggggaggcacccctcagtaggggcagaatgacacctcacatggccaggttcccctctgagacgaagcttccagaggaacgatcaggcagcaacatttgctgttcagcaatattcgctgttctgcagccaccactgctgatacccaggcaaacagggtcgggagtggacttccagcaaactccaacagacctgcagctgagggtcctgactgttagaaggaagactaacaaacagaaaggacatccacaccaaaaccccatctgtacgtcaccatcatcaaagaccaaaggtagataaaaccacaaagatgagggagaaacagaacagaaaagctgaaaattctaaaaattagaatgcctctcaccctctaaaggaactcagctcttcgccagcaatggaacaaagctggatggagaataactttgacgaattgagagaaggcttcagatgatcaaacttctccgagctaaaggaggaagttcgaacccatcatacagaagctaaaaaccttgaaaaaagattagacaaatggctaactagaataaccagtgtagagaagtccttaaatgacatgatggcacaaaaaaccatggcacaagaactacgtgatgaatgcacaagcttcagtagctgattccatcaactggaagaaagggtatcagtgattgaagatcaaatgaatgaaatgaagtgagaagataagtttagagaaaaaagagtaaaaagaaatgaacaaagcctccaagaaatatgggactgtgtgaaaagaccaaatttacatctgattggtgtacctgaaagtgatggggagaaaggaaccaagttggaaaacactctgcagaatattatccaggagaacttccccaacctagcaaggcaggccaacattcaaattcaggaaatacgagaatgccacaaagatactcctcgagaagagcaactccaagacacataattatcagattcaccaaagttgaaatgaaggaaaaaatgttaagggcagccagagagaaaggtcgggttacccacaaaggaaagcccatcagactaacagcagatgtctcggcagaaactctataagccagaagagagtgggggccaatattcaacattattaaagaaaagaattttcaaccccagaatttcatatccagccaaactaagcttcataagtgaaggagaaataaaatcctttacagacaagcaaattcggagagattttgtcacaccaggcctgccctacaagagttcctgaaggaagcactgaacatggaaaggaacagccagcaccagccactgcaaaaacatgccaaattgtaaagaccatcgatgctaggaagaaactgcatcaactaatgagcaaaataaccagttatcatcataattggcaggatcaaattcgcacataacaatattaaccttaaatgtaaatgggctaaattctccagttaaaagacacagactggcaaattcaataaagagtcaagaaccatcagtgtgctgtattcaggagacccatctcacgtgcagagacacacataggctcaaaataaagggatggaggaaaatctaccaagcaaatggaaaaaaaaaaaaaaaaaagcaggagttgcaatcctagtctctgataaaacagactttaaaccaacaaagatcaaaagagacaaagaaggccattacataatggtaaagggatcaattcaacaagaagagttaactgtcctaaatatatatgcacccagtacaggagcacccagatacataaagcaagtccttagagactagaaagagacttagactcccacacaataataatgggagactttaacaccccactgtcaacattagacagatcaacaagacagaaagttaacaaggatacccaggaattgaactcagctctgcaccaagcagacctaatagacatctacagaactctccaccccaaatcaagagaatatactctcttctcagcaccacgtcgcacttattccaaacttattaggtctgcaccaagcagacctaatagacatctacagaactctccaccccaaatcaacagaatatactttcttctcagcaccacgtcgcacatagttggaagtaaagcactcctcggcaaatgtaaaagaacagaaataagaaccaacagtctctcagactacagtgcaatcaaactagaactcaggattaagaaactcactcaaaaccactcaactacatggaaactgaacaacccactcctgaatgactactgggtacataacgaaatgaaggcagaaataaagatgctctttgaaaccaatgagaacaaagacacaacataccagaatctctgggacatatttaaagcagtgtgtagagggaaatttatagcactaaatgcccacaggagaaagcaggaaagatctaaaattgacaccctaacatcacaattaaaagaactagagaaacaagagcaaacacattcaaaagctagcagaaggcaagaaataacaagatcagtgcagaactgaaggagatagagacatgaaaaacccttcaaaaaatcaatgaatccaggagctggttttttgaaaaggtcaacaaaattgaaagactgctatcaagactaataaagaagacaagagagaagaatcaaatagatgcaataaaaaatgataaaggggatatcaccaccaatcccacagaaatacaaactaccatcagagaatactataaacacctctacgcaaataaactagaaaatctagaagaaatggataaattcctggacacgtacaccctcctaagactaaaccaggaagaagttaaatccctgaatagaccaataacaggctctgaaattgaggcaataattaatagcctaccaaccaaaaaacgtccaggaccaaatggattcacagccgaattctaccagaggtacaaggaggagctggtaccattccttctgaaaatattccaatcaatagaaaaagacggaatcccccctaactcattttataaggccagcatcatcctgataccaaagcctggcagagacacaacaaaaaaaagagtattgtagaccaatatccctgatgaactttgatgcaaaaatcctcaataaaatactggcaaagcgaatccagcagcacatgaaaaaccttattgaccatgatcaagtgggcttcatcctgctggttcaacacacacaaatcaataaatgtaatccagcatataaacagaaccaaagacaaaaaccacatgattatcacaatagatgcagaaaaggcctttgacaaaattcaacagcccttcatgctaaaaactctcaacaaattaggtattgatgggacatatctcaaaatcataagagctatttatgacaaactcacagccagtatcatactgaatgggcaaaaaactggaagcattccgtttgaaaactggcacaagaaagggatgccctctctcaccactcctattcaacatagtgttggaagttctggccagggcaatcaggcaggagaaagaaataaagggtattcaattaagaaaagaggaagtcaaattgtccctgtttgcagatgacatgattgtatatttagaaaaccccattgtctcaacccaaaatctccttaagctgataaacaacttcagcaaagtctcaggatacaaaatcaatgtgcaaaaatcacaagcattcttatacaccaataacagacaaacagagccaaatcatgagtgaactcccattcacaattgcttcaaggagaataaaatacctaggaatccaacttacaagggatgtgaaggacctcttcaaggagaactacaaaccactgctcaacgaaataaaagaggacacaaacaaatggaagaacattccatgctcatggataagaataatcaatatcgtgaaaatgtccatactgcccaagtaatttatagagtcaatgccatccccatcaacctaccaatgactttcttcacagaattggaaaaaactactttaaagttcatatggaaccaaaaaagagctcacattgccaagtcagtcctaagccaaaagaacaaagctggaggcattatgctacctgacttcaaagtatactacaaggctacagtaaccaaaacagcatggtactggtaccaaaacagagatatagaccagtggaacagaacagagccctcagaaataataccatatatctacaacaatctgatctttgataaacctgagaaaaacaagcaatggggaaaggattccctatttaataaatggtgctgggaaaactggctagccatatgtagaaagctgaaactggatcccttccttacaccttatacaaaaattaattcaagatggattaaagacttaaatgttagacctaaaaccataaaaaccctagaagaaatcctaggcaataccattcaggacggaggcatgggcaaggatttcatgtctaaaacaccaaaagcaatggcaacaaaagccaaagttgacaaatgggatctaattaaactaaagagcttctgcacagcaaaagaaactaccatcagagtaaacaggcaacctacagaatgggagaaaatttttgcaacctactcatctgacaaagggctaatatccagaatccacaatgaactcaaacaaatttacaagaaaaaaacaaacaaccccatcaaaaactgggtgaaggatatgaacagacacttctcagaagaagacatttatgcagccaacagacacatgaaaaaatgtgcctcatcactggccatcagagaaatgcaaatcaaaaccacaatgagataccatctcacaccagttacaatggcaatcattaaaaagtcaggaaacaacaggtgctggagaggatgtggagaaataggaacacttttacattgttggtggggctgtaaactagttcaaccattgtggaagacagtgtggccactcctcaaggatctagaactagaaataccatttgatccagccatcccattactgggtatatacccaaaggattataaatcatgctgctataaagacacatgctataaagacacatatgtttattgtggtactattcagaatatcaaacacttggaaccaacccaaatgtccatcaatgatagactggattgagaaaatgtggcacatatacaccatggaatattatgcagccataaaaaacgataagttcatgtcctttgttgagacatggatgaagctggaaaccatcatactcagcaaactatcacaaggacaaaaaaccaaacaccgcatgttctcactcataggtgggaattgaataatgagaacactcggacacaggaaggggaacatcacacaccggggcctgtcatggggtgcggagaagaaggagggatagcattaggagatatacctaatgtaaatgaagagttaatgggtgtagcacaccaacacggcacatgtatacatatgtaacaaacttgcacgttgtgcacatgtaccctagaacttaaagtataataaaagagaagaataaagtagaaaactatataaaaaaaaaaagtcagcagatttgctaatcctctctgcctggggatttcctaaatttttggctcctgcatttgctctcatgaatagtagaagagaaaggactaacatttgtgaggaaaaataagcattgagaggaaaaggagcacttgatgagagatggatccaaatcattaccatatacataagtaagtaccattagttatgtaagcatcatttatactggtcaaatattcttatcatttctttcctcctgtcttagccctcttctgataatctggtaaaagctatgaacctgtcctagaaatgcacgtgttcacatttacagaaaggtttgcatatatatatttttaaagtcctcattgaattatcaatagacaactcagtattacacaaacccaaatcattgcctacttctcattcttactccactattagctgtagctgtgcaacatatcaagagtcaagaaaattttgatgttacattttgtgagagctaagtattagggataagtgtgaacattagattaaaaaactattttcatgcttcatttgaatcaattattacttgagaagtttaagaaatgcccaagaattctgccattttggtataggcagagtgatcaaatcttagaacaagaagagaaaacagtaaagtgtggagagcagaaagatatgggaattattgaagaatgggatgaaggattagtaaatgtaattctgttattgttcaaaactctgagattctctgataattttaattggtcttggaggttccagaaacttaagtaacaatcagaagagcaaagaggaattaaagttttccttcccaaacatcttatgtttcttcagatccttttgtaaaatgcaagagcaataaggagtggtcagattattgattccatgtgttgaaaatactgggcctgaaatcagtacacaagtaaagaaaatgctagaaggggaaataggaagctctagatattgaaaaggggttcttaaaatgtaagtaaggcagcctatagtagagaaagtaatgggtttcttaattataatttttattttatttacttatttatatattttgttgtttagagacagagtctggctctgtcacccaggctggagtgcagtgttgtgatcacagctcactgcagcctcaaccttttggtctcaagcaatccttccacctcagcccctcaggtagctaagactgcaggtgtgtgtcaccatgcccagttaattttgattttgatttttttattttttgaagagatagagtcttgctatgttccccaggttggtcttgaattcatgggctcaagtgctcctcataccttggcctcccaaagtgctgggattacaggggtgagccacagcacccagccccagttagaattatctttctaagactcagtaataatccacccttcaggaagcaagggtcatacacttttccacaggaattccttggcttactcatttgggtggtgttgaagtggtactcctcacctgtgcccccacaaaagcattctatttcttcttatatgtggcacacaaactatactgtcctaacaacaaatacatgtcttcctcccccactacttctttgtattccctcctactgtctgtctacaatagtttttaacacacaataaatcctaaataaatgtgtctgttgaataaatttgaattgatcagaatttgactttaatgacaaaacatgcttaattcttacaggcatttctcaaaatgatgttcagaatgcacaaaataattaaactcttaagctatgaaataccaattttaaataaaaacgtgggagaaatatcccacggatgtccttttggatgctttttcacagtctcctaaaaataaaatttggaacttcttttgcgcagttactctttcaacatagataagcagagatctggatggggtttttgcagaagtaaaaatttttttatctcttatatttatgatttcttctgagactgactatgtgaaatgatgacatttgtgcagtttattagcagtcagctacaaatgtattggagtagtgttatgtaacactaaatagtttgaatccctaaagggacagcaaatatttttttcggctgacatgtcttattagtcaaaacccttaggaaatcctctaaataacccattcactaaaaaccatggcttaaaaatcctagtttaattgtttccaaagaagtactgaaagttttaacatataaaatacaaagtaacctaagtggaaatcaatcatcatgacatttgctaaagtccctattaattaagagaagactgaataataatatttctttttcaggatctgttaatataattttggagtttgacacacaagcaaaaatacatacactaagaggaaaaagaaatgtggaagatactgtaggttgatttgttcaaccctacatccccaacctttttttgtcttctttaatctcttctatagaggctaaataaacatcttttgcagccaggagtgccacatgactcaatgttggccaatgagatgtgagccaaaccctacagcgaactttctctagcaccatcatccttctttctttaaaccctgaatttcccgaagaagtatttgtcttataatagtgaataaaaggccaagagaatcacacagatagcagcctgtttattttgagcaactacattattgtctacagtcaattaccactagacttcttgtctcaatagtatttccttattgcaaagccactgcaaattgtgttctctgtttcttaaagggtaactcactcttaactgatgcatctatttcaatagtgcaacctacattggtagagaattatggttacaatataatggataatgttctgtttttaaaatgtgtattttaaattatcttctaaaaggctagttttttagtattatcagttgacacactttgttttgctgtcctcactcaggtttccattatgccttgatatttactcctcctaagagctatgtagatgttcatttgatactgcagtctgaaccacgtcttcctttaagtgagctactatgccttaaggcatcctgcatctctgccttgcctctgatgcttcttctcagccttgcttgggtcttctccttgagattctccaacaacaaaggcatccaaatgcattgttcatataaatgtgaactgaaaagactgtgtgccatgaacagtttaagtttattccctaagttcatgaattatgactgaactctgacaaaagatttccttatcagtaatattacaccatatgaaatcaattttttatcaatgaaaatcatgaaatataaatagaattttctcccatatatttacatactataatgcatttttttttaatgtgaagattagttcataggttagaaaccaatgtttgacaactctgttatcttaagcaacattgagaatatttgctccttggttgtagaggaagagatgctattttctctggaattagaatccttttatattaagtaaataataacaacagttcactttaattatatgtttacttcataaagtaagcatatgatctcattcaatatttaaaaatattgtgaagtagattctcttttctaggccctagtgcttacataaaataaaaatttagcaaatgtctgttgaatggataaatgaatgcatgaatctttgagctcattttttttcaactatgaattggaagaaatactaagttgaacaagacagacacgttttctgccttcatatatatttgagttgatgagtgagtaaataaacatgaaaataaaaataattataagttttattaagtgctatgaaggaaacaaagagagcatgtgctacggatgaggggtaggtaacaacatgttcttaaataaggcaattagctgaggactttagtcacagagtcagctgatcattggtgatttcaaatcatactcacgtcttctgcctcctgagctggttctgtgtcaactactttattctgatacacaggcaaaattgtgtactgctccttaaaaataagttaggccgtttgagaaataacatcaatttttttcaggtctcagattgttcttgaagttggacaaatattcaggagtaatgagagactaactttcgtcacccttccacaatttaggagatacttagagttacttcagcgtttggtattgtaaaatgacatccattggtcttaaagtaggagagttttaaaacagttttctaagaagcactgaaaaatggcttcttaaaaagcactgagtttcgtttaagccttgtggcaccagagttcctattagttatatagcaataacataattggatattttgtgtcattgcctctattttttaaacattaaattttattaagcatttttcataaacagtaatattttcaggtgagaatacaaaataaattgttcattttaaaagttaattctgtaaccaggtctatggttgaactgtaaagttagaaattaatttacacactcaggattgctgtttgcaaagaccatttgttttttccaatagagtaaggaaagcagctgagcaaaatggaattccagtttttctaaagggctgttataacgacaggagtgtggtacaattatgtctatttacttgtcctgacactgggttatctccctcgtgaccctgcagagcctgaggtaatgcattctgcatggtagtttgggtctgagaaagttctaagaacttagtgacaattatgcattgtgcttcattatttatcacactggggtaacgtgaatctctctgatgtccactacaggctgatccgaggcccctgttcacaaggaaagtcatgaggaacccttatcctactttcaaaacattacccgcctgcaccattttcattttattcagtagggataatgtgcttatgactgggaacagccattctgtattctagcttgactctcctttaaactagtagttgtgctgtacatgacataccttgtgttactagaaattaggatatttgctctggaaaattttaacaacttcaaagtgtaaatgagcagccagaaatgtttctacgaggtcagctgcattccaccaacaccagaagcctgcatgtatctgattttgtaaataaacaagagacatgatgtttgaaaaaacttggttttccttgacctgtgcaaaattggttggaatgtttctttaacattcccacttgcctttcaagctgcagattaatgtaaaattccaagattttttaggaaccagtgtctgcattttctacttgatgaagaagctttggaaagaacaattgcttcatttaaaacttttctaaaatcaatactgaacaaaattgtatttatacccatacttattcagcttgggtattttcaacttagagagcttaaattctagacccagtataacataagaaatgtcaaatgtaagaaacaaagattctagaatattccagacccctggtggtattttctgagtcaaagggaagctatagaacgtgtagcaggacgagccacagacaaaactcctcagacaccgagttaaagaaggaagaggtttattcggctgggagaatcggcaagactcctgtctcaagagccaagctctctgagtgagcaattcctgtccctttttaggatagtttgtaactgtgtgatttggttgagcatgtgaatgggggtctggtatccttatgagccgtcttgtgcataagtagcaggcctataatattgtataattctctcagggggctatttattatcttttttattattattattattttggctaacactttacttgtgttgtttatgagccctcaccagtcttcagttcttaattttattttaaaaaccgtggtcatgggaggctcagatgggtcataacacacatcagattggtcatttcctgggctacataccttatatagaataaaattatacaaacaagttttttttagggttccagtacacttataataactataaaataataaggccttagcaactttttgtcctacctcagtgacttgatgtatacactgggaacagccctcagtctgaggaaggtcagttgaagtccttactgcacaagtccaaattttaaggaaaatgagtcttgtgatgagtttcttcatgctttggctgtgtgtggaccagtcagcttccaagtgtgactggagcagggcttgttgtcttcttcagagtcactttgcaggggctgacaaagctgctcccatccacgtataactctcagtctactgatgtttaaggttggtctcagaggttgggcccactagaataaactgagtccaatacctctacacagttatgtttaactggactctctgataccagaagcaaggtggcggggtttagggtgttgtaaacttcaatggtgatgttgggattttcacagagcaagctttggttatctagttagtctagcatttgttaactaatgatgtccttcggtatttattaaagtcaccacagcatgggaggactttatgtttaggttttgcccaagagttactttatctgcttcttgtgctaacagggccattgctgccagggcccttagacatgggggccagcctttggaaactccatctagttgttttgagagataggccactggccttggccaaggccccacagactggattaaaactccaactgccattttttttttctttctgacacatagggtgtaaagggttttgtcaggtcaggtagctccagggctggggccaacatgagttttttttttttttttttaactcatggaaagcttgctgctgttgattgtaataggtgtagtttatctaatctacatttttattaactgtcacccactaaaatattgacttaaatcctatagctatttgatttcaagctttaaattgatctggtattccttgcaggactccaattgcatctaaatagatgtgagagttgaaagatccatagggacttctctcactttacgatgtcttattttttctccttcttgttgatgaaatgccccagtgaaagggatagccaaatggactaaagcccaagtgtcactctagttattcggcagagtgcccagtaaagatccaccacaataccaccacacatctgcttggggatgaacaagggctgactgattgataagctcttgaaaattcttaagctcatcgcatcccttcaggtctccaagggatgctaagttgcctccctgtcgtgagagacatgaagtgaacttaatgttgggaagcggaagctggatggcccttgggggctgacccacagggtgccagactttgggatatagcagagagagcttggcatgacttattacttcaggctgtagaatactggaaaagagctaccatgcagcctacgcctggtcaactggaggaccaccttaatagaaaggggaaaatctgggcctctggcctgccatgtgcacaagcataacaattgcttttgtttaacgtgcaggcggaatatttgatccattttaaccaggcatttgcatcttggtatcctgtcttaattgctaaagtttgttttaagtctttaacttctatgatcctctagtaaaatgaatgtatgattttaggaaattataaaaaccagtcggggcagttcatccttgctctttagtggtccacagaatgttggaccaactatggcataaaagctctatgttggggggcaagactcctggttggcactggggtctttatcgaaatctcccccgattaaacggtcctagtttaccaatgcccagtctaaagagagtcaagagggatagaagtacttttctgaagtagaaagctgtctttgacttggcaagtctccacagggtataacaaggcaagcattaaatgcaacagtttgaggtgaaattgacttggttatgttaataactagatggtccgcaatagaatgaggaaagaagaaagagtaatagaatagatgaaaagagttaaatttttcttagctttagcttggtagggttttcccctgggactatggcccacgactctggagggggtggcgctttcttgactcaggtgtgatgagtccatccttttttgctgtatgaacagcagccttggtggttagcagcacaaagtagggtccttcccaggctggctcgagtttttcttctttccaccttttgatgagaacgtgatcttcaggctggtgctggtttactggaaattctaggggtggtatgcatactaaaagacttttaagtggaagataagccaagtatataatttttaagaaattgaccatttgttttaaatgtggggaccttggcagtggactttatagtccttagtgccttgttactgagaaatttcctttagcacctatttttattagtttttaaatcaaagaaagccaaataccattacatttaacaatgcttcctgtatgatttttataccagataagttaaattttacctttatattaatgtgttattaatgttaaacctaattttaataaaaccttgcagacatatttatctaatttttaatatttgactataaggtaagattttatagactctttttaacattttataatttttgctaaagagcaggttggtacttcaagaaaaacctgttatgcttttattttaatgtccagtttacagaaaaactggatgatacctctttaactttagccgatgtttacacacagattttttttttcaattaacattttaaaacttgattaaacctttaaaacaaaacgcacatatttttaaccttttaatgtaggtaaaactttacattcttatgcctccttataattcttctattaaaagtatattttactttttttatataccttgcacataaactgtttctttaatagttttacatttaggaggcctaattacttttaaactagacaacatttcttgcatgaatttccttttataaccttttttttcatgactttcgcaggcagttcttcaacatgcttcaactttctgacttattacaaatatttctttctttaaacaaccagctaatttatttcaggacaagaatttaccatataatactctttttacataaattctgcccccccttttttcctttttttttttttgaagatgataaccatttttttccaaagcaaacttcttttgtgtctgtggactagactgtctaaggccgcaagaatagaagttagtataaaacatgttacactgttaacttttagcaaactttacttttgttgaaaaccttgcaagtttgggattttaattatcttttgctattaataagaccttgttttgtccaaattaacttagaattggtatagatggctttttttttcctaacagaatagccccttgctttaatatttttgagttagtaagctacttttttgcttttttgatttaggatatttctgaactgaactagtgaggtgtgctcacaatgaggtttcctctaaaagttattattattattttactttttttctgttagcaaagtagttgctgctacagattgaatgcatttgggccatccacgggctactgggttaaggatttttgataggaaggcctcagtgcttttgggatacgcccttgtttacactgacaacaaagtagtattggagtgttacaggattatggagaataccttcaattatcaattataggtttcaaatttaccttggcttttaaaggaatagggtacactttttttcttaactacttgtatatctctgtctttctcttctctgtctctctctctcctctctgcctctctctctctctctctctgcctctgccagccacttatgctgcaattctctcaaccactgtgaagggatctaaaaccagcagtaaccaagcatctatgtacgggaactggtctgggtgccctggctttacaggttaccttgtgccatacctttgaaacaagggacctttccaggcttccttctgatggccaacctacctctaatgctggccagtctattttacataaagttctaagttttcctggtgtcatagtctcccttaaatccctttttgaaatttttcaacatagttcctagtagggtgggcttatttgtgcctgacccatgcttctttgaggcaaaacaccacgctcacaccacatgcacaccacaaaacaaagaaccggtaaaaagggcacacacacacttttacagtttacaccaaacaaaaatcaaaaccaaaatcagagtatccagaaattcaagccaagtcaaagacaaaaccaaagtatcaagcaatccaagtcaaatcaaaaacagaaaccaaagtgccggtacaggcacaccatcggtgatcaggccatgcttccactcaaatggagtaggcaagttcccaagaccagtcctgtcaagcaattcaaaccaagtcaaaaccaaaaccaaaaccaaagtgccaataaaggcacaccgtgggtgagcaagccacgcttctactcaaatggagtgggcaagttccaaagactagtcttaccaagtttcagatgtccagactccaagtaccagttccttcccagtgttcagccactgtgttgatcctccacgggggcctgccacacactgctctggcaaggcgtcccaccggggcaaatgcctacctgggagtgctctcaggatccacgttgctcgggctggccagagtcccccaccggaatgttccacagggcaggcttaagtcacctaaggagctgcctcgaccatccaccaatcacctcacttcccagtcagggaaccaggaaatgtagcaggacaagctgcagacaaaattcctcggataccgaattaaagaaagaagaggtttattcggccagaagcatcggcaagactcctgtctcaagagctgagctctctgagtgagcaattcctatcccttttaagggctcacagctctaagggggtctgcgtgaaagggttgtgattgattgagcaagcagcaggtacataactgggggctgcatgcactggtaatcagatcagaacagaacaggacaggaattttcacagtgcttttccatacaatgtctggaatctatagataacataaccggttaggtcaggggtcgatctttaactaccagacccagggtgtggcaccagactgtctgccagtggatttcatttctgccttttagtttttacttattctttcttcagaggcagaaattgggcataagacaatatgaggggtggtatcctcccttaaatggactccaataaatgtaagtcagctgtgggtgtatggattgctctccattagcagggagcagcttaggttgatgcagcagaaaggtggcagagtcttaggtttgagttaggcaagatagatgaggaaaaggcagacagtgaactgctaagatggaatgttcgtgccttatccgagaaatgtccaagtctgcataaccaggagagacagaggatgttctgagatgtctccctgcactcttgctatgtctatagtcaattctccacaccctagccagcaagaccaaatgcaagtctaagtcaattcaagtcattcccctgcttaagactttccaatgtctcccagtagctgaataaagttcatatatatttccaaatataatttggaagataaacaccaaatacatttctaactcattgccattgcctacaaggccctaaatgatccattctggtaagctctccaacttcctttcttaccctgcccccactcatgtccacctataccagcctctttgcagatcctgaaacatgccatgctgaaccttttctcagggacttcttcttgctgaacttcttcccccattcccacctctcccagactgaaatgatctatcctagttgtctgcctgtattgatctctcactttattagggtcctcacttccttctcaagtcttctccttggagaagtcttccctagtacactctctaaaatagtttctccacccgtcatgaggccaaattatttgtttacagtaatatcactttccccctcagctttattgaggtacagctagtatccaaaaagctgcatgtaattaatgttcacagtttggtgggtttggacaagtgtatacatacactcacgttatcattactacaagccaggtaataaacatatccattacctccaaattttccttgtgtcccattgttttgtttttatggtaaca

SEQ ID NO: 179 - DNA, 191306 bp, Homo sapiens
  source 1..191306: mol_type = genomic DNA
tcactcctgtcttcattttatgttccactgttgtgcttcccatttgcctttctctagttttgttttctgtgtttctacggactgctctcagcccaggtgtgcaggaagcacacacatgcctgcagagccttcatggcctctgcattcagggcatgacttcaacgcacagtggctgtactgatttgttaaaacaaaggaacagattacttctcctaattcacagggaagttccaggttgtgcgggcagtgagcagacctgtgtctgtctgcgcttgccctggtgaaaaaccccaccgttcaggctgcagggtgcgagacccaggcacaaacattttgctggatgaggaggaaagatgtaaggttgctccccttcagagacagcaaagggcaggtctgtagcttcacttacttcaggattgtgatttttgacagagccgagagatcagggttgttgaaccaggcctgaaggtcctagtgaatctcgtgaagagaggaggggtctggctgtaacatggacctagaggacatttttactgcaggagaaggaacagtggggatggggtggacttgccaaaggaatatagctcaagttcctgcagcccaaaaaagctcagtttcttttggccaaagcttccgcgagtttccctggcatttctcctgcgggagctacaggggcagtgggacacttagcctctctaaaagcacctccacggctgtttgtgtcaagcctttattccaagagcttcacttttgcgaagtaatgtgcttcacacattggcttcaaagtacccatggctggttgcaataaacattaaggaggcctgtctctgcacccggagttgggtgccctcatttcagatgatttcgagggtgcttgacaagatctgaaggaccctcggactttagagcaccacctcggacgcctggcacccctgccgcgcgggcacggcgacctcctcagctgccaggccagcctctgatccccgagagggtcccgtagtgctgcaggggaggtggggacccgaataaaggagcagtttccccgtcggtgccattatccgacgctggctctaaggctcggccagtctgtctaaagctggtacaagtttgctttgtaaaacaaaagaagggaaagggggaaggggaccctggcacagatttggctcgacctggacataggctgggcctgcaagtccgcggggaccgggtccagaggggcagtgctgggaacgcccctctcggaaattaactcctcagggcacccgctcccctcccatgcgccgccccactcccgccggagactaggtcccgcgggggccaccgctgtccaccgcctccggcggccgctggccttgggtccccgctgctggttctcctccctcctcctcgcattctcctcctcctctgctcctcccgatccctcctccgccgcctggtccctcctcctcccgccctgcctccccgcgcctcggcccgcgcgagctagacgtccgggcagcccccggcgcagcgcggccgcagcagcctccgccccccgcacggtgtgagcgcccgacgcggccgaggcggccggagtcccgagctagccccggcggccgccgccgcccagaccggacgacaggccacctcgtcggcgtccgcccgagtccccgcctcgccgccaacgccacaaccaccgcgcacggccccctgactccgtccagtattgatcgggagagccggagcgagctcttcggggagcagcgatgcgaccctccgggacggccggggcagcgctcctggcgctgctggctgcgctctgcccggcgagtcgggctctggaggaaaagaaaggtaagggcgtgtctcgccggctcccgcgccgcccccggatcgcgccccggaccccgcagcccgcccaaccgcgcaccggcgcaccggctcggcgcccgcgcccccgcccgtcctttcctgtttccttgagatcagctgcgccgccgaccgggaccgcgggaggaacgggacgtttcgttcttcggccgggagagtctggggcgggcggaggaggagacgcgtgggacaccgggctgcaggccaggcggggaacggccgccgggacctccggcgccccgaaccgctcccaactttcttccctcactttccccgcccagctgcgcaggatcggcgtcagtgggcgaaagccgggtgctggtgggcgcctggggccggggtcccgcacgtgcgccccgcgctgtcttcccagggcgcgacggggtcctggcgcgcacccgaggggcgggcgctgcccacccgccgagactgcactgtttagggaagctgaggaaggaacccaaaaatacagcctcccctcggaccccgcgggacaggcggctttctgagaggacctccccgcctccgccctccgcgcaggtctcaaactgaagccggcgcccgccagcctggccccggcccctctccaggtccccgcgatcctcgttccccagtgtggagtcgcagcctcgacctgggagctgggagaactcgtctaccaccacctgcggctcccggggaggggtggtgctggcggcggttagtttcctcgttggcaaaaggcaggtggggtccgacccgccccttgggcgcagaccccggccgctcgcctcgcccggtgcgccctcgtcttgcctatccaagagtgccccccacctcccggggaccccagctccctcctgggcgcccgcgccgaaagccccaggctctccttcgatggccgcctcgcggagacgtccgggtctgctccacctgcagcccttcggtcgcgcctgggcttcgcggtggagcgggacgcggctgtccggccactgcagggggggatcgcgggactcttgagcggaagccccggaagcagagctcatcctggccaacaccatggtgtttcaaaatggggctcacagcaaacttctcctcaaaacccggagactttctttcttggatgtctctttttgctgtttgaagaatttgagccaaccaaaatattaaacctgtcttacacacacacacacacacacacacacacacacaccggattgctgtccctggttcaagtgtgccaagtgtgcagacagaacatgagcgagtctggcttcgtgactaccgaccataaacccacttgacaggggaaacatgccttggaaggtttaattgcacaattccaaccttgagctgcgcgggttccaagagccaggcccgtacttgctgttgatgtcattggcttggggagttggggtttggtgcccagcgcggtcgttgggggaggggcaaggcatagaacagtggttcccagaccttgctgcacattggaattacctgggattaaaaaaaaaaaaatcaaaacaaaaaccagtgtctggctcccgcccccagacattctgatttaattggcatggggcaagacctggacttgggattttttttaatgctcttcatgtgatctgttgggcagccagatttggggatcactagacggaagaaggattgttaaagtctccggagatgttacttgccaatgctaagagctctttgaggacatctggaattgttacaatattgccaaatataggaaagagggaaaaggtagagtgtgattccaataataaaggattccgcttttcattgaaggaactggtggaaaggtttcttctctgctgagcctgcaggcccgtcctgcctgcctggggtgcccgggagacgcgggcctgctccggagactgctgactgccggtcctgttagtcaggtgtcagccctgtctctgccgaagagactcttctctttattttaaattaaaccctcagagcaccaccaaagcatcacttttctccctccattggtgttctcattctttgatgttacttgtttgaacaccactattagtagttggagatttgttcctgagaaaaatataaataccacttaatttgcctgtttgtcccgcattcactcaaaacagaatgctcctgaagacaagagagagagtaggagaacagacgctattccattacagtaacataaaagactggattttcaggggcaaattattaaaataggagatgagctcttttaacagaaatttgtttaaggcctgtgtctatcaaattcagtggattttattcaagatgcactttgtttagtgggagttttgtttggttctgggacatgctaacttctagacttgctgctcttagaggtaatgactgccagacaccatttcatgagtcctaatccccacattaagcataagaggtgcacactctcctcctatgggggaaactgaggtacgaagaactaaagtgactttcccacagctggtgggaggcagacgggaaattcacaccaggggcttccaactccagatccctctctcaacttccaaactccactgccttgtccgagttctggtttcaggagatccaaatcaggtgtgtgcaaatgtctaatgtcagagctggcaaggggaaagggcccagggagccggctcatgacgatgagcctgtctgaagcttcaacgcgggctgtccggcagtctgcattcctgccgagttcctcagccctctgttgggtcaccttccatagaggcagcttagtcctcagttcagtgagcatggagtggagactgcttgaggggtgctgagcaaagccctgcctcttacaggatgaaggtgctctccagaagggacactggaaagtattccaaggcgagtcgaattcccaactgagggagctttgtggaaataagcccgcccagccccacttctggagacgttcccattcagtaggtccgagctgtcttaaagagaaaccaaagtggggatattaatggtatccaaagtgagatctaccccaccctccctcctcaaaggaggtcagatcaagaaagcccaagcccggcctggcaattgggacctttcttctcactccagcccagggtgaaggtggacaagtcactttgacccttcaggcttctgagctgttgtttctgaattcagtgaatatttactgagtgcatagaatatgctagatattctgggctaaaggttgaagggggggtgagttttaagggtttctgctcttgcttccagattgctttcaaatctggaaaggacaccagtggtttgtgtgttagacccacactgccgtagcacagaatacaagaaactggctgagagctccaataggcttttaacagtaatttctggcttcacgtatttagtttcataactcatgatttttcaaaaacttctggtttgaagacaccgattgccgaaagtccattgtgctgcataattacacttggtccacgtgacagcactaacatgttctgaaatgtttttagaagtagtctcagcaaagatgaaggattcctccctgtttgaaaagaaaatattctttgttttttctttgatctaagctctaagactagcagctagcatctgaaacttttttgacgagagtgacaaaccaactctaatattaaaggcaattgatgattatgggcactgaagggaaggtaaccccaggctggtgccccggaatagggatgggtcacaatgttgaggacatttcgcctgttgcagaacccacctgcaacacagtgtggcccttgccatgtgacttgtgtgtgtgcctgtgtgtctgtgtgtgcgtgttttaattttgacttcataagtactctagttatgagcttatttaacattgggttttactaataggggtatgtgttgagaaaatttcaaagttttagaatatggttcacccacatgttgcttccctgtaaatataatttttaaaaccagattctgggccgggcatggtggctcacctctataatcccaaaacgttgggaggccgaggcaggcgaatcatgaagccaggagtttgagaccaggctgaccaacacggtgaaacccagtctctactaaaaatacaaaaaaaattagctgggcgtggtggcaggtgcctgtaatcccagctactcaggaggctgaggcaggagaattgcttgaacccaggaggcagaggttgcagtgagccaagatcgcaccattgcactccagcccgcgcgacagtgtgagactccatctcaaaaaaaaaaaaaaaaaaacagattctgttcctcagatccattccatttttgttttcctttatcacttatggacatttgaaattatggtaataaacattgttagtctcagttaattattactggtttattcttgaaccactaatccatagagaatagagtgtaaatcttaacttgttcctgtaggccatccccattaaacatcatagtgttttctcattcgttctttttcgttttcctcctacaggaatgaattttctaagaaaattccagcagttggctctttggacgacatctctagattgtcctccattgggcccataggcacaagctggccagtttgaatttgggcaagaatccaggcattggaacttattcaaataactagtttgcctgtaattttcactttttcagagtcatctgataaagctttcttgctacacatttagatagatacactcaatccagttgtctagaaagttccctgagccagctgggagcaggaggggtagttggggccaggaatattgggggtgtgtttactgagcccctagaaagtaagtgctagatttgacatttcaatccctgaaggccctgaagttcagtatcaaatgactggtcctgtggactgagcatctgtgaattgcatatgcttagagtaaattttactcctaccagtttcagcagcttgctttagcaagcagtatggaaacactaacatgggggagtagaatttctctctctgatccaagttttatctcattctggtgggttttcaaggagagactcggagtccaagtgtcctttctgaatatatctggaacttctcattaacaaaagactcaagttataatttaggggacaaggcacccaatgagaatgccttgcaggcagccctaagtacacctgcaattacaccattactagcgcggcagcacacatggccctgacttagtttaaataattacgtaagtcaaccatgattgtttgccctttgcatagaagggcaagtattggtacctgttacaacttaggcttttttttctttatgtttgagccatgatgagtgatttacactgttgcatccatatgttgagatgtaagaataaattagacttggtaattgcccttaagtgtctggaagtcaactggggaaagagagctagagataataagtgtgaaacaatgtcacagaatcaatgacggaactcttcccaggacaaaggatgacttttgagttcagtctttgcctttaattctacatggggaggagagcacgtttagccacaaatggaagggattactcatttgagctatttggttatatgattatttccccagagaataggatgtgcagggcattacacaagcagtgccaatagcagcaaagttcttgagagtgctagtaattcaaatggcaggaagagaaggaataaatggtaaggctacctacagttcacagagagctccatcctcactgtggctttggattttgtcctgtgtgaaagagaagtgactgtgaactgacatgctgtgtttggtgttttagaaagatggctgcagcagcggtttggggaatggactgcaggagtggcattggaaacaggaaggttcatgactattgccagagacagaggatgaagcaggagcaaggaagattcaggacaggggactccggggctgatcaggaggcagaactggttgataagtatatgtagcagcataagaaagaaagaatcccagattgacacccaggcttctcacttggaagcctggatagatactgaatgcaatcacaaaggctgggaagtcaatgggactgcagggaagggaagggaagggaggagaagaggaagggcaggagggtccaatatcaatattcagcttttagatgtgttgagcttgaagtgctcagatggagaagtccaggaggcagtagaatacggtggtccagagcacaggagagcaatgtggcttgagttgtcatttgctcacatatttccgtgtcagttacttgtcttagatcacagaacaagttctcctctcacagtttcctggctccacctgtctcatgctcaccgtcagcatcgaaattgagccacaccaggggttctggataccagcttctctctaggtgaggctgctatagtcagcagctgattagttgcagttatcagcaactggtaatataatatattgtgcatataagtgtaccagaagtcatgtttatatattgctgcaaatactcggaatggggatctcttgttccctgcttaagaccacatcacattacttggttttgtacgctagtggctgaaccaaaaaaagtaggagatgattttttttcttttttcttaaagcagtagcttttgaaccttgaccatgctttctaaccagctgaggggcttttgaaaaagagggtgccttactgtgccccagaccaggacaatcagtatttctggggaatggagcctggcacacacacatttcttaaagctcccttggcaattctgaggagtggattacatgttgtatgtagctcgtaacgaaagaaatcttgtctttgctctcagacccccatttcttactcatctcatgagctccttcgagatccagaaacagttgcatatttcattagtaaatcagttccagagtcacattttatttcacaagttagtccattaaaagtttcctgcagtgaggaaatagccagaaagaacactccacccctcctcctttttataactatagggtctggctcgacagagcaggagcatcgccatcttggacaagcccctcattctaaagttcaccttaataaaaaactgcctaaattcaaactgcatcagcctaatggctaaggtcagcatgaccataaaccacaaataacatctccaaccggaaacattcgaaactcctcctcgaccagagacatgctagtcccgagataacccccctccagcagggaagatgccagtctcgggataacctctctctggccggaaagatgcctgccccaagataaacttgcctcctcccagagatattccaaccctgccataaaacttctccctcaaacaggaacattccaaaattctgataatctccctcaccctaaaaccaatatatactcctagtctgtaagagaaagcgctcttgaccaaaattcaccaggagtgcctcccaggttttaactaaagaaaacctctctttaactgccaaaaaaaaaaagggaaaaaaaaaagctttctgcagtggctttcagcgggcccagcatggcagcagcacctgagaacctgttggagatgcacactcttggaccccaccctggcctctgagtaagacactggaagggcaggccccggtctgtgcacacaagtcctcagggagattctgactgatgcatgccagattttgagaactgctgatatactccaggcacatcgcatgctgggatctagatacaccaagggaacaaaataactgcacttgtcctctgaggaccgacttaccttttggaagggctgagaaagagagacacatacaagatcactccctgtaatgcaatgttttataacagatgtgatttgggatttcagtgggagcccaaaagagggactgactaattcagcctctgtgacaaggggagtttctcagaaacagaatgcttagctgggcctccaggcacagggacaggaatgaggaaatacttgtaggccctgtgctccttcagcaaaaccctcagtttcttgttatttttataaatgcaaacatcttattaaagtagatgctaaggcattagaatttcctgctttatttttctaaatgaccatgaggaaacctggaatgtcaaagataaagtgcaacacattctgcatttaaaaattaaaatgatcctttttaaaagtagcaaccagatgtgaaaaattggactggagtccaggttatagttgatagctttaactttctccccaacagcaacagcacaattttccctaaaatgtgttatgaataagtaaaatgactacttcacatcctttaactcttcctacagaaatctaagagagaaatgaaacaaaagtttgcacagttctagacacgataaatacatgtgaaatcacacaactcagaaaatgtcccttaaattaattgagccattggtacttgtgaattagaagagacatctatgttctgatccactgttgaaagctgtacaatgttacctatttatttgcagacatcctttggaaacaaataggtagatttgcaacaaataaagagtggagtacagctgctgacattaccttgtatattcatgcctttatgtaaaaaaaaaaaaaaaaatatatatatatatatatatatatatatatatatacacacacacacacatatggaggtaaagaccactgcttgctttgcagttgttttaagagcattcatgaaggattttattttataagcagaaatgtgatatctgacgattttaccactacatgcttgcaggccagtgcacagcagatgacgtcatgattgttttagcagtcctatcgttttacttatgatgtcattacaaccctttgctaaaatttctttcctttactccaggttttggataaaattgatgcattgcacatagtctctctgataagacaaactggcatttgtatgtgaaaaactgtgcatgttttagtgtctctgctgatactcaaattatccattattttagtgctggaataaaaacaaaccacttagtgaatttgtgcaggtccttaaggacaggcaaaggtgtcctgagattttctgatcattgtataccaaattttagaaactttttcaaaaacatttttttaatttcaaaaacctggttttgtttatttaccagcaatcattgaatacctgaaagctttcaggagattttattacaatggtttctattcacttacaaaattatctcctagttcattctcatacactgtaagccattgtaaatgcttcaaattgtgccgaacaagataaactagacaaactattttaagtttgttctagtgctaacttgcaagatctaatggctccaactagatttttaaaataaagtatattttaatatattattagaaagttaagcaattatctgtttataggtaacaaaaaccctggaaccccaatgtcagatgtcatccacttttgattaagtccaaacatatgacagataaacaaaagatggttggctgggctcagtggctcatgcctgtaatctcagcactttcagaggccgaggcgggcggatcacaaggtcaggagtttgagacttgcctgaccaacatggtgaaacccgcctctactaaaaatacaaaaaaaacagctgggtgcggtggcacgtgcctgtagtcccagctactcaggaggctgaggcaggagaatcacttaaacctggaaggcaggggttgcagtgagctgagatcacaccactacactccagcctaggcgacagagcaagactcagtcaaaaaacaaaaaaaaagtggtcattggagaattattgtgtcacctgttgttttttaatgtactaattttgagaggcttttaaatagagtgcactatagaactttttcttggcttcaatttgctacaatgttaatagagaatcagaaaccttatccttatagatgtttcttgatttttttaatttctggtgacatttatgagtgagaatagtgtattgccctgttttctttcttactcccctttcttcttccttccttgctttctttcttcttcccttccttctttctcttcctcgctccttcttttttacaagctgttatgaattagccttcacagagaaagaaaaatttttataaataactggaaatgaaactttgcaaaggactgcagatgaaaaactttgtcaaatgactgtaaaaatatactatataattttcaaaagttagaaagtaccaaacacactcagtattcatggttatacaagtatgcatacacatgtattgctccctgaaaagtggtgttgttaagggagtttttcttagtacgcggcttaacatatttttttctgtaatttgttgttagttataatggggagagaaaacaggttagagtctcccctctcagtttcaccttccataaaacagctaaactagacgatcgtcagactccttccagctgaaaacatctgtaaaattaaaaacaaatctaaatgtatgcaagatatgtatttaaacatgctggtaataagtgtgctgtccctataatttagatgctaaaacattgatgtcataataataacaacacctcgcatttgtacagcacctcatagtttacacaatgccttaacattcttctctctcagcctcctacaaccccacaggattgggatagctttccagattgggaggtgagggacccaggctcagagcgattctgctgttgtccgtaatcaccaggctggtgatcagtgggcactgggtgctctcctgctacacagcactgtctctcaacatgcaggtcaaggttacttattcctccttcaagacgtcattgggttttttagctatggatgccccatcacttttagttctatttgtgaatcaaaggctaaataaagtattcctcaaaatttgttatacttctgttactaatgcttaatgtccctcacaatttctgtatatttctgtgtatttctgctctgttttggttcctttcccaggtttcttttttgttatgaagtagtttttagactcaagtctcttctgtatgtgttataactgcccattccataagatacagggcagtgaatttgtgagccttgaaaatatttactttagaaatgagaagtatgacttttcaacgttgtgtcatcaacttctgtaaattttccagacctataaatacttgcagaaaaaaaatgaaaggagaaggcaacttgatttagcagttgggtcagttagcaatgcctatggcaagctgtagtaattcccttacatagatttgtaagactcatttctatgatttaaatgaaggcatacacttaacctctttagggtgtgaaacagcttttacaaaaagagacaaacttaagaaacagtgtggccctccaagagtgttcattttccatatcataccatttgtaataagctattctggctgggatttacttgcaagcattggcttttaagaagagatggtttcacacatcaaattattcacttggaggcactttctgggttgaaggaatggaatggagagtgcggcagtgagtagatctctcagtgacggtgatgtgcctctcccagaagaaatttcaaaatgcagtgttcattttcctccacaagaaaggaagaaactgttttgttattgtttattcctaacatagtggaaacttttcagtactctggcagaaatttcccaaaagcaattttctatttcatgattataaagtagcaaaggaaaaagtcctgcactccagctgagcaatggatctccagttgttatctaggtgctgcaggtttagagaggattgccaggagaacacatcgatttttcaggcctgtgatgacgtatctcttgttgaataagtaaacccttccagtaaacagacagttagtatattgatttcagggtggctttagccactgaacctgtaagtcttgcaaaggttacttgggcaaaagcatcattattttaccttcagtcaacaaaaatctacctggccaaggcagaacagaaagttcagcaatttgatgaagtgggacaacatgaagaatcaggtgagttgcctactttttcacttcactttccacctttagagattcttgtttagatgcagagtagtgacgtgcctggtgtcagggagagagttgaatgagaaaagtcccagaagggcagaagacttgggtgattatctgagtccatctttccttatcacatgacagagttcttgaagtcttggctaggaattctaggcttttagattctttgggcaatggctactaaatgttcataatgttgctcagttgcaaaaacaagacattcaaactatagccagggagataagtagtcacgaactcaaggcctaaattctgctgatggagccgatgagaattgggtgctaaggcaaagagagttgccaatattatattcttcggggttttttgtttttattcgcattttggaaaaggaaaatattagcattcctctgacttaatattgagaagacattgggcactctttttcctcccacacttgtcttctttcactaggtgacaagggaagaggtagcatgaggtggtggtcacaggtgagaggggctgttgtgagcacaggcatgttgactgcacattggtcacctagtagaagttttgcaggcttggtgacttctgaacactgttttcaaggttgatttttagttgagagaacctctaggtaccacgtaatgttattaacagtagtactgatctcacaatcgccctatgtcccattcacaagatgttctgccaagccataaaaggcccagttaagtttaagagaagtctcaaaagtaacagatgataactaattaatacccagtgattttgaaatgtagacatcaaacataccaattcagtggtatcatccttagaggcagacagaggatgattaaatcattcagcccatctctgtctgaggacgcagcttagcacagcatggtggaggctaaatgggccttaagggaaaaaatgatatctgaagatgcaatttatttcaaaaagagtttgctcccgtgaattttcactctctatgtagaacggcaccagcacacacttttcctgagcctttgcatgtgtggcaggcagcggcctggcatcctggggaactgaatgaggacgcagatgacccggacgtgttcacagtttgacacatctgactcccagatcagggacagctagctttgctggctggttaagttgatgattccatctttgcctggttctctgactgtctcatgctttctgttattactattttgcagcagatatttctgctcatttttcaatcatatatgcatcctggatggcatagagttgattctcctaacaaatcagtgtccctttgtatttttttctggccataagatagaatatatatgtcatttattaaaaatggagaaaatgttcaggagtttcttgactcagagagggaaaagggatactcagggcactttttcagccaggaatttactacctttgcagggtaaaggggactcaccacgctggaagtcaaaataagccaccagtgccaagtgttcaaagcccttagaatcacaatgctcttaaagcaaagtcttcaacaatgcttgaaaacttccactggttctcagtatgtccaaaattgtcatgtctatgaatgattttctcaatctgaaaatttttatagcaggctaaagaatgagataggtcagtgtgattctagaactaatcattaacattcaatagatgactattttattctagaaaaagcagcaactttctatttactctctattttgagggtaaattctctgtaagtagaaaaagcaaaatgtggacatgggactaacatatgaatatacaaagcaaatgtaccgaaaaaatcttaagacctgccttgtggtgttttttgttttgttttgttttcattaaagtgacttgttagcctcttgctccctgtgaagcacagggaggtgacgtgatgtgcacagggcagactctgccatatgccctggccttgaactcagggccccctggggactgcaggggatgctggccatgctgagcaatgcctgtgggtgtcagtttcctcatctgcagaatgagggtaggcctggtgcttatttcatagggtcgcagaggggattcagtgacagggtggtgtagaggctggagcgtgccccatgtgtgcacgacagccttccaactaggggaggcgggcctgggctctcaccagagagcctgtgttctccatggctacatgactttgccccagacgtccttcccgtggtctggaccctgggaagtcgccaagagccagacaggagaaaggctccacttggctctcctctttggtgaccatcccttgcctccatggcgggactctcaggtgacatcccaccaaccctcactttgcttccctggtgggtctcactttccctcaagagtgttgcttttttgtttcctgcatagtcctgggccagttttgataaccctcttcatttcacttcagaaaccctgatgatttcttcctgtgctctttttaccttaggacttttactatgacgactgtgactggcccatttcttgttttttttctcttgctctgctttctcccccatcatcactaaagcagacatggcaatgatggccatgcacactttccaagggtccagctgtagatcttcatggttccccaggtgcctggaccatcttgtgaggagggaggcaaacacaccctgcctggagcacttggccctttcggcaatgttttggcttcctcaagtgagaaaagaatggatttgtattccccctctgcattattgtttttgttttgtttgtttgttttgttttgtattgagacagagtctcacttttttccccaggctggagtgcagtggcccgacctcggctcactgcaacctccaccttccgggttcaagtgattctcctgtctcagccccctgagtagctgggactacaggtgcccgccaccacacctgactaatttttgtatgttttgtagagacagggtttcaccatgttggccaggtgcccattattatttgatctggaattaactgagctactgcaggaattgcttgattcactgatgactggtgttgagccagtacacacccacacccaaggactgtgactgtcttctgaggtccatcctcagaaattcctgtctcttcacctagtgtgtaataaggcctgcgcgtgttatatggaactgtaaaaaatgcgccaaccatctgtccttcctctttatctgattacttatcattgttctctaagttgcaagttaatagactgatcataaattaatgcatgctggagacttgctgtttcctactagcagcatataaaagttatttttaaagttgttttaaatctgtgagtaaaaataaattgctttgctgcaagaaacaccaaacatggaaaagctaacggttcaaagttaataatttatcttatggacatcactagtggcatagttgctttaaacagtgagaggatttaatagatatttgatttgcaagtgggatgaagggtggtctaacctttgtcctgtgtttaccttccatgagatcctagaggttgtacagcacagtagtggcatgtgacacacttgagagtgcctgttctgtttggaaacctggaaactatgaagggaagtggccttcgagcttaacacataagacttgggaggcaaaaccttttattctctttaaatattcactttaggataagcatttttttaggtgttaggaacagggaaaactgtgtggttaggaaggaagaaagaagaaagttaactgttgtacattccctaggtaatgtttttaagcattgttattcactttcaaaacacattttatttatttggacttaatattttgatcttattttttcaatttcttttaatttaacagacaggatgagtttttttatagttgtattacttagaaattatactaaaaatggccgagtgtggtggctcacacctgtaatcccagcactttgggaggccaaggcaggtggatcacttggatcacttgaggttgggagttcaagaccagcctggccaacatagcaaaaccccgtcttcactaaaaaaaaaaaacaaaaaaaaaactagccacgcatggtggcaggtgtgcctgtaaccctatctactagggagactgagacataagaatcacttgaatccaggaagcagaggttgcagtgagcagagattgcaccactgcacttcagcctgggtgacagagcaagactctgtctcggaaaaaaaaaaaaaaaaggataaagaaatcatactaaaaacaaaacagaatgctgaccaccttatagaaatagaaatagtggtttgctgtgatagcaaattttcttgttaactttttatttttaaagaattgcacattcacaggaagttgcaaaaaatctactgggaggtcctatcccccttcccccaacctcctccagtagtaacatcttagtagcaaagttttgtatatttattttgatatcattatctaagtttgacatcattatctaatattaacctaagccaaaagcccactattttaattatctagtgatgcagtgttatagaactcatagcctttcacagcattatttggaagttaattttcttaagtgaaatgtttttggtctttaaggtttggaggccatggaggcatgaggagaaatgggatgagggagagagagctaagatagataaagacagagatggggagatccactgattcgttgaacaaaccagatacttccttatagtttttggattaacttacatgagctaagtttatattctgttcagatcacaagtggtcaagtttgtgtgtgtgtgggggggggggggtgggtgtgtgtgtgtaccactctacccatcctatatttattgtcctgtatttggtctgttctgccttctttattttcaggataggtgtcctaaatgagggtctttggaaagctggtgaggccatgttgcccgtttcaggtgttccgtgctcaaatgtattcatttcttgaaaaattcagggagtgcacacttttgtacattttcctatgtgtatatgataccattatataaatcttaaaaatatatatggttcacctgaatccccagccatttggtagagaagatagaaaacctacagaggaggctaagattttattagaaaattcagcttctcgacggaggtattggctttaaagtcaaggcaatgcatctattctttcttttgatataactagctaaaagatctcttaaattcaaagtggccctcatcttactgttactgcaatttactcttaattacaaattatataaaaataggttttgaaatactgtagcgacaaagtaacatacctctgctccattacacagataaaacctctaaggaacacctcctctcttaacaggcattaaccaactgcagaaactgcagaaggacagggctatttgggaataacacagctcccttccttgtctgttccctcccattgtcaggcttctgtggagccatattcagagcaacatagggagggggaagagaaaatcaaccccttggtgaaggaaagctcccaattcacagagcaaacatgggtactcttgtttgtgggagctcccagggcctcccagctcaccgagcattctgagccctgatccttacactaattgtattatgcaaccataaatgatgtctgctgtaccagcggggacagtttattttaatagattggtataacttggcagaatcttatctgcatgtttcatcttggatttttagctcaattcaactcaataggcatgtgtcaaatgtctactgcagactgagcactgaaaagctgctgggtacagggttacatggatagaaaacgtagcctctgacccctaaggagcctgtaatccagatccccattctttccatcccattctcccaagcaagaatttacctaatgtggtttgcgagaatttaagagctggaaaggtggtcacgagaagccggaatgggttcgctaaaatgtgtctatatgattaagcataacgtagctttgcagcactcttcacagcttcctcagagccttccgcacgcggtgtctcatttgaatacttgtgtgaggatagcctcatacccctcagtgagctcttcatggagtgatgcagtagacagcaagcctcacacttctatgctcacggaagaccaaatttgccttgaaaaatctttatagtctcttcacatttctaagttgacatcaaaaatcggttaccataaaatcctaatagttgaagagatgtaatttcaattatttggtaaacctgaccttcattgtcaaagcaattagtcaactcagatttactttctcccagataatagattctgacttctttttttctgattaaaaaacttaacaccttcctcaggagatctatctcagttctgaatgctgattctaactaagaaggatatttggctacatgctgggaagaggggtactgaggcacgccgcgattccactccagcatttccagttagtcgggtgcctctgcactcccggtgttccggcgcccagttagttgtgtactctgggctgtccctatactggagtcctaaaacacttacgactgcagatagggggaggtttttcaaaaccttggtctgaaaagccatagaagggagataggaaagcgggggggtggagccacagtacattcaggtggatccgtttttggaaatagtacaaactggaggtgaaaccctggaaattgatctgtcgttcacatgcttcatgccgagtccttgtggacccacagagacacactcgccccagtttgaaggctgctaacttgattctgaggacaccagtgaggtggtagtgtgcaaatgatgtgtgaggaaactttggaggagtctcaccctgcctggagcacgtggcccctaaaacagcgcagcctcccaaagacagaagatgtggactagtgagaagccaggtatggtgactgctgctggatgaagcttgtcccaccagaggctcgcttgtttcattgagcacctactgtgtgcttgtgggatgcaaacacacgtgtggtccctgccctcaggttaataggcaggggtggaacagttatgaaactgctctaaagtcattttctcaaactgggagtgacaaatgtatccacttggaaaagattgagaattttataagatttttaaatttttgtttattcacattgaggagaatctaaattcttttgaacttatgtatagatttcaccattttatagtaataaatcagtcctcctgtgtgtgtgtgtgtatgtgtgtgtgtgtgtatgtaaacctcaccttgcaatattattattttaaatagccacttgcatcttaaggaaattaagaggacaaaagaaaagctgctgttttgtatgtatccacatatttaccagctgcttccctgccggcaggtgctctggttctgcactgcctgttgtcccttgcctgaaaatggttgcctccaatattttgctcagttttctgattgtttacagtggcagaggagggtagatctggtaccagttagtaattgccagaggtggaagtctgtggatgaaatttgtataacatggaacgttagttccacagttaatgctactcaattggaacccatggaaattattttttggtgaaaagggcccatgcgttatgaaatttgagatccatcactttaagtgaatgtaggccctggatacagtgggagctcagaagagcaaatcagttggtcaccttgctcaacgtattttactaagggcatcagtaaggctttctatgacctgctccttcaatgcttggttgacatttggggagcaaagataaactaaggattctaagttctgtcctgtgatgctgtaaggggaatctcaaacctctaggtggaggagtgcagagatgaccaggatggtggaagcctgcaggagagctgaacacctgaagacacccagtgggaagaccaggacctttaacgcccatatctgctgctcaagactggcagagagaagagggtttgtgatgagaaaaggtggtgaaaggcacaaggaggcacagagcatgtcaggtcccatatcccaaaaggaatgtgcttgggtgagggagagctcctccatggctggaggcattcagagaccaggcagtcgcttgtgggtttgtgattagagtgaggttcttttataaagggagtgagaagagaaggtctgtggatacttgagtgtatcggtaattaagaaataaattgtgtacatcccatttctttccacattttcctgggctgtcacagtggctgcaaagaaagcagtccgtgaactgaactgtgatcccagacaggcaagcacaccaggaatctcttctcagctgttgataatgagggagcgctggggagagaaatggggtcctctttgagtttcctctgtgccgatacctttctctttgttaaaacagctaattaaacactgaagcagtatagctctcttactatacactggtagtcatagttctcttactgttctcttcactgacagttctcttactatacactgatggtgacgcagaaattcagaattccccgcatgtgtcccggtttgaaagccactgtgctttgctgtggattaggatcagacagttgagtcttgttccaacaaggaaagttgcttattggaaagttttgctgcagggagccttgagttctgcatcaggcttggaagtgggctctgtggaggtcagaaggaggatcccccacccgcagcctcaagaaaaatatgaaaagtggattatgcctctgtagctatattgcctataaactttctgcagaatgacagtattcatatcctacattttttcaaagcgatattaatcctgagacctgcagctaaagtcaagtagaatttagggataattaataggaggaaggtggggttggaagatctgcatgattatagtcctctgatataactggaaaattctttccattagcaaggagctttggttaatataaaatggacagattaaacctaggcaatttattttactcattgctgtatttttatttcagagctggttgaaaatattacaaagtaatattttaaagtgcttatctaaactcttactctgcattttatcattgggttatgaaatgactggggaaagacttttcttgcttttatttctcagtgtctacttataaacatgttttttgaactactgtttttgtgacaacatgcctttttcccagaaaatctcaggttaacattaaataggcactggatgtttatctgatcttgtttatagaaacacaagaaaattttaaccttgtatatactttactcaattaactaggtaagaggtcattgaaacatttagaattccactctacatttcaataattatcaggtgaaagctactgcatctacatcagaagatgtttgtaatttatttaagaataaaattagctatgcaagaaatagtatgtggagtcctatgtggaaatcacagaaaccctgacaacttgatgatctttccgcaagctaaaaatatcactctggatcacagcagtagaggactctgtaaatttaatctgtgtgtctcctgtaaataagtgcattagcagtacacaggtggtgtcagagtcagtgatgatggatagaaattctacataaaatccaggctcagtggctcatgcctttaatcccagcactttgggagtctgaggcgggtggatcacctgaggtcaggagttcgagaccagcctggccaacatggcaaaacctcgtctctactaaaaatacaaaaattagctggatgatggcacatgcctgtaatcccagctattcgggaggcggaggcaggagaatctcttgaacctgggaggtagaggttgcagtgagccgagatcacgccattgcactccagcctgggcaaaagagcgacactccatcgcaaaaaaaaaagaagtaagaagttttacataaaaacgtggagtgagcccaaggtgccatttatccagcccatacacatcgtaccatgtacagagtggacaccagataaatacattgactgcatgccacaaacatatatatgtaggcaccgttgcattcaaatacacatctgcagccctaacacatctttatttgctaacgagcatcaatgtatttaaaaacaaacatgtttaaactagtgaatgattagattataatgatcttaattcataagttttctcattggccttttgtatacttcaattgtaatacctagaaaaacagttatgtccaaaggagtgaataggccttatctgaaacaggtgagcgtgacaagtgttttcttacttattttacttttcagataattcatccttaaagtacattagtttaaaagtactgtttaaggaaacagtacttggattaaaacttgaatcattgttaaggaaaactataccttaacttcatgtaatcacaattaaacctcttcatatagaaggatctaagaattttctgcagcattcaccagcaccaaaaagctcagagacatatatttctttctctgtatatgtattttaaattcaagttagtataaattgacaggcaggtcagagtaatatatgatcttctgagtccccttagtaattaaaagaaatgattatttttgcatgaaatatgataaagtgattttaagtgcctgataaaaagtcttaaccatgacaaccattaaagattacatcaaagaaaaataagtttgactttcatttaccttggaaacagctattaactggtaacctcaagaaacaccatgaagagtcagtttgctccacacatgtcttgtaaaagtcaaataactggtggttatccagtaatgacaagaggtagaagttacatccttgctgtctgattgaaccttcccagagctggcacaaggctgggaagaccataggtgctaaatgaggaactacttaaagaaagaaaatggaatttcacggacaagaaaatccatgtccatttggttctgtgacccacatcctttgtatcctatgcttttttacacttggtacatggttgcaagattgcccctgttttctacttatagttccatgcagcatggatgtgggaaaaagtctcctctgcaaagggggttaatgcaggtcactctacgtatgtgcacgaggtcgttataaagctcgaaaatatgggctcaccaaccaggtgatttttttaattatccaaccagaagacataacatataggggaatcaaaagaaatctctgagtaaaataatgataacaggtcaaactttgcggtcccacgtgaggctggagatgcgtattgtcttgactttgcatctacaagtttaacaaatgatgctttctcagtttacctctggaaatggaaattagcattgcaaatgacttcatgaggaggtagaagctatctgtgaatttcctttcgctgtgtttacgatagactctcacgtctagatgtgtcatgtattatgttaaattggtatgtcttgaagttataaagcacagccctctataagtatatatattccacctctttcaaatcggatggtacctatccttcaaactgctatttaatgactgtctgctatgttcaaggcactgctctcaatgttaatacttgatgagatcgggcgcgttcaaggtggcatggccgtagactcaatgttagtatctgaaatatggcctacgagctgagttgtgaatcaagttaatagattttcggaatgttaaggtctaaaccagtagctcttaactgagacaatcctgtcctcatctcacctgggagacatctggcaatgtttggagaaccttttggttgtcacactggggcatctagtgagtagaggtcagggatggtggtaaacaagtttttttgtttgtttgttttgtttttgagacagagtctcactttgtcacccaggctggagtgcagtggtgtgatctcagctcactgcaacctctgcctcctaggttcaagcaattcttatgcctcagcctcccaagtagtagctgggattacaggtgtgcaccactacactcagctaatttttgcatttttagtagagacggggttttgccatgttggctaggttggtctcgaactcctggcctcaagagaaccgcccccttcttggcctcccaatatgccgggattacaggtgtgagccaccgtgcccaggctaacattctttaatgcataggacagcccccaccatacagaggaatccccagcccagaatgttaatagttctaaggttgagaaacccaaggttaagccaagtcaacttatctatcttctttaaaattgcataagaatgcagtcctgttcttcattcctcttgctttgcagttaatgatcctttgcctggactttctaagtgcccagaagagcaacagccagcatgcaggatggcattcctgaccagttgcacttggcctagcattccaacctcacctgcctcagcttgttcaacctgaaaacctaccaagtgaaagcaagagccacgtgaagacgccttagttatatgcacccacccagacacttgctcagaaaggaatcagtggggccctggccttagaaactggctccttcactgctgtagaaacaacataaatttaacataaaacacgtgcttttcttttttcttcttactttttcctgtcttggcaatgcaaggatgccattaggtaaagaaatccttcaccacactaatcctgcagagccagaagagaaaccagcttgttctaacccagctttgtcatggagagaaggcagctgctccagtctgaactattctttcttttggtagcagcctgcccaagggtgaaagtgtgtttaatagtttgaattacacaagtgaacagtaaatgtatgcctgtttctgctttatgggactttgaaataatgttgtttgtgccaaggttttagattactatacctaacaacctagaaaaagaaatgaaaaggaagccttctgccaggcagaggtcactacgggcctggagctgggcacctgactcagcagctgcccagatccccagagctgagaagtcaccatgcatttgtggtgcttcgagcgagttaccagagtcctggaacagagcagcacacctgcggggtgtccccttggcatttgggcagggcaggtgaccaagggtcttgttggaactgaagtccagcttgaaaagcaaatctggttgtgagctagagtccagtaacacttgtttcccgccgccccccgcataactcgtgtgtcctaaaatacaataatttcttgaacttcagtcacttatgcctataagcgggcatacaacaggggcacaataaatgtttgttaagtgaatgaattctttcagaactagatgggatcttagtccaactctcttatttaacgaggtccacagaggttctgcgattgtctaagaaagaaggctgtgttcatggcctttgttgtttacgtggccctgtgattctcttggctccgtgaaagtcctgatgcagacattccggccatctagaaaggcatgcagacaagccatccagctggcatgatcctgagtccagctttctttaaaagagcttccaaaactgcttaagctttgactgcacaaaacctgcatcacctccagttgagaaactcaagagaataagtaagttatggagttggagaccccagcttaactactagttttaaaatagtgaaatcaacattttcaaatctttgacttcactaagatttaataaagtttattaatcatatattatgagttattgctctctctttatgtctgtaatgcagttgctcctctctgtataaattaataagttttagagatccaaaatgagaattttaaaataaattacgtatattttaatcaagtttaatttgactatatccagctaaacaattgattgaacttcacttgcttttctatgacaggttttttgttcttagtaaaagaccccagttttctcacttgtgaacagaaggggttagacttcatgacagctaaggttccttccgtctctaacaaaagtggcctgaagagaggcttctagactatactcacggtgggttcttgggacctcagagtcagctccatcacttaagtggctgtgtgattgagtggagacacctcaatctctttgtgcctcagtttcctcacctgtcgagtgtcaacatgatggcacctaaagctgttgagacttcagaaaggtaatgtgtgaaaagtgaaaagtgcctggcatccaggaagtactcaataaataccaactattttattgctgcagctgttcttatagatgtgatttctagaacattgccttctaatagggtagccatgggccacaattgttggctgttcggtgtttcacatatggttagtccaaactaagatgtgttgtgagtctcaaatacacactggattgtgaagacttaggacaaggaaaacaatgttaataaaatctcattgataacttttaaattaattacatgttgaaatgaaaatatttgggacatattgagttaaataaaacaggagattaatttcttctgtttctttctactttttttattagtgtggctactcaaaaatgtgacattatgtatgcatctcgtattacatttctattggacagcagcgctctagacagtactatgggtagtatctgtggggaggttctcagaaacatgtcgcatgctcttttagaaccttaaagtattcctagtctcctctacttccagcccttggctcttgggcctcagtctttttacttttgcggctgtgtttctctgaaggcttggcattagtagattgaaaagaataaccatctagggaaatgtgaattcagtttctttctgacattctgctctctacaaggggatattatgtacacataaacctacttccaaaataatgaagtgaggcctaattccttactcttcagagagcccactgtggaagtgtcactgaccttgtgtatgggctgcccttcatggctctgggagtcattataaagggcagcatttggcgtggtgcgtcctaagccagtgtttctcggctctgttccttagacatgtgttagtgttaatagatgttcttggaaaaaaaaaaaaaaaacagcattctgaggtcaaacatgctcagaaagcttggaatctgcactacgcttctcgtacacatttcatattaaagattttggaaagtcctgcaatacagagccctgtctaatattgccacaacccacaattgctcaaatgtaaatagatttgagtttattcacattcagatcacctcttaaggccccacctcccaatgctgtcacaatggcaattagatttccacatgagttttggaagggacattcagaccacagcaggggaaagcagggtacttgctgctttgcaagtgtgtccacatctaattaatagtacagttcttactcttggtgtgtccggtgatattaaaaattaatgtgccttatttagataagtaacataaaaatcacaaaatgtatgccttagatttatatgtatttataactagtctatttcctgaaaacagttgagacaccttgtaaaagttaccggtacgatagggccattccaacaaagctgtaaagtggtgataacacagtcataaagaagaggagatagctctgggagaaaaggtggcccagaaaccagctctgagcctcatggctgcaggcaaggtctgcaggttcctggtcctgattgcaggccatttgctgccttgagtggtggttacacaaggccagccctgggggtatcacccagaacacctagtacacgaatttcagtttagaggacgaagcattactggagtattgttatgcaggaaaactttttcctaaaaatgccctgaaaagagagtagcctaatgcattcaatcaaaatgtttttaagtggaaaacatattgtgtgtacttgatctggcctgctgcttttaaaagattaaaactgggactgggcatggtggctcacacctgtaatcccagcactttgggaggcagaggcaggtggatcacctgaggtcaagagttggagaccagcctgaccaagatggtgaaaccccatgcctactaaaaatgcaaaaagttagccaggcttggtggcgcatgccggtaatcccagctagttgaggggctgaggcaggggaatcacttgaacctgggagccggaggttgcagtgagctgagatcgcatcattgtactccagcctgggcaacaagagtgaaactccatctcgaaaacaaacaaacaaacaaaaaaacactggggccaaagaactctgtgtgctgtatcacctaaccacatttcatgacacggctagagaagaatcatgcaaataaaaatttccaacatgttcgtaaactgggaaagtatttcactggggagtgagcagaaaagtaatactataacctctatatctagacaaatgtgaattcagtttcacatataaatatataagtgaaaaaatatataaatataaataatatgaaataatggttatctcaccactttctacatcttttgtgaatattttatagtgctcaaatatattagtgcactagtatatgtacattacattaaataactaatcatttattaggaggatgtgcttgttttttgctaataaagatgataataaaaaaatccttagaccccccctcggtttgttttcagttaggaattagggatatttataagaatatctttaaatgacacatgccttgctctgggacgaggcatctgcatgggtgacacatatgtgttgtgtgtacaggctcccagcatttccagggccctgctcagaatgtaggccttactgattcttacagagttacaagcgctggtgaggttggcgaagtttaggtaaacacagctgggaatgccccatggcctctgggtgactttggacatcactgaactttacccttagagatgcatacctgcatcttttttaccctgatagggccttccatgatgctttcaaagtgtttttgtctgcttttcggttaatagactttcacagtagccaattgaatatattggttaaatgcatctctttatacacagactggattcaaactgaggttgtgtctctccctggctgtgtgacgttgggtatgatccaagtgtcagattactcaacttcaaaatgaggacagagcctttcccttctagggctgccaggaacattgaatgagagagtgctggcagcttagtacaggtgttcattgctcttgtatggtactgtctgtggcacggctagataaaatacagtagccactgattcaaatttcaactgaggagtaaaataaactgaataacttagaaaagttttcttcttttgaatgactctaagaatttaaggagcatgtgagtgttgatggctctaaaagggtaacagagcccaactagctcagttctcagcatgaaaatagtcatatggcacagactcagtggagtgggtgcacttcaataactggaagcacagatgccctacagcagcatcaaagatggcactctaaactactttcaatcctttaaaataaatggaaacgcacatttagtatgcatatgacaacacgaaggacttcgattttgctgatgcaatacagttttacaggattttttatactcaaattagtaaaattctgtattgcatccaaattataaattataatatcatctagattggacataggaataacgaccactggtatctgcccagaaagctctaccgcctgtttataagctcctgcaggagacacaaaaagaagagaatttgaatataacttgaaatgaccgtaatctcctgccccaactcatttcattaccaaaccgcctctttcttcattatttctcctgaagcacaaatctatagagaactcagctgccagtctctcccactgcactcagcagtgaaagggttaggcctaggcttttcaaacagaccagtgcttgtatcagcccttaaacatctctggagaaggaaatgggatccttctttggtaattcatttttgacagttggggattaggtgttctgtatctggggggccttgctgtcttctctcctcctcctcccactgcagaccctctcctcccctcccctctccagctctctgatgactgcttcatgctccttccacctgaggactgccagcacagcctattgcaggaacagccaatgaggggctggctgtgctcttttatttataaaattataaactcaagcaaaatctagactatgtgtccccaagatcagaggagcacaaatcccttgcttacagattgcatggggggcacattctttaaaattggtccctgatctagactctagcctgagaatcatctttaagttcagaatttccactcatgacctcacatctgtgggctcccacattgtcttccaaaacacacatggcatctggcatcaccttcacccccaccctcagagcctcatctccctgcaggtagatagtcaaggcaacctcttcactcttctgccaagcctcctctcctcagctcttcccttcctctctctttttgaaaatatttttaattgtggcaaaatatacacaacataaaatttaccatcttaatcatgtataaaagtggagttcagtggcattaaatacattcacgttgttctatagccataaacaccattcatctccagagctcctttcatcttgcaaagctgaaactctgtccccattaagcaatggctctgttttcctccgttcccccagcccctggccaccatcctcagttttctgtctctgtgagtttgattactctaagcacctcttataagtggatcatacaatgtatctgtctttttgtgactggcttgtttcactttccataatgtcttcaaggttcatccacgttgcagcatatggcagaacatctgtccatttccaggctgaatggtactcttttgtacgtgtggaccacatttcatttatccattcatccacgggagggcacttgggttgcttctgctttttagctattgtgaataacgctgctatgaacatagctgtatgcctttgtcttttaaagcccaaatctgatcaagtcactccccagcttaaaaccttccactgctccccagcagtgggataaaggccagtctcccctgtaggtctctcccgccagccctgctcagtcttcttgcttgtcatccttggctaggccttgcattgccatagccctctgcctctgttcacgctctctcatcttggagcatgagccttccatcatctctaccagatgaactctcatttcttctttcaaaaaataaaaaacccaaaaaacccagagatcccaactgtcctggtgtctgcatagtctgcagcacacgccccctccatggcccttcctccataagcagaatcactcctcactgttcctgcagcacctcctgtgtgcccacacagctgtcctgcggtgggctgtgtgtgtgagtgtgccccctctaggacctgagctccttctggagggtgggcacagcatccattcattctgggaatcctggtcggcaccatgctagaacttctgcaagtgagtgcctttggtgctggcccatgggagagctgttggtaaggcatacttttgcagattccagttgctgctgaggttgttgctctttgcacaagtttcttctagtcaccagtgaagtgacatgtgtggcaggcatggcccagggaggctttttcataaagaagaggttgaatctttggggctgtggtttgaatatgtccctcaagcttatgtgttggaaacttaatcccaaatgcaatagtgttaggaggtggggcctaatcacaggtgattaggtcataaggctctgccctcatggatggcttaacatgtttagtgaggcagtgggttagctattgtgagagtgggcttgttagaaaattgagtgcagccccctcttgcttgctggctaccatgctctcttgcttttctgccttctgccgtggggtgacacagcaagaagaccctccccagatgctggcaccatgccctgggactttccagccttcagaaccacgagccagacaaatttcttttctttataaattacccagtctgtggtattctgttatagaaacacaaaatggactaagacaatcttctttcatcaagttagggtaccaacctttaaagactgccagtccaaggttaaaggaaacttttcaagagcagtccaaacatgatctggccctcagctactctccagggtcatgccaccctatcacccactggctcacacagacgctgaccactgcttagtttctcaaactgaagttttcctcctcagagcttttgcaaaaccttttctttgcctggaaaactccccccacaaatctttagttgtaggttccttctcatcttgcagaattattagtttgctcttcaaatagtctctccagctagactatcaactccaggagggcagagttcttcttcgcttccttcacccatgtgcccactgagtccagaactgtatagcagtttgattgaaaaaatccacagggtggaggatgagaggaccctggatcccagcctcacagcctcttacttcacctgtgtgattttggtcaagtcctttattcttcctgggctttagttttcccttatctaaaatatgagaaaagttcccctctcctgggtattctgggagactcatgtaaaaggcactgagccagtgcagcacatctatgaccaggaagggtcagcttcctgccttgcatgagacacacattcccttcttcatgcacagttattcatgagttaaatatgtattgagaagtgggttctcaggagatgatgcatccacagcattgtttgtatgcctctgtctttgatgtccctgcctgagtcgcccactttagagcccttctgttcttcagaaaccagacttttctttcaatagtttcagtaatcaatcgatcaatcaatcaaccaatcaacagtgataataatcatgagtgagcccctgcccgtgctggctgtgtcctgctgaaggcacactaagtgctgcccttcccagaagcctcaggaagcttgcgaagctcaggtgcatggatgcctggtggaatgaggaagggatgcagccaggtagagaaatgccctgccatcacttgcatcagcatctgtgaagagctggccaggcttttgctcacagtggttgacacagtcaaggagcaagggccccgtaggagaggggagtcaagggctccgggtgggaatggagctgggggctgatgctggcttctggagcactgtaatgtgactgagaaaggtgaaggagccgttctgaaaaagaagaaggcaggagctcgcacagctcttgactcatcttgacttctttttcctgcttcatccaagcaggtcgactctctcgtgatctcagagacagagtgaagtcatgagtgggaggggagcacagaaaataagaccttgattcccagcattgggagactccctgctcccctgagtctcggaaaatagcacccttcaaatgttttagggatccagatttgatgaagagatgttattttggcttttagattcttaggagagatttgtctttctcaggtcaggaagaaaatgctgcccgctgcacattcttcgggacagactcttttaattattactagtttaatgtatgttttgcttagttaaggaaaacccctgtggtttcttgacgtgcttcagtattctaactcacagctgattcagttcagggggctggggagatgtcctcgacctctggaaaggagggtgcatctctagaaataaggctaagtatgccactgacactgtctgcataaacgtgtgtgatctcaggtccaaaggatggggcctggtctaagccagggacgtgggaaatcattttcctgtggcaacttgtgaagaccattctgtgaccttggtgtctctgggccttctcttagattttctaagttggctagtcagtggagctgccatccctcctttgcccatgttctactcccagagttcctccaagaaattgcggagcaatgcctgtttcatgagagctgagtttgctgtgtcttccacttagaaacaacactgtggaccaggaggacacacagctcccagggccatcaccacacaaagtgaaggctggtgaatccgaggcttctagcccttgccgggccaggcccgcagcactccgctccccaacccagccgctgctttgtcgcaggaacctcagcagggcagggtgtttcctaggaggacatccgattcccagccattcctttcagtgaatcacctgagctcacattcttttttcttttatttttgaagctcttagccaatctgcttcgcgatgaaccagttttgcttgaagcagacaaacccgattgtcaggagacagtgatgatttcttcagtctctgaggaagagttttcattttccccaattcgcaaaaaaagtcaggtccctccctccctccctctccgtagaatattttccatgtgtgttaacaatggctgagcgtggtagatgccaggaatttctgtcaaccctcaaagaggaaagccctgcctaatggtctgcccgttcttgttcactccctgccccaggctccccacccgccttctttctggaaggtataaaggctcctgcttatacctggcactgcacgcttcgctccctctgatctcctgactgtcatgcccagtgtctcagcctatcattctacctctaactcgaccttgagtgaccttgagcaagtttctcaggattccacctccaagtcactctccctttgggatatgcagcactaagttaagcttgcctggaaaacatcacttgaagctggaaaaccacttttaacacagcgggaaaagctatttgttcagacaggagtggggtgggtctgggcagagcactgctctaacttggccatgccgtggcagcagctcctttaatgccactttttcctggcgcgcccgcggggcctggagctcagaaagaggggaacgctccctcgtctctcaacagttgctccagacaggtcagcaaacatggaattcagaatgttcattaaacactggctgtgtcttttgtgttcaaaagcaagacactctctctgaaccatggccccacagagagtgcagaatgtgtgaaacctgccgggaaggtctggaccccttgcggggcagtgggcagcaccgtgcctccgttcacaccactcacatggctgtgcctctgcttccttctggcatggctgcttcttcctcaggtctcaaccatctccctcagatgctctttcccatgtttgtggctacaggtccccgtgacctgcagaggcagagcactcaccagcagcccagcctcgttgcgcacccatgtttgcatttgcaggccctagaaccactccaagctccgtgtggcgagatgcaccctcctgcccttcactggggagctgccctcctgttcacagcggcacctgagtcacacatctggagccatcctggactgcctcatttccccgatggggggtttccctgacttcatccatcctgtcttttgggtccccataataactgacatgggtcggcccgtaccagcccctgtgagaagggctttaactgccttcccaccccctgctcatcttagagtctctctatagtgctgctgaaagaatctctaaatcagtggttctcaacctcagccgcacattgagaatcacctgggacccttaaaaaaatcttaactcttggtccaagaattctattacaatcggtctgggatggggccctacaggtatttttttaaagctctccagttggtaatgcatagctagagttgagtatcgctgttctaacgtgcagatctggtcatgttaccagccttttaggtggtcttctttggctttctctatctaaagttcaaaaccgaacatgtgcgcattcagtgcacccattttcaactgtgcattaacacattcagcccaccagcaagatttatgaaccattttctgctgttgtatataacatatcatatgcataatggcataggttattgttttcttcaaaatatatgagatgtgagtccttctacgaactgactcacactgattgcccaacttcctctctcgaggtctcatcctctttccctgcagccgtctccctcttgcacgcacacacacacacacacaccacacacacacacacaccacacacaccagggtcgatgccatctaccctggacttcatcttgaactccttcgagtgtgagtcattactcctttgtgcacctctgctttctcttctcaagatgttcacctgcttgaggtcagttccttgagcgtcttccacttgccatgttcaccacagtgctcaacatgcctgaatgcatggatggcgacttctcagatcctcagtctcctcatctgggtaataaggcattgggttggcgggtccatctggtttcttccagctctgagagtgcatttgctctgtgattcattcgttccacaacacttcaccaattaaagagagggtacaaaaggtgaacatccttggctcccagcagatgctcctcaaaacctgaaaaatcagataggtgagggaagattgaatgaaaggcctcttatgattctgcagcaattttggtggtttaagaactctatggaaaaatcatcagtatttctggaattgaagtaaaatggatagtgagcctctgtgtatgtgaaggcccgcatctggaacatgaaagaacctgtctgatgtgttctagtcaggaaagcaggtagccaatactatttatagaatttacagaaactgaagattttgtttctactgattttcaaaatagtattatgtctgatttttttcctcagaaatatacttcctgctcttctcaacaaactcatttgaaaatatgattagaacatgatagaattttactcatttgccaactgcggttcccatttcacatattgttagaattctgcatggtggctttgccctttaaccactaactgataaatgatgtagttagcttttaaatgtgtggaaaaatataatttcaggttcaaccataggtcagaagtacacgtgttttgttagtctatttgtctctcagtcatctcatggaaaattctcagcttttggtatggaaataattttcttgaaggcaatatttgttgagtgactgacggaatgaaaaacgccagttgcgtaagtgtgaaaaagatctgggtgttttcattggatccaaattccacatgagccaacaacagcgtggtgtggaggctggagcacattaataagaacagtgtcctaaattcaggaggtaatgctctgcccatgccctgtgcagctcagacggtgtgtgcagtgcagtatgtaacccagggcacatttcaggggcccacagggagctgcagcttgtaaggtggagtgcagccaacagagcagagagtcagaatccccgcagagtggttgaaggcacaaggatgcgcagcaaggaagacagacttataggtggtgcgactgccatcctctggtactgaaggtgctatcatggagggagggaagtagattgaccctcctggctccagagtacggaactcagacaaacggtcagaagcttacagggaggccaattttggatcaactttaagaagaattttttaaaagctagagcaatcctaaaatggaatttgctctttataaagttgcgaatgcctcaccctggaattgcttaagcaaagttgggacgggcagttgtgagtaatctcctttccaatccatacccgcaatcaccagaaacgtggacttccctgacactgagcacctcttaattaagcatctcataagtgaacaaaacccagcccttcaaagaagtcactttatttatgtgtgggtctgcagcttggatttcttgataatgttaaataaaactccatctactcttccacaaacacttcaagaaacctaagacttttggccagagtaacaccgaggtttgagagaaaggatatgtgtgtgagaggtgtggtttcattagaacatattatttgacttcatgttgaatcaacacttttgtgcaaaatgcagttttaccagcctctttccttgttttggtcacataatttaacttaacattctcggtacttgattttctaacataaaatgggattgagaggggaattttgaagttcccatggtctgtcctctacattctgacagctcattatctctgcggtattgttctcacatttaagtgaggttagcggaggcagaggcctctcaggcctgaagatagcctctgttttcagggaaatactagactgtgagatctgtgacactgaagcactaagttcatctcacaaaagcaacgtgctctttttaaatggttgatcaaagttactttcaaaaggaagtgttagtttttgttattagccgaaacaagagctgctttaatgtagtatatttaaaatcatatctcaattaagatgttattcaaatactatttgacccaccaatctcattactggatatatacccaaaggaatagaaatcattctattataaaaacacatggctgggcacagtggctcacgcctgtaatcccagcattttgggaggccgaggcgggtggatcacgaggtcaggagttcaagaccagcctggccaagatggtgaaacctcatctctactaaaaatacaaaaattagccaggcgcggtggcaggcacctgtaatcccagctactcggaaggctgaggcaggaaaattgcttgaacgcgggaggcggagtttgcagtgaacagagatgaagccactgcactttagcctaggtgacagagcgagactctgtctcaaaaaaaaaaaaagaaccacttgcatatacactattcacaatagcaaagacgtggaatcaacctaaatgcccatcggtgatagactgcataaagaaaatgtggtacatatataccacgaaatactatgcagccataaaaaagaacaagatcatgtcctttgcggggacatggatggaactgcaggtcattatccttagcaaacgaataagaaaagaaaacaaaataccgcatgttatcacttataagtgggaggtaaatgatgagaacacaaggatacactggggcctacttgagggtagagggttgaagggagagaagcagaaaaaataactattggggtactaggcttagtaccagggtgacaaaataatctgtacaacaaactactatgacacaagtttacctgtttaacatacctgcacatgtacccctgaacttaaaaaaatttttaaaaagatgctatgcaataaaattctcaattaagaatttaacttggtaaatgttcatttaatgatctaaaaatatgtgtctggatggctctagcaaaaaaataaataataagtttctcagagatggtaaggctgaaataaatggggaaaaatctgaattgtaatcctttttctgttggacctggtgttggggtttcacacttgtgggtgaatgtgggcctcctgtgagcaccagcacaaaagactaaactgaacaaaagattaaatgtcacctctaaaattctgtgcaacaagacttccagccacagaatgtgcaactcagatttccaagtaaaaacacaccaggaagcagatcttagatctctgttatctccttggcaccagctggtattcatcctcaatgctagctagagttgaaataaagagtgaaagaactttctcttttattacttaataaacttccttttttgagctgttttaggcttacagaaaaattgagtggcagtttcagggagttccagcacggcccctgtttctttctcatggtccctgcaggtttcccctattattaacgtctgtcattagcatggcacatttgttacaattaatgagccaatattgatacattattcactaaagcccacaggttgcgttaggggtcattcttggtggtgtacgttcttcaggtctggacaaatctataatgacatgcattcaccattactatatcacgcagagtcgtctcctggccctacaagtcccctccttccccacctgctcactcctccttcccaccctccccaaactgtggcaaccatttaacttttgactgaatggatttattcttattctgccttattgtatgtacaccatattttaataagataaaataatagtctatagtagacttctgtaaatactcaatgaataaatacttgcatgaatgcaggaaaaatcaatcagtcttgcaggatttcttatgcgttacatcgtccttataagaaagcagtcattctcaccgagatgtgctgagcagatactggacatgttctgacccagataagggctgggtggaagtagggctggagacacagagacccagtgccaacttccaggacctcggaagaactgaaggcagagaggtcctctcagtgtggactgggcctctgctggcagccaccagcgggcacagagctgatgtgtgttatgccacgtggggaaaacctacagacgattctgagaaaggctcacagggacaccctctgcccctaaaagaacaatttaactctaatttatttctgtcactctgcattttctgacctttcccaagtgtacagttttatatgcatttaactgccaaattgtcatgtgagattatatggttatatttcattaatatattctagtttgttcagctgttcttactgggtgaatttgtgtggtttcctgacatttttgtttttagtagtgcctcagtagttttatacataattacgtttcccttctggattatttccttagtatctagttcaagaagtgaaatcgctggattcttgtggtaaatttttgaatttcacagtataatgctgattttctcaaagtctcacattctaagaaagtataatgaggcaaaacaaacaacaaacatcttaagttgattttttcctagcatcttttccttccatctttgcttgtagaatctagactatttcatgaacccaagatataatcagtatccttcttcagtatggccaaagtgagtttctcattattttacctccccttcaggaaatgacttttcatcttgtgttttgggagccatagatggttctgggcaggaaactggctttggatagacccagcatgtagatggctatttggccttgctcccagtataacgatgcagttccctgtgaaagggtatgagtaggttttggggctctggataccgtgtggcctgaagagacaagggctcaatgccaactctgcctgtttccaactgtgtaaccatgtgagcgtcaaaaatcatggacgtgctctggttaacactgagtgggagctcaacaaattattatttttaattgttacttggacatggccaagttgactacactttatgttctgctacctgccagtctgaaagtgacgccacagaaggtgaaccgcatgttgggagatgctcctcatctgcttaaatgaggtgcaaacacagcccatgcgcctgctcttcatgactgtatctgtaccagcaatatttgtattggcaaatcacatgccccagtgggaactacttaaggggaattcaatggatttcattccttttatgtaattggccacttagtaatagacgtgtaggtctcttgtgtggataaggattctgccttttatgtaagatatgtgttgcaattcagctttcaggtcccagccccgggaaggctccaggccttcacaaactggcccacccacgagaaggaaagcaattgtccaaatgtgggtagcttttcttcccactgttgtcagctgcttccaattagcccccatatacataatcccagtttgtgtctgtatcagtacaattctcccatgtcaatgtgaattttaagccacagagggaaaggggacagagaatatgctttcattcagctctcctcgtctcacacctcttgccctgcatgcatttctttgctctgattaaacgagcattttataagccacatttgctgtgtgaaaggcaaagtcttccctcccacggatgacggtctccagggatgtgtgtgtgtgtgtgtgtgtgtgtgtgtgtgtgtgtgagagagagagagagagagagagactgtaaacatatatctctgtgaaacttcattttccatatgtgaatttttggaaccgagacaaatggaacttagctaaaagatgggaaaggtagactgactctgacttaatctacttaacctaccaggcaatttataacttgatggcctaatttttgcagcacccagaagcaagcctgtttcagcacggcaaaggctcagctgctaagtgggcagcattgttggaggtgagcagcttaggctgactgttcatcaaaggaccaagcgcttgaggttcgctcatcgctggaggccagagtggggagggccatttaactgctcaaggccatggaactctactgtcagtttcagggaaatttgggaccctggagcacaaaccaaaactccaattaaccaggagaggaactcgatccccaggagataagtgaagagtaagaagtctatctttagaaacaagagatgtccaaggctagaaagatggggaaggagggtggaactgttctggaagtgggtctcaatctcagcaccagcagctctcaagactttctagagaaggaaacttcatttctgaattaaaattagtcttcaatgacatggcagggatttcggcacactctcttgcgtcataggccactgtgttggaggcaggagtgttggctttggaggcatagagattaaaattagagtaacacgtgagcactgaaaaggttaaacagtagagacatggaggactcccgacccccatgtacccctttcttaaccctttaattaagatcacagccctagaaatagcttgcaaaataattaactactgatcatttataccttagtgcttctgtgagcatgttttctctttcattgctgctcatctgcatggaaaaatgtgcatgggtttctgaatataactccatggtgcttgcttccattatatttgtgccatttggatcataactgataagcaaccaaagagtcccatattactgcacgttcccatcgctattttatgtgaaggtggtcctgggggctgttctgaattctcagtttccttttttcccctccccagttctttgaaaatatcagaaacggacttgtggcatctttgaaaagctacttaaaatgtgctgctgtgctctgaacttgaaaatgtgcttttaatacaaagtttgtgcagcccttgctgctcatacgagatgaatcttaccatgtggtggatgcccgtctcatgccaggcactgtgctctaagcccattggtttatttcagtgcttgaaattggctttcgagagaggcaccacggttccctttttacaggagaggaaacaccagaggatcagagatggagagtctttctccacaaactcacagaccccaaaggcaagctcagggttgtcagcttccaaagtctgcctgctccaggacctcatgttgcatctccattctcttcactgagggtcaaatggaaagaacacatgggggtcaagtttcagaaaataagagaaatgaagaaatatgtgcccggaagcaagaacgaccgacctcattaaactggctcccttcacctcctctcacatctttttctgccttttggccaagttttctctcccccgcatttcctccttgatctcgtttgaatcctcttccctggtgaagtcatttaggttcaggctcttattttactttggtccataatttagatcgaaccacatgtgctgatgtgattgaaacgatgtggaattctctggacagagatagaattatggaggggttagtgtgtgtgtttaagattaaaagaccaggtgtatgggaggaaatataatgaacaaaaaatagtattttaaatgaatactaaacttgcactcatggaaaaagttctcttcccatgaggttctcgcaaagcattttaccatcagcacacgcagtttttctcagttttctgagatggggccatcttgaatccaacagacaacacacagcatcagccagactaacacaaaggacgtcatgggcatggacgtaaatactggtgtcaacactaggtctgcacctcgagaggagtggagcaaaaggatggagtggcagatgaaggtatgctgttcagaaaggaggcagaaatgaaaggaagaccatcagtgcgctccacagcttgaggaccgtcctggagggcaaatgccagctgctcacttctgaaaagaaaaattccagtgaaatgagtacagtcattcttaggattactcacttgatactgtgtatgtctcttcttggcttctcatctccacacaaaaccctcaggtggtaaaaatctaattaaaaaaattatataaagtcttgtagatttattagcctgaacataatagattttttttaagcacgttaagtcttccatggactaaaagaaaacttgtaaacctaagagaacctctatttttgatatacaaaataatacatttccttaaactatgatcttgatactagaattttaattaaaaaatacctgcagtttatatgcaaagttatagattaatgcttaaaaataggttgtatgtagtatccacaggtcatgtttgactgtcaaatagatgtaattttaattcataataattgtgtcgtgttcttccccactagaagccaattatgcaagcttcaccattcacacatggaaaataatttaatggagtactcattgcaatttcacttatccagaattggctgttgttctcagagcagcttgtgttgccttgttaaggagaatatgttagtatccagacatccagaaaggatcctttactgtttcagagtccattttccccacttttgaaatacacacacaaacacccattcatgcaaaccaaacagagattgtaaagtgattccactgacatttatgcacttcttttttctctttggttcttcaaactctcagtcagtgcgcatttactcttaatttagatacggtttaaacctaattagaaaccagaagctcttgtatttccacaaaggattatgacagccccaagaaaagatagtgaaaccattatataacaagataaaggcttcttaacaatacaaggatggattttctcattgatcttagccttctgaattttagaaattgccatttcaaagtctaaaacaaaggaaaatcagggaataaaagaatggtaagtagacacaaacctactggctccatcatttctgttttagcaaataacctgccacatataccaatagcccaagagatgggcatgtccctgcatttcctggtcaaggtgacaacactgcgtcctcctggaagaggtctgccactcaccataccacaaaccaaatataataaaatcagaaggcacactatagtgaattttttagaggcatgtattgaaaagcatctcaaaaagcattctcgaagcttccagaagtcaactcaagttatctgaaaagtgacacttttgatgattgctcgcttaatactgggagagccagatgaagattcctccccacttcctcagatgtgcaactctggaatttcttagtgttactggagattcctgctgcattctgggcctttaatgcataaacactgagatgttctaaggaaattactccctagggaggagaggggtggacgaggagtaagctttgctggtgactcatgcgctgtgtggaaactccctgcacaagtgagctgcgcagggtgagtctaaagggttaatgcactttcaaaagcctctaatttgttattccagaagagtaatttactcactagaagtatctgggtggctactaacacatttgtgtctttaaaaagatcagttttattttaagattaaaaatataaagcaagagctggaaagtcactaaaaactgacagccagtttcccattttcaagagtatttattaaaaggttctggttgcagaaggaataagaaatggcttgagatcatgacacagtgaatcatgttgtaaacatgttagctatggctgtgaattcaaccagcgatgagttcaagcgtccccagaaggtgttgggggaattagggacatggctgtgtttccccagagaaaagtggccattttactttccctcttcactaacatgcttttgacatgcatggcagagctgaaggcaaggggaaggggacaacatagtaagtgactaagtggcttttttttttttttttttgccaagtgaagctgagtcatatggcctctgtcattccaaaactattctctacggctgcattcctttcgctcttgccttcctttagaaccctggagaaggcctcctgaagcctggccctattatgtatcctgacaaagataaacttttccaaaaagctgcatgttgtttctagcacagtttttcctcgcagtgactacgtgatgaaagtaccatgcagaggaggtgtctgactgaggcgttcgtggtgtgtgacagagtcccctgcacaggacagccgcactcccctcttgcgtcctttcctcccatgtttgcaaagcctctttccctgtcagcagggggtgttctggcagttgacatttctgaaaactacagcctacatttttaaaaaatccagtaagtgaaaactaaaaaattaataccgtggtcataatagtgtggcatttgataactaatgaggcactgtcgtgccagctattattttcagacatttacagtccttttttaaatacaaagaaatatttggtgtgaaatgttccccgggagctggtgcaagcagaggcgacagggcaagggagcttgggttgtagcctcgaattcctccggccagggctaccgtcagcctgcggcacacaagtaaatcaaatataaaaccaaaatttctgtaagcaaatcagtttctaactcactgtaacgaattatctttcgcacatcacagaggcatctcttttcactgtcgagtttggtttgcttggttacaaaaagggcagttcaaaagctttggttgctattgtgaaagtcagctgaattccttccaccgtgctggggtggggtggggttcacgcaggttctcttttgtcaccaggggtgctgtggattcacaagtaagcaagaggctcctcaggtcaagcctctggctgctccctgaggtcagctgcctagcttctcctcctctgagatagacgggaacaaagtctttgatgtgtgcatttctcaagcttgacaatgatacagctacataaaaacccatgatttcatatagatattccaaaacgtaaaagtaaaccatgcatccacagagacatggaattacagaactggatgctgagctggtcacttgggaggcaggcgtccttgccattggtttatgcctcagccccaccatgcagtggctggccaggtgacctaggccagtcctgcatcctcggctcctcacctgcctggtgggacagtgacatctctcctgcagcactgctgtcagggtgagggaggtagggcgcagtttcagaaaaccattgggctgcacctgcgtgagcacagctgcaggagcaaaagtcagaaaggtcagcaaaggatttcaggagcaaaggtcagaagaaaccctcaaggtggttgtgtctgcaggaaagtgctgtcgtctcctgcaatgctttcaagactattcagaagcacagtgtgaagggagagccggagcccatggggaaatgactccagagtgttccacgtgttggaaggcatctgttggaaaacggacattcaagcaaatagttgcctgcatagacaacgcagaatgactgggaaagccccaacaagttacctactggtaaatgaggtgagaagcttaaagtgagaaccccattgctgcctctttttcactttaaaaacatttaagttttgaattatggtaaaatacacgtaagatttactactgtaaccatttttaagtgtacggttcagtagtgttaagtatattcacattgctaaggaaccaatctgctacttttgtttattaattttttcctgaggggaaatatttttaaattttaaaatatttaattgacaaataaaaattgtgtatattcaaggtgtagaacatgatttcatatgcacgtacattgtatactcattaccacaatcaaagaaattaacacatccaacccacccatagttgccattgtgtgtgcgcggatgtgcgtgtatgtgtgtgtatgtgtgcacgtgtgcgcctgtgtgtgtctgtgtgtctctgtgtatacgtgtgtgtacatgtgtgtacgtgtgtgttcctgtgtatgtgtgtctgcgcacgtgtgtatgcatgtatatgggtatgtgtgtacgtgtgtacgtgtgtgtgcatgtgtgtatatgtgtgtctgtgggcacaggtgtgcctgtgtgtatgtgtatatgtgtatgtgtgtacatgtatgtacgcgtgtgcatacgtgtgtgtgtgtgcacaggtgtgtatgtgtgtgcctgtgtgtgtgtgtgcatgtgtggtggggacactaaaaatctctcatcacctttttagtcaaaagaacagttgttttggtttggctcttctgttttaaaatatcagaacaataataatttcccacagacaaaatcctcaatcctcaccatccttctatttcctatattcatcataaacttcatgcttgatgttgaaattgttttctgaaaatagagaatacaaagaggagattttaaaatgtcagtggcagccccacactcctttttaatcttatttcctgatatcttgagtttacttggacgtagagttttccttgactatggttatttctggtagtagcagctccagattaggcaatggttttcttcagagatagcttagagtgagccccagaacaaggtcaatgcgaagattgcttgtgtctgcgtgtccagggcacagtgatcctcatcactagccggggggctccgtgaggatctgctcctggtcgtttctgttctgtatcttctctgcagcccttactgaagccgttaccaactggcacaattcaattcctactgtacccatcatgcacagatggctgaagtattgagaacgctccagtgaccgggaggcaatagtctgtccacatctaagaacacacttggaataaccttagagaagagagagagagagagaatgcatggttagtaggttatcaaactcctatgacttttcacaggaaaagccctcatccacaccaactttaggaatgtgtagaaagaagggtcagggacaggggtgagtggtgggcagagcagttggagggcacagggaaaaggcatctggtcatgtatttggagtaggaggtcttgctttactattgaattgcagggacactttgggaacagtgttcacttctttttgcaaccatttcttcagagaaaagtcatgatactcaagtcttcttacaaagcagtttgaggctttgagtaccagactgattacagagatgagtatgaagcattattgtagtatttttaagtgaaattcactaaatgcaaataaacctagcaaatgctctatggttaatttttttctaaaattcagataattaagacaattcattctcctgaaactgctgttcatgtaaaaaggaattttatcgaggtggcccttgagtgccaaacagcctgtcctcagctgcaaaatgagtcgttgatgatcctccagcaagggatactttttagctcgtgtggtgattgctgcacacgggatatgtgcagcaagtatctgctgagctaataataaacagcctcagacagaaagacagtgggcacaaggtcatgcttaaaaagaccccttgttctactgcatcccagctccccaccatggggcctcacaggccctggtgaccaagcacatcagacctggttcttgctcagtcctgggagccacagaacccagcacgtactttacccccaagaccagactccagcttggcttttgtcctcctctccaggattggtgacctcctaggtcgtgaagctgtgatgagcaaagacacactcctctccattctcccaacttcaggtccctttgacagtgtcagcaggcatttaaatagcagaccacccacagcagggctggtagatgcagtgaactcaggaagatgcctgcatagactctagtgttaaagacagaatccttacaaggaacccccatagttacctaactgctgtctccagtggtcatagaagtgtgataacccactaatcatcattctctgtctctctgtctttctcatacacacttacacacacatacacacaaccttgttgcttaattttcagagagtctactttcagaaaagccttcaggaatacatcatgtacaaaactgagaaattacctgaagtatctttaaatttagtaaaaagttgcattgttttttgaacatcacacttgaaaagtacatgaatacaaacatacttaggaaaaaaagctttaattaatttaaaaaggagaacaatgctatatgctgtatcccacctttctctgaatgttacattttctcccctatcccaggctgcatctaagaaaactcagagggaatatgctatctatcttttccgagcaatgaaagctctgggttttttccttgcttttcagggcacaatacttctctttcttcctggttagacaggataagttctgagtcccctggtatcatcagcttacttcttctctgttaaatattcacaaaaaatcactaactttcatgcctcagcaaacctccactgcctaaaatatagtgaggtcattcatcttcggacaaattgccccaactacggtgggaaaagaaccaatgtgttggactatttatctaatttttgtttagttcggggatacaaataaatgcatagatacatacaaacatgcgtacataatagcagcagcagcctgtgaaacattgacaagacctggagttggaagaggactttgccatcctccagtccaacagttgcctgtcacagattagacgactgggatgtgcgcaggcgattatttgcaaacggccctgagtcccccagtttatgtcttaattcgcagccagggctgattgtagaagcaaatttgcaaacatgtgcaagaagaaatcacacatcctagagcttggatttcctcgtttcttgctatttctatccgtagacagaaccattgctgagctgttaaatttgtctccttcccctataccagtcttgaaaaaggaaaggaagtggagcaaagaaaaagaaattaataaagccggcagatcctaggagaatcttatttaatccaagctttgtaaagttttgctttattccatggcaacatgggtatacacatcccaccggctgtttcagtggctcagagcaggtaaggcctgtgccaaacgccgctagcaggaggaacaacgtggagacagccccagaggtggaacgttggcccttctgtggctccggtgtctcaggacctccctaaagcccagccctgacactgagcaagtttccaccactgttaggaagaagtagaaaggaatttggagggttggtgttactgttcaagagctggaaggcttctgcccccattcccattccattaattgcgtgaggtagagaactcatagaagataggaacacatatgctgatttccaaaattgcctttgtatattttcacgtgaagactttaggggcaaaagaaaagaagcaagcattttgaatatgtgtttcaatttgccttctgttatataaaattgtattttgcctattcttttttcattattcggaaccttcaagaaataaattaagttctctcaaaaatgtgttttttgaaaagaggactaaaacagatggcctggctgtgttaaacacagggaccagaccagcacccacctctccacctgccctgccttcactggcagaattgtgatccatcatgttctctgttcaatgtcatcatccctttcagagcatgggtctcttcctttctaggcagtcttaccaggatgcatgggtgtgcctgcgtaggcacacgcacagctcccaaggactctaaaaaaagatatttttctgcttatatactaataatatgttagagatttatgtttcaaattagtacagaatcacatggttctctccaaattatatttgagagagaaagaatagaacaaaatttattttacaaaaatactcagtacatttagggcatatacaaagatgttccagaatgtagcttatctctttaaagacaattaacacagtttctgggcaaggcaaggcaaaatattcagtaacttagcaacaccaacagaagacagccaatattgcagcacatttttctcttggattgggtcagagagtactgcagagaaaatggagtagagagacctgaaatactttcgcacacactgtggtcagtgcagcgtccactgtgtgccacagtaatactagaaactccctggttaggccttggaatccagctctcatttcgtatgtgacctgcagggaagtaagttaaatgcacacgttttatcaagttcaaatgcaaacttaattttaaatgtatgcaacatcagtttaagcgttgtagctattactagcaattgtacctattactagtctgtactctgcacaactttggagtatactgcctactcaaggtggattttagagctctatttgtggcattatatcacggacaaaagcacgttcatcagagtcagaggaatgtggtgcaaatcccagctgtcccacttaccagctgtgggacttgagtaagctcctgaagcagctgcacctgcattttctggtgggcaccatggagctgtcagcagtgctttcctcagagggctgcgggctggatgaggtttgctggtgcatgtgaagtgtcaatcattgctctcatgagtggtgatgctgatgccgttcccttttttagggaagtgattttcccttacaaagttaccaacagtttcatgttggcccatttttctattaattgtttccactaataggaccaacagtggtagtcccatcattttattactgcttgtcgtagcacaagcagttgcttcattgtgtttagataaatattgacggctgcttttaacagtctgctgttttgtctccttttgaggtccttaaagtaatccttaaaaagatagtgcagatggaaagatgtctggagtcagtgaacctgccttctttcctgtgtgcttgtcagtttctaaaatgccatacacaaaggactttcatgatttctttttaggtacatgattacagttcaattcacttcactgtctggaaaatttccttataatcaggatgaaatttctcatgttagcctttcacatttcactacttttagataaggaattctcaggctttgctatatctgactgctcttggaggctgagcttttggctaactacctgactactttgtcgtttctcttcccttggaatgaagcaaatatctaacttctcactcattgtttctgctattttaccatttagtcatctgtgatttttctaaatactgaaagacttccctcaattcaaactatgtgccggatcaaggaaagggcagttggatattgcagacagcatagtgcaattgtgaagagtgtctgcttaccagccacgctgccttgcacaagttatcaagcctctcaacccacttcctcaatctgtaaaataggtatgagtgtaggaccttcccaggggatttttttgtgactatagaatgattctcagaagactttcaggcagtatgtgggtgaggcacatgctggaaaggcttctgcaggtgcagtgatcaatgcttttctcagtgtgtacatcccataatacagacacgttaccagaaactccctagccaggactttgattgcagctcacattttgtatatggcccatagggaaatgaagtgtgtattttttataaagttcaagtgttaacttaatttggaatttactatcaaatctcagttgttatgggcatttatagctattaatacttcgtcccatgtgtcccatgaggaaaccaaggaacagaaattaaagttctttctggagtcccctgaatctcgttcctgttcttttgcaccctgttaattacatagagacattcacagctcttctgaccttatcagcgttaaggaaaacagaaaaccagcgtgctatttgttctgtcccttagtcaagccttctcaacatatatttttcttccaagattttgcatgtgcacagggatgcctatcctctacaagaaacacattttaggcaaattataattaaaatgctgtttacatctcttcacctttagaatttaaagaatgatcatttcttagattgcatctcagacacacccttcccctagtctggagagggcgaggcccatgggtactgcaaacagcctgacgttgtcaggggcggtctcaacggctcattcaccacatctgcctcgcgaaggctaagccatgtgctgttacccctgctgcgctctggctcattctaaggtacacgctattaaccttgtgagaaaacaaagaggccagccccacccttcctgctcactctgagtcacggtgaaaatgtttcaggatctcgggttcgaccatgagtcctgtccaggtccaggaggaaattcggaaggaccacatgttcactctgagatcccactttcatttccctcctggttgagcagcattaatactctggctagatttaaattctggctttctccagttagaactgaaagttatgacaatgtaatcaaaatagaatgtgggtttacagctggccccctggcctggtttgtgaacataaaacagaaacagaaagtgtaagtggtgacatcatattctctcattcaatgtgaaaggccaccgaagtctttccagaattatttttgagaataatatgaatttttaaaaaatacctaattattttaaatatcgtcttgcttgctccccaaatacctactgttttcaacttggatatacgacatgattaaagaatatctaatatttgggaatgcatactttaaccttataaactaccactgtaaatagacagactcattaaagtgaaaggacattttaaatcaattagtaagcaaatcaattaggtggcaaagacaagattatttttccttatggtagttgaagaataatgcttaacctgtcattctaattaccaagcacggtgttctctttggaagatcatttcaacaaaacattattttcatccagaatttgaaccttgagattgcatggtattttagaaatctattttagaaatctttggcaaaggttactattaaaacaatcacattcatggaaaatcagtataagagcaactaaaataactcacaataccagtaaaatcactttgtcatcttcttaagacttttaaagagcatttgtaagtaactgaatagaaggccaaagggtgtgtaggtagcccagaccatcagtgggcagccagggccagggcaggggccacggttgcagcctgcattcttctaaagggcagagcaaattaaagttgaagcaggagctaaaaaaaaaaaaaaaaatgtttcaaagaattccaccaaccagaggatactacctaggacagtttgggcctaacttatctgtgaaggcctccagcttcctccacaccggtggccacttttcattcactctgaacccttctttgtatggaggtcattttattaattgagctgtgaccaacatgacagaatttcctgttttagggcttttataatatagatagtttatatctaatttcagaatatattcactggggaatggacttagcaaccactaccacaacaatgcaacaatgtgttttggaacaaatttaccaatctgaatttccccctagattaggtcacaggaacattgcagctgatgtacagctatgttcctcctgaaacttggagacacatcctcttgagctgggttataatgggccacccaaagctcgagttcctgtaatggatacactcaggcagcagaacctaccaccgtagtgaggacagcacccagagccctcagaggccatcacaagtgcaccacagctgccttctctggcacgctcagagctacacagtgtactctgggattggaactctttatttttttttcagttgatttgtaaataagattgcacaaaaatccatgcacatcaactctccaaatcagaatttgctgagctaaaaagagcattaaattagatgggctggctttcaaggggtgggggtgcaatagtggaactctgcacaacagttctttacaaagagacaagcaagcacatcgcgtggaaatttccattcaactggaaatgtccaagcctgtttacctcaattaattgtccttgttcacttgtccagcctagcaattgtccattagtaatttgttataaatgagacatttggtattaaagcatctctttgggatactggtatggtttattataacattctgttagtagtgttgtacaagcttgagatgtattaatacgaaatccaagctgcatgagggctttatttttcaagcctacaccttgctgaaattctgaattaaaatatgattctcagtacaaatgaataaatcaacagaaatggtaacgcatgtcaaatattcttaaaacccaagaaagccttgtaacttccttcaatctaatgggaaatgcaggcaaatacaagactgatgtccttgagttttattatcaagactcaagggcaccagtaaaatctagtttcattggttggaaaaaaaatcctgataagcactgttaggcatattaactttaatgattacaatttttaggacactctgtggcctagacttagaaacacaactaatgtccagaaaaagattcctctttttattccatcatctgataggcctatttttacacatacacaccaaccaaaagtagccaagcaaacaaaacaacatactcacaccccttcgcctattatcatctaggtgattttcaatgctcattgcaatgaaacctacttattgtgcatggcacccacccccactgaggaatactgtagtttctttccctttgaacttcattagtagagcacatggttcattcactcctgaagagttcttcgtatgtcagaatatatatactacaacataatttccatcagagctctgaccacccgcttatctattttcataatgcctgccactccatcattagctgttgtcatgtaggctatcaataaatatatgacaaataaaacagttagggaatgagggaaattgactagcagccaaagacctaagccatcctctgcttggacattagaaaactgagttcactacagtcataagatacacaaaggcagaatgtaagccatacaaaaatccatgtcaatcccaatatgtgagtacaactattgaacaccatgtactaatggatgagttggtaaatcattcaatgtcttcatgaggtcaattacagattattatttagaccccaaagattccaaagatggtatttcggtcagatcttcatcctttgtaagcctagcagaaaatatggcagttttattgactactattctttgctgggtgtggtatttttaaactgagacatcagtgtgcctagcacagggcctcaagcacacagaaaaattccttgataataattaaataaaatttcagcaaaaaatatcatcttaaggctgtgaaattatcttcctgtgtggctaaaatagtgaataaaattcagcgcaatataaatcatagtacaatttcatcactaaattttctgatcttgatcttgtcattttacattggaagtaaaaatgtgtcctcctttttttctctgacagtgaaaagtgtgtgtgtgttgtgtgcccttttgcacaccctgcctcacacttgctggtctaattccttccagcatgattatgatataattaaatgacagaaatgtttacttccaagtggaactaagccagggtaactcagggtagggcagctgcttgcaccgaaagaccaagactgctagagaactaggaaacaggcggtgcaagaactccaggctctcatggaagagcgggaggcttctatggggctgcagaaactctttggtgcttggggaaaaaatgggttaaatgctcttaaaaaagaaacctgggagaggtagtttccagatgcaggcccgtcttttcttttaaacagaggcagctccgaagagctggacattgaaccctgagcaggaactggaggccgtcagcgcagctttgtttggcgagcggagctttgcaagggtgtaatgctgcaccagggagacgctatctgcagggaccggtgacgccgtgggtgtggagggggaggcagtggctggccctcttggggtaaggtacgcccaggaacagtttagaataacgtgcgcgagtcaaagggaagaagaagctcctgcagaccttctgggcactgtgcagggtttgctcctgtccaccgtgccgtgttcctgtcctggggtatttgggtgtgtggcgtgtggggaggggagaaggagcaaggcggcagggaggggatgaggaccaccctgtccatgggacaggccctgggccccgcacacaccccaagccccgcgtcccgcgtcctcactgtcctgggacaccccccaccccaccccaccgccacagcccagagcggtgccaggaagccgcctcgacgcagccgtatcttgaggctccagccccatccccagggtaccacgccacgtagagacactatttttcacttcgtgtttgtcactcctaaagcatgtgtgctagctgcaccaaccctgggatgcctcggtgcatagggtttatgtgcgtcctcctccttccctctgagctggtcccccgtggggaactgctgcccagactgacctgcgtccttccgcacgtgcaggaaaatgtccacgtgcacttgtcagggtgggggccacacgggcaccaccactgatcatctgtgggatcgagttactgcccatgcagatcccacgtgcagggcccagtcgctttggtgagagagtggacgctgtggtgactccacggtctgtggctgtgctcaggaggacagagaggggacatcctgagatggtttgggcagcccgcggatcctgtgcatgtccccagagcgtccactttctccatggagcagtggagtggcgttgctgagacagaaagttcaggttctccactccccatgcagcccccactcccctgtctccggccaggcacgcgtctggggtggagactcccggtgcccggggccctccagacctctttccccaccccagggagcaggcgggtacttctattccgtttggcttcagaagggaaaagagaacgtaagttcagggagttctcgtccattcctctcccgtgggccgggcaggcagcagggacagccttcaggagccaggaggggctcgagctgcgaggccctggaatgaggcaggcatgggctgaggctggagggaaagccccgctaaggctgggcgggggcgggaaaacttaccaccaggggactcgagatggggaaggaaaggtcagaagaggagaggccaggcacggggtgtgggcggcctgcagagctggagcaggtgctccgcccagagccaggcatgcacactcagagtaggtggcctgtgcagcggggaagaggggcgggtcggcgtgctgctgaagatgcaggagctgcggcctgctctgtgcgtgctgaaggtgtggtgagaagcacttacaaaaagaaatggactgtgttaggattgcacattttactttgtttctcccaaatacgtgttctttgaatttttttccttccagggccaggactggagtgatggttgagacaggcacgcactgggtcttgtctgcatttacattttgagattttgttcagcatggattttatggcgtttttttgtttgtttgtttgttcgttttcaaaatactgcacggtttatcgtgaagacagggtcctttgctgccgtcttaagttttgggcccaagaacgtgccccaccctaggcccgggcctgctggcttcatagctctcatcattcccacggaaccttaagacctgaggacagaaaggaaggaaacaagcccagtagtccgtgaaaatccagggtcccgccactccaggtgtctgcagcagagctgaacacacgtaggctcttgccaggaggggcatttgtatgtgctgagcattccttatattctcaatatgacgcctttgaaagatctgtggtttgcaaatatttactctcagtccataacttatctttccaacctcttaccaggctcttttgctgaataaaagttttaaattttgaagtctaatatatttttaatttttttattttatggatcatactttttgtgtcaggtttgagaagtctgcaccaaagtatgtcctgtggttttcccttaggtcatcttcaacaagtttcatagtattttgtttagatgtaaatctgtggcccattttgagttagtttttgcacaagagttgaggtcaaggttctttttttgcctgtgatgttcagtggctctggcaccatttgttgaaaacatgatagccaatgtcaagacttaatagttataataatcaggagcttttgtttctttttgttttgtttttagtaactgccagtcactgcttgtggtatacatacacaatggaatactattcagtcttaaaaaaaaaaaaagaaggaaatcctgtcatttgcatacctggaggacattatgttaagtgaaataagccaggcaccaaaagaaaaacattgcatgatctcactccttcatggaatctaaaaaattgtattcagagaagcagagagtggaatggtggttaccaggggctgggaaggtgtgagcttggggagatttggtgaaaggacatagaatctcagttagacaggaggaataagttaaagagatctattgcacatcatggtaactgtagttagtgacaatgtattgtatacatgaaaattgctaagagagtagattttaagtgttctcaccacaccaaaaaaaggtatgtgcagtaatacagtcattaattagcttgatgtagccattccacaatggatacatatatcaaaacatcatgttgtataccataaatatatactgtctctttatgtaaatttaaaaataagataaaataaatgttattcacttgtcgtggatgtggtggggacaggtgtgggatagccctccctgtacaactaggacccaggggtgatctagtgacactagccatttatcaggacgtatgggtgccagtcaggatgataaagcttccttttggccactatactacttagaaatgccctgcaaaaggtgcacatcaaagattgaaagctcaatcctggattttaagtgcttcaaaagtgcacttaattgccacatttttgtcaaacattttcccaggtagtatttttcctcatgtaaaacaacagcaatttaatttgaacagaaagcattttgaaacatacttttggcagggttccttgcagatcagaatggaaatgattaacagggcaattatcaatcatggacttttggcggcagaaggaactgtattgtttggtacagtctgggccagggccacacaccgtaacggagatactctattctgtggacggttggagggggctgtgctgagcagggtaactgcatcttttcctagactgttcacactgctgccacgaaggagtcttgtttagactggacctggctttcttcttcgcaatgagtgttgcagactcccgacaaaggccaggtggtaaagtgtggtgtctgtgagcgagagcctgagatgcctgagctgacctgtcctcagccacctgccatcgtgcagaggtgagagcagcccctgaattctgcccctcggtctctccatagctaaagcaaaaccatccttccgtgctcccaggacaagcaggctattaccaaatcacccactaaccctgggcgaggaggggccatcactgcacaattcatcagtgtctgtgacaggaagagattgttttagactggtttttttttttttatttgcaagcttttttctctctccaaaacgtgctgtcagtgtgttctaatttactctgtaaggaattctggagctaatcataggctcacaaaaagcagcacaggaaagtttcccagataacatctatttcagtggctttcaaacatttttgaccttaccaaagtaagaaatacattttaatatcatggcacacatacagctgtatctaaactttcataatactgcctttacgatatcactctgatattgtctattcttttctgtttatttttctttttgttccttgttatgctggttgtgacccactccagtgatttcacaatgcaggctgggtggtgtcccacagtttgaaatcccaatctagggccttcctctcactgtacaaagtaggtaactggggacattagtggatcagtgatcaaaccaaagttatttgatcttaccaagtgatatcaggatgagaaagctgttagagtgtcagatatgtgaaggaacttgggtcattcctgatacctcaaagagaaaaaaggtagtccttgaacacctcctacttgtaaaggatgcacaatcctacatgcccctccctttcctttcctcccctctgtaccccacccctgcccacattttcttcataagcagctttggtgttttggcttgtttgtttcccttgtctcctacctgtgactttatagccttttggagactcacagcaatagttgtatttaaactcagtgggtggcatccaaggctaaaaaggagattgcctagacacaaaaccacccaagggagaaagcaggacagcatcttactatgattgtttcttgtttcttcctgtctcataaggattattacccagggttttcatttttttcatttcatggttcattttcgctccagtgtagacatacaatagaccactcgtccctgtggctccgggcagcagcctcatctgagaccctcctgagacatctcgtgcagggcagccgtagtgtgtggcttccccagggctgctctaacagatcaccatccttgccatggcttaagaagctgcagatttatttgcttacagctctggaagccagaagtccaaaatcaaggtgtcagtagagtctctctctctgaaacctgctgaggatgatgcccctggcctctccccagcctctggtgttcccagcagcccttggcattccttgccttgtagatgcaaaactccgatctccacctctatcctcacagtgagttctcctgcatgtctgtctctgtgccttcacattcctctctgtgtgtctgtgtttccatctccttatgaggacacccatcactgaatcagggcccactctataccagtaagacctcatttcaactccattacatcttcaaaaaccccattctcaaataaggttacttcacaagtgctggaggttaggacttgaacataccttattgaacaatccaactgatgacacatagtaatttatgcactcgttcttggagacgttgactttatttagtagcattaaccatggcaatgtcaccagcatcgctgacagcctgaagcatatgatctccagaatgtatttcaatcatcatgttcacttccttggtattctttagacaataactcagccttgaactccagtaaagggtttccctgggattttcttcttgactcactccactgtggcctccctcatccaggactgtaacagacgcctgacgtcagtggtctagacctctctgctgaatgtcatctttggtgaatgtcttatgagaaaacacatggttggtcactcttagaagggcatgaaagcctgtctgcagtataaccaaaacaggcacatggcgaggcacactgtgcgcatgtgtgtacaattaatatcatggttttaaattattttcaggccaaggggagatctttgctgcatctactgaagaaagcgaatctttttcttcctgaaaaaaaatggctacttattagtcgaatttgtgttttaaaaatatgtgaactaatataatgcagacatgcattaatgtttaaatatactggaagtttttggtaaaatgaaacccattgtctctgttgattactttgatgagtcaagaagtaacatcctgggaatgattggccagtttaaatgagtgcctcaggtttttggaatacaagaaatcaagaggaagggattagaacatataggttagcaagattgggatcctaaaatacagacccaaatgaatggaacaaaatcagggaatttattaataacagggtcaaggccaaatcagtaacaaatatcctgagtggaagaaaggtggtttaacaaatgcccctatgaaagatagagattggcttaccatgatgagatgtaagcccaagttatgaggttggcacacaaaaccacaaatgtcatagcttaaaacaacacacacttcttatctctgtttctgtgggtcagggtctgggttctcagggactcacaaagtatgttttcatctggagctccaggtcctcttccaggctcataagggttcttggcagaattcagtttcttgaggctgtaggactgaggtcctggctcctagaggccaccctctccataagcagttcttagcatggccgcctgcttctccaggcccagtgggaaagcatgtgcctccaggagggctcagtccattcttcatggcttttacctggttaagtcaggcccactcaggataacttcattttgtattaaatcaaaaccagctgatttgggatgttaattacatctgcacaacttcaactttgccatataacctaaccatgggactgatatttatcatgcatttgggtcaagttgcattaagagatataataaagctggacaagcttctgttgattagaagagttcagttacaaggctacacttgggaggaatgtttacaaactggaatggtcagaggatggggaagacacttgagaaaagtcaagtgacggatgaaggcaaatgtggatatttatctgggagaaaactaagaggagttataatagctgtcttcaaatatttaaagggcttttattaggaagaggaatttggcatattggattttgccttcagagaagtggagtcctgagatgctcttagccattcattccagcctccagggctcacctgctgtcttctgtccaggttctcggtagcagggcagtacagccccatccgtgatcttccatagtcaggcatattgtcacactcagtgagcggagagtcaaccgggaggaaggcacagtttctctggaatgacctacggaatggtacgctcaaatgcaaattctccttcccttccccagtccttgtccttcagatggtaatttaggagctgaaggtcagggcaccagcagcctttggaagcctacaggacaacagtcagcctggctagaaaaaaaaacaatgtcacaggcatgttgtgtttaatcacatgaaggatatttgcattgttttccaactgatgccagcagacacattgtcagtggtatcatgcctggggtatcagagttgacattgggttgccccttctctgaggcattcatgtaaatccttttaagtttataaaacctccatgtggctcctgcatgcttcatcatttgcatgtgtctctttttccaggggaggcagcatggggagcaggatgctggtgggctccaggtgcagagagcagggtgggcgtcagaccccaggtccactgtgcacgccctcttgtagagcccgttccgttgtccatgagatgaggagtgttcttatctctaaagtattatcatgaaaacctaacaatgtagaaagactaaagcacatgggtggtgcttcataaatagtatttctcccactttctgaaaactcctgctgaagtaactgcacaagaatccttgaacatttagaattctggttttagccataccataaagtcagtagtgcgtggtggaattctgctaacgaaaattgcgaaggatcaaggcagagtacagagctggtgtgtagcgggtaccttctgtctgctggcactaggtattttacacattaaatcagctcgttctcacatcagctcttttaaaaataaggaaatgaggagccacagtggcccaactgatgcagtggcagaagtagaatttgagcttgtgcagatgtgcctccgtgttttgtctcctgagcatgctgccccaagtttgacaataccaagatttgtactggaacattccctcccatccccaccccctagaagcccctcttcctcccttagatttgacacatagtttgaaaccactattaactaccttatgagagccactgtttgtgaagtgctgactatgtgccaggtcccgtgccgtgcaatttttgtgaattatctcgtgtctacagtgcctcacaatttctctgctcaatacctccatgttactgccgaggaaagggaagctcagagagagtaagtaatttgctcgagttaaagagctggccaggacagccaggggcttgcaccccggagccttcatccactacactgtcagctggtatctcaaccagccattacaggctgtaaaaaaattatataagatagtctatggtaatgcagaaaagtgaggttattttgctccctttccctttgaagaaaaaagccctggaaagacatatcacttgagtatgggaaaaaatgaagctgtggcttttctgtgagtcaattctttcctggcagcttcttggaataagaccaagtatagcagcagagttttctgttttaatttgagctgcagggtgactttttttcttctatgctttcatctctctgtggcttcttttgcctcgttaatttcatgccctgcccaggcgggctactgtgctgcccagtcacccgggtctggggcggccaccgctggccagcaggcaggccctccagaggcagaggtggccacgcttaggtcgctcccgctgtggaggcggcacacttgggtggcagcacagctgtgatgtggcggcagctggcagccccatgggaaagatgtgtgaagtgtggggtttgacgacccatgggagaacagactttcttcctcttcttgttttcccttcaaagccgtgagtcaacctcaaattctctgtcttttttctccaccccctcgtgcctctctccctcacgctctgcatctctcattgcaagcttgcatttttttgcacacaacactatcttaatatttctcttttctgcaggcaggaaatgagaagtcatttttcagggtcattcaggaagtcatccagagttataatggcccattatctactggtcagagtttacttaggctttcactacttccactgcccacttgaaacagggaaaaatattttccccccgcgctgtgagtgtgctatttagagctgaccacaagcggggggaagagaggatggctcggatgctgcatttccactgagaacacaaggctggcaaagcttgtctgctgcccagcaagcacttcaggctcacaccattttaggttcactttaagtagtttctcaattgttaaaaaaaaaacaaaaaaaaaaaaacctgtactctgaggatatgcttataatcccatagctaacccagaatttcttagagaactgatcaacatcagcagtggcacttactgaaaatgcacattctcaggccctgcgtagggcctactgagttagaatattagagagcaggtctcagaaacattctatccggcagtcttattctatgcacccgaagggataagagccatgctttcatgaaacatgggttgtgtgtaaaatgtttaaaaggtatggcaaaatgtgtttgattggcaccaaggatttctggttcctcctagaatcattaatcaaactttgaaggagaaataagagagtcggcattttcttgcacattctttgtgatgttgtgatgagttggaaacttcccgattgggtttattagagcatgaacacccaggcacccagcttctagccagccctgtcaggcagagtctcctcgaagatgtggaaaggactgaccaacagctgaggcctacaggaacctgagcaggcaaggggagaggcaccccggaaccaggagcaatggccttcccaccctccctcgtcctctcctcttctccttttggagttgcaggccacagaaaggaagtgacatgagtcactttgggccttcttaattccttcatcaaaggcagcacaggtgtgtatgtgtgttggtggctaattgaggtaggcccacagaggagataacagatggacatactatttcctttcttccattctgatataattcagggtataaacacacacacacacacacacacacattctcacttctttggcatctaccacacctgccccagtgcccatttctctcccacctgaataaaaagcccccacaaagcctgaggtacatggaaaggagcagtggtctggctcccaggagtgtgagaagcagccatgttttcagaggctgtattccacttggacttggccctacgctgaaggtaggagcggatgggggaggcccccttcgcacaaagagccccatgaaagagtgcacagtccagtctataaaacagacgcagaaaatgtgtgtaggacttcttcctgaaaaagagcgtggtgcgtccagtacctccatgttcatggaacttcccagtctgcagtttacccttttgtgcaactcccttttggtaaagccctggtcacacttctggttgttcagattatacagggataattccagagtgattttaaagtcaactgccaggcatccgcacttgcaaattagatgcctggcacatgcttgtgttaaggtaataattcattacaatacaaattacaggggagttcctctgggcatgcgacctttcccgtcatttggctttccctgtgattatcaggggagcttccatcgtgctgctaatgggaccttaaccatgtgtcaacccatggctgtaatgctgacactgttttctttctggaatgaaaggccttcgcaattgaaaccaaaatgttatccaactcagtcctgtccctttgacgatgaaaacatcaagttctggagactggccatccagcctccctgcctcatctcccacgccctccatcattttttgtctctacttacttatttatttggctgtattttacgtacatcatgcaaaaatattcctctttgtaaaaagtataatgatttcaggaaattagagggtaaaaagcaagaaccatgctttcactccactgtcaagagttgtggaagaatccttccagcattttttctgtgtattttacatacatacaaatatatgtacaaataaaggtcgatcatttaggttttgtttatatttttgtatatatgagcttatgtcattcatacatattgttttgcctcttgcttttttttaacttaattttactttgcttgagagctttttgaactgaagtacgtgtaagtcagcctatgcatgtaatggctccctcatcttctgtgaggctgtcactaaaaaggggatttagcttgttctgggctttgcagcccgtacactgggcactgttcatacgtacttctctgtgcacgcaaaggagggcttgctagggaggcctggcagagggtgccattcaaataggattttcaatggaggaatttttaaattttcagttatttgaataagttttaatatatatccagaaccccaaatcatcaagtttgttttcttccacatctgtccttccatttctgaactattttaaggccagtcatgtctcatccaagaaatcccatcctttcacacaacactatctccgtttcatggttatgaatctctaaaagcatgatttttaaaacataatcacaatgctgtcatcgaacttaaaaattagccataaatctcttatgttacccaacaaccagcctactgacacatctccagttgtctcaaaaatgtgttttccattgtggtttgtctgaaacatgatccaaaagtcagacccacctctcacctttccctaacctgccggagcccatgtttctttccagccaggcttggagaccaccacacgggatttgcttcttggggcctccctctaaccagctatgcaggatgccctctttcctgtcaatacaagctgctcaaaggactcattcagttcaaattcacctatgtgagcctaggtgatgctacttatttatttatttatttatttatttatttatttatttatttattttgagatggagtctcactctgttgcccaggctggagttcagtggcataatctgggctcactgcaagctctgcctcccgggttcaagtgattctcctgcctcagcctcctcagtagctgagattacaggcacgtgccaccacgcccagctaatttttatagttttagtagagacagggtttcaccatgttggtcaggttggtctcaaactcctgacctcgtgatccacccacctcggcttcccaaagtgcttcatgttttcaggagctgtacgtgcatttttagttttgatgaccaggtcctttttctgttttttaaagaacttcaaatgatctccagggtacacagcgcttgtgtgctgatgaaaaagctggcagtacaaaggccaccagccaaggtcacacagccaaaaagcccctgacctcgggccccttcccagaccctgggtcttttgctgccacatgaatcttcttcaaggtcctatgtgtagattttcttgacttggccatattatttaggattcagatataataacaaaatagatgttaaagcataacatgaaggcatttaaaagggtagaaagcacatgatttactaaaaccataaatcttatgacctgaaagtttcacctaatctcttaaaaaataccgtactaaaccctgattgaaaatcagagctcagacatacagcctgagatgccaaaaaatggccaggcttgtctgttgagaaagccatatgtaactaactgtttggaaattcaaaatatatcttatcattttaaaaacatctttcttctaaagacaatcatcttggcttcaggaatgaggctagtaaaaagtgaaatactcctacttgtggaagaaatcctcattttaaccatgaagaactgaaaaatgcattctgatgttgatggacccaacctatatttgggtattttatgatgtacacaatatacttttgtatatgagattgttattaaatgtgactttgctttttcaagacatacaatgttcctccgggggtcaggcactgtgtttagcactttgtcctgacctcatctgacttctcagctgtccctgagaggtaccagtgtgcaagatcgctgagttggcaagtgatagtgacaatattttcaccccaatttctaatttaaagaccccgatttctagttttgttttgtattggatttgcacaatttcacgttctgaaagaggatgccctcaactttgcaaaatgggccttttgaatgaaaaggatcagtcatgtcaggaaaagcgctacaatgatgaaatatgataaataagtcagtctttcatctgtaattatctactatggggtaaaaagtgatgaaaactaccatcttgaaaggttctggtgatagtggttcctaatgcagtgaaagatgtgtaagtcaaagatttgtaaccagccagggaatgagaggcgaagccatagctggtggcgggggccacatctgggtgtggggaggccacagttgggttgggggtggggcctgcagttatccacacccctcccacctcccttcgacagtacaggcttcctggttaccttccagagagtaaggccagggagagttgaataagttgagaaatgtcatgtcgaagctattggtggaaagagttccattaattgacaatacaagtccctactacattctaaaatctggtcctgactagtggcaagccgggcccaggagtagcacttaaacaatggcaggcttgtgttgctggcaggatacttcagcctcagaggagctgtgtgcagctggggagactcacactcagaggatttcaaagcagagggcatctcgtagagcaacttatccaaaccctgacccactgtaaacacacacacacacacacacacacacacacacacacacacacaccctgagagagagaaagagagagagataactaaagagagagaactaaagtttggcaaaataatacatgctctaatgaaggtttattaatgattaatctactcctagcatttcctagtccactctatctccttaaaaaaaaattctggttgcagcccactaacttgattgtacagctgcttaatggatagcaggctgtaattttcagagaactgtttaatgcgggctacctctgttcttccatgctgcttgtggttcctgctctgctcaggacagaatggggaggaaaacaggctctgcggcacaatattggcaagtgaaattttgtaaaccggccctcccttccttttgcatttggtctgaaaattcaattagatgctgagtcctacaatgtatttgagaagcccaggagtgccctagaggatgagactgggtggctccctgtcaggttgaacatttgccttaattactttggcaagatttgcatcagtggtattagtccctgcctcacttggaggcctgcacttaagtggccacattcaggctccaatttcctggtgatttcatagtgtagggcacttgcaatcaaaactaggcttaaagcccaaccctcttacattttacccacccccacaaatgcagcaaataaaatgactctgattttcattccctagacctcttttctatatttattacattattgttaagacagtttttgaagaaagctgttttatttaacaaaatagctttatggaatcaacttcatatatcttctccgccagatcaaaacaagctcgtagtattagatgtcaccgagcaccatgacaggcagatgaacatcatccctgtgcccggctaatgatagctcggcctgccccggcgtcagccgctcctggcagggccagcgggcggtgtgggaccggcaccgtatctccagcaattcgcagataacaaatatggttctgatgatgttactaaagatctgtccctttcaagattggattagacattaggaatttggagggctttttattgctagcatttttaagaataaccaattagagtattgattctaaagtctgaaagccacatggacagagttcatgtaattggctactttatgtgcctcttcctagattgccctgcattttcaaaacaagagcctttctattttaatcaaaagaatccagaatgaaatgaggctttgaaaactcagcctatgtttgtcttgatttccttaactgacatctagaagaaaatatgagctcaggggtccgctgggttccttccagcgcctaagcctgtaagctcttcctgctggaaccaagctttaaatgcacttgtcagtcatgtcccatgagaatagatactgccttccatgtttttttgttctgatttccgtgtttgaaatgatgaaaatcatttttctgtgctttttaaaaatggaattgcttttgtgttgggaattgtgctgttcatttttactctacctcgttttggaatcactaatgtggccaatttatagccaaaaatcagtatcgtagagtgagcaatgaatggcatggtgactgtgtgagcgaattcatgccctccctccccaccgctcgccccgcgtctcagtcctcagtgatggtaaacagaatgaggaccttctcccgaccgtgatgcgcctcagccctacttcccttgtcctttcctatcataaaatcttctttcatagaaatggtcatttctgttcatatctgtggactgtaaataacaaggaagtcatttttgaggtgaaaactgcacttagactcattccaattttgatggaaacttttagctggtggatggcattttgttttgtcttagttttgcaaggagttatcttaatttagggagatgaaactagtctgtgatccgaggtctcacttccatacatttctctcgggcagtgtggctgcctgaatcatgcctggatgccacaggtgcttagccagctggtcctgtcgtaactgtcactggtagctcagggagtgcagaggtgccagcagacactatgaaattggcctcgtaaagcatcagttatgttgtgatggtggcaaagctgcaggcgagatgggaagtgcagccactgagaactcacagtagagcgtgtgtaacgtaaaaagatgaaacccattgtacacagctgtgtactgcctccttgaagtcaaatttcccccattaccaaggaaaagttttttctgaagggggctgcttgacaggatgacatctggtgatatcatttattcctttggaaatcaatctgtggaagtgagtttccactgactgatgaggagaaaaatgaattggcttcacccagcatccagcttcttatcctgggagagatagctcttggtctgtcatccacgcagctgcctggtgcaagagccaagtttgtgcagcctgcagagcactcttcctgagctgtgggctgccaggtcggggggcagggggggcctcactgtgcagcctcctgccacccactgatcatctggggagactggcctatcctgtcaggagacgcagttgcccagacgttttcaagggcctaagatgtaggcagttgatccacagatttttggagagtccttgagttggagattacaggtgacctcagaggagggagtgagaacatctgggtcatgggtttctactaggagtccacagtgaaaacaagaagaggaatttacgacaagacagtccagcaacttcctttctaacttctcctttcacatatgctggatactccaagactttgcatttacatggacatcacagatccactttgagagaagtagggtaaaaagaaataaatacatagtgctttaggtgtatttctatacatcttaattgatatgggattacattttcacttgtgtttactgtacagactctagacagatcctgctcttttgcaggtaaaacaaatatttcttaaaacctagaaagacccaaaacaatttaacagaaacattttggaccattttggaccttggcagttaggccccagtgcagcagcggcaaccataaacctctccataggtgctgaacccaggtgatccctggcaccggcagccttatgtcagggctctcttatcgctggtttttatttctcctaataaaagtgattaaaagattcatcttttaaagaaagcaaggacacagaggtggattctccctgacgctagcacagctcatgcccaagccactcctgcagggctctggtctaagtgcaaaagctggaaaagctgcaggtcccgcaagacacagagcaaccctgcaagccaggtcaccttccctcttctctgctgtccgactggccctccaccatgtgacattcaaaagctcaagttacttaacctctcaaaactcagcatccttttctgtacagtggggaagatactggactgttgtgaggattaagtgaggagagtggcccaatgaggttgacagttattactgtcattgtcattatttgccttctcacaggcaggcgtgccacagtcattttactgaagctgcttcagtgggtcctgaattaggccctgtcctttgggagagacagtcctggttcaacacacagctccctgcccagggcagcttgggagtgtgggccagtttcgcctttagaaccacaattctctgatatgtgcaatgagagaattaattatagactcaaaggattgcatgcagacacacacagatacaaacacatacacacaacacacagagttacacacagacatgctcacaatacacagaaatacacacagacacacgcacacagcacacagagatacacacagacacacacacacacacacacagacatacgcacagatgggcacacacagagacacactcacagagacacacagatacacacaggcacacacacagagagacatacacacagcccacagggatacacacagacacacagagacatacctacaacacacagagatacacacagtcacacacagagagacatacatacaatacacagagatacacacagagacacagatacagacacagacagacatacacacagacacgggcacacacagagacacacagacacacacaggcacacacgtgcagataaggtaatattagctagttcaggaggagaaagagataaagataaagtaatattagctagttcaggaggagtgaaagaagccttgtttttctccactttttatagaagagaaagtgaagattcgatttgaggtgagttcagcacaaaagcgtatcccaggccctctggctccaactgcagccctttctacctcattcccagaccccacctaagccttttctcttcaaaatcttctcaggcacactgatacacatacctcagatttttaattctccggttgtgttcaccaggtgcttggtcatgattaagaattccgtgatgtgtaccccatgtgtttaaatttgctgctgagttaactttgtggcggcctgtggactagacctctgcacatgcaatgcagaacggcagggccagatttgaaatcctgctatcttttcggctgccttgtaaaaataacatcaggcgatggggatacgatgccagaggtcacctgtgataagttctgtttatggccattttacttctaggaagacaggaagtgtcaggatctcagggatctaggaagccaaaatgtttttccactctgaaataaagtgactgaccaggagttcccggccacgcagccctgtgggaactgccgcacggccacttttatgaagtggacacgtgttggtcccactgaaaagaaactccccacccatggctccctcacgctgcagcagaggccctgccacagcacctgtcagcccctgccagcttgcaggggcgcaggcgcagagcggtttgtgcccttgctggagccagggaagggcacagggtccctcctggagtcatgggaggtgcagccgaggttctatattaaaatacagaggctagcacatgtgcttggggaatgcagctacagtagtggaatgaaagtgctgtccgttccttacccccccagctcctcacctgtcctccacacgcatatccctggctccctttccctagtaaggagactgaattgaaattgtggcttgcccgaggctgcatacctgtgctctttctgaagcccaagtcactggctctagaattctaacctgtgaggaagccactgaggatgtttgtcaaaatacatatttctgtgccttgccccagttccacggcccaggaatctgcagttttcacaagcacccccaggtgattctggtggtgtctttgcacttcttcaaggcagtactgcctggaacgcagaatcccagcctcctctatcctccttgcctaatggcctggatgctctcagatctacaggggaagggaaggtcacacagtcatcgcaatagtaacctcagctgataaatcctcccccataaaacttattccccagtgttttttaataggaaacaataaaactgtaaccagcccaaatatccatcaaagagaaaatggagaagtaaatcatcgcacattcacctggaccagatctattgtaaagccaataatactgaagccccttccaaggccctgggagtcctaacagtgcactggcagtgtctataatttatattatgaaatttgcataaggaaaacattttgtctcatttgtgcaatttctccttctaaatatacgtgtcactttgtacctgatttctataagacccaggacctacaaaccctgtgtctgcccctgcagccacccagggaaggactgcacagcagcaagacagattgccatggagcatgttgtgcccaactagggacagcgcagatagattctgtaatttgcctaacaatgtctataggatgatcccatttgtcaaaaaaaaaaaagaactgggctttattgatgtcacctaaatgcacctaaacttcttttttgccccatgctcttctgtactcttgatctttccccaaatttttaaaaacatgacactcattcccttatttttcctacttagaaaagtgtagatggttttatcataggaagttcaaaaaaattaaaatataatgaaaaatactcaaatagtgcctcacaacagtaactactgctaacataaataaaatccatatttcctctcatacagaccccagagttgctttgcctgacagtgtagttgatggagaaaataatctttatccttagcctccatctggttgcagaccataaagacagggaaaaaatgagggtgttggtagcttcgttagaaactgaaagctcactgattttttcaaaacctaaatagcctgtgtttctccaaataactaatttgcagccttcggcagccaggactggcagggatggggctagggggactggggagaactgctctctcctgagggtggtctgacccgacagcacgcatgaccttcccacagtcaggaactgctcagagacgtgatggcaactccatagaatgaaatactcttcagccagtaaaatgtatttttggataaatatttgctttaaaaaactttactatatgttgttaaatgaaaaaaaaaccttaaggcatcagaaattatgtgcagtaaaatctcacttttgtaaataaatatacctgtttactacgtatgcataaaaagaatcctgagaaatataagtactgtatgcatattgttgttaagtattttttctgtttgcttatctataattctaattttgcttcaaagaacaagttactccggcaatataaaaataaaataactaatttgtcttgtcatcaaacagatagtaagaacaggcaaacctggccctccacactgccagccttttgtgattcaaggcttcagtttcctccacttgttaaaaagattcaacaaagtagttgaaatagtatgtgaaccagtaaaccctaaaaggtgtccagtgttgtctgtgagctaattaagtgatttgattctgactccccgagtcttctgatttcgaagcagtggggagtcagacaggagcctcaggtggcctctcctgagaggccctggaaagtgatgagaacctggcctctggcagctcttcataaacgtccatgttttccctctactctctcactcttttcccagggcctcaaacagaagatgaaaatcaatttctaaaacagccctctgtgtgctctctcgtatctctccttttcacacatcgtggtggtggctttctctgtgttcctctgttgattcagtctctggaattaacggatcaggattccatgcccagaatgctacaaagactgtgcttgagttctcccacatctcactcaattacacagaagtttcagattatgtaacagatgctgtgctgggttaggcagagccatctgacttgttttgctttattttagaccatgagatgggtgagtttttctttttaatgccacattcttttaagaattaaaaacctccacttggctgtcagcattggaaatcagagtgatggtgcaagccctgatgaggacaatgtccttgtctatgaaaaggtgaaatcattgcttgaaatcgctaagcaggacatgcagtcccagatggaggggggaattcgggagctggttggaaaagagtatttggcactttgcagccttgagaggtgcagaagagacaccgaggggttcaccaccagagccaccattgtcagagaggcgtccagctgtgtccacctgggactctgccttcagggcttcttgcctggctgggagctgcacaggcagactcctgggacggtgtgccgacagctctgggcacccccttctaggatctgattcctgaggaatcacaatgtggatttcacaatcacttccagtgtcttttgccaacctctgtgaacagatgtgcaattaaaaaaaaaaaaagaaaggggcccaattctcaacactgtaagtggaaactttttaatggaaaaggataggctaatgaattgaatttgaaatctgagacagaaccgatgcatcaaatgtgctggtgtttacagataatacaaggggggctgcatcttatggtttcaatccttttttaaatttttgttctgagagacccagccagcagactgccgccagtcttgtcagagatgtcagtggtggccactctgaatggaaagcagcatctctcagcatctctgaggcactgctcctcagcggagactgtggtggctttgcctttcagcacgcatcctttctacgatgcctgacagtgcccagggaatgggcagagctgggagctctgaagccctttcacctaaaccaccctgggtcacctgacctagttttcctcccaattttaattatgtcaggcacttcacaaaggcctccttggggacaccatgagctcactgtcatcagattgctccaatcacagctgtggcttgcacacaaccgccatctctgccccagcagatgctgtgtgtaaacagttgtattaattacatctcaaaaacatggttcttgccagatcctcaggatttgggtgcagcctctgaggtgggtgggaggccctcgagggagaaatgtctgcaggaaattcttcccctacgagaggtctgttttctaagttatctaagagctactgcagctgtttactgcagagtgaccctgctcaaagctgtggtcacccaaggctttgaaaggggacctccacttccgccctgggtggagcaccgtgctggagacccacgcctgccaaggcctcattgtcatctccacacgccgtccttggggtgggccactcctgggacacgcagacaggaagccggccacctgagccactcggaggctctatccagagtcagctgccaagcctcacgtcacacatcactgttagtcttggagggctggcggggccctgaagtcaattgaacacttggatgacagggaacttgccactgccagaggcaatatgctccatttttttgacagttccaacaatttttctttaaactgtcataaaaaattgctgctgtgaataccagtgtcggcgtccctgcctcacctttacctggtgcttttccaccacacaaaactgtttctcctcgtgctggccttgggcttgcagacagctgattcttctcctcccgcggctgagcagcctcctccgagcaaccctctgacaactctgctccttctgacaacctctgcaagggctgccagatgtgaacaaggggcccgggcagaaggtatccaggaagactggaaactcgaggaagcctgccctgtcctgtccaccagactttacgcttgcgtcactgggctttgggacctaagtcctcgtcatttgttccttttgcagttcctactgttctcagcacttccttccagcttactgaggtacactcagatgtgatatgccatcggtacagacacagttctgctccagcatttccccgtgttctttctgtcgctctatttactgaattaccgtgaggatgtggagcgaggctgagttctgtattttaacaccattttaattctcacctactgagaaatccatcctcttatcactgtgctttttttaacctgtcacgaatccatgaaatcctatcagccagcctgcatacttccttttaaggtgcagttgaatcaggagaaacttgccgcacatgctgcgtccgggcacagcattggctgaggctgctgccctgacctgtccgctttgtagtactgcccagctatgaaacaggttagccacacatgacctgcatttaggagtaacaagtctgtctgtacatgcacatacagcaacttttttaaactgtctatattttttcctgagataggtatttataatatctccatcttctttcccattttgaaacttagaacaagtttgcctgtcaacagttctccacagcatactgtgtattctaggattttctaaggttgagcaacggaggttcagcaattttgacttaatttcttcccatcccttttccacgcagcccagaagccttggatcacgtggtgaggggaagaggttgtgctatgtcgggaaactctgtatcgaagctcggctcagatcatgacattctcttgactaaaaccctcagtttccatcaaacttgtcactctggcattaaagcctgtcactgtgtggctctgaaaacctctctgaacgtgttccctgcctctgccctgcaggtccctgtgctccacagaagcccacttatgtgacccacccccactcatcaccaccttccctcacccagagcctcagctccccactcccacctgtaagacccctactggaaagattcccacctgcccctcaagattaatctccaaggacatttccaaattcctctccccatctctcagccagatggctttgctccctccaggaaccccagccaccttcgacctccagcagggcactccactccacattctcctggtctgtctggctcatcttacctgagccatgctctccaggtgaaggactatgtctaactcaactctgctttaaaagcagctaacacattgctctttgcatattgttcactcactaagttgaactggacttggacatgcacactgaactgcagcgtctgctgcttcttggtggcccagctcgtcaaaagaataagatttcagcaaaacaatgtaacaattttttttaccaaaagtaatgttaacaatatatggttttcccctgatgtttgcgtcaaaatgctttttggaaaaaacatttttcaactctttagggtcagaattaagcaatgaaatttatataccacatgtataatgtgtatgtttatctaagtatctgttcatttatatatcttaaatagaaattttaaaaatttttttaaaactcctgataaacattctcaggaggcacactatgtaactgttggttgatatacctagctagatggtgaaatcagattttgtttaaagcatggaggagagggaaaaattaaatcttgcagattctgcagtccttaacatctttgaaagaggaacatttcagacaatgtaataagaaggccacgtgctttgacttctgtagattttaaaaatacttctgtatagtttcttcttcctttgaagaagtttggggagtttgggaagatggagaaagatataagaatagactccccatatgggtcatgaattatctttttgcatcagaactcttagtgcagtttcagtattttcttcctcaggagggtgagctgcttccgaatgtcctccccttctttgaggcatcctctgttggtgaactttgagagcatccatttatgaagttgatgacctttcccagtctctgcaagcccttcagtgtgtgtcctctctgagcaaatctgaattgtgtgcttaatacatggaaagggatttgggagggttgctttttaaactgatttcttaattaatattatggtttagttaactagacagtctcattgcagaagtgcataaccataatatgtcttcaaatatatctcccttcctaacaccctgtaatatacttttgtaaagatacccttacagaatgtgatccaccatttatgaacctgcagcattgcattcagagactaagtgaaaagctggcagattttcatttaaagcacaagctaaggaagaaagctggtctagaaggagctacagaagggtaatgcttagggagggaatgatgtgcctgtgggtggtggtagttaaatctaaccaaagaatgatgtcgtgggtgtttggatattggatggtccacattgggccacattctttcaaacataagagtctgtagaaatatgacctgtaaaagactcttaaatattctggaaactgtttcttccttgtcacatccttatatatacttgaacctatgcctaccagacatgacatgtgactattcatacagatttcatcatctctggtttaagaataaaggatgctgcatagaaggctcacatcttttaattcacaagactgaaactgttctgaaatgacattgtttctaaaaattcattacttgcattatattcatttttatttttccatgccagaagggtagaagttcctgtgctcatattaagaaacagcaatgtcaatcgaggcccaactcaaatccaatttataggagttataaagggcgtgtgcctgttttgtctagaagcagtgttgggcagcactgagtaggatagaccacctgttgctaccgataaaggagcagcttctcgaatgctcctgtctggtaggcactatcccgagtgctttggcccctcatccacaatctgtgtggcaaaaggcattgcaggcaattcagtgaggagaccgaggcatggagagcaagtgccatggaattccctaaggccgtgcagggagcaggttgccaagctgggttgaaaccgtcctccgtaggctcccaactccgccgtcgctgctactgtgctggatgatgcctggtagatgcagatgtggagccccatggattctgagacaggccgggtttcagtcctgccctagctgcctattggctggatgaccttggcaagttgactttcgtgagcctcatttgtctcatctctcaattaagaaaacctagagcctatctgtgggggttatctgaaggattccagggatgcatatggcactgtctaccgcatgcggtaactgtttcacaaatgatgaggagcgatttatgttcttagtggaaatatgtcggcgtgtgaagtcccaaagctctgccctgcctggcttgatccagtgcctaggcactgcccctcttcccctctctcccaacccactgtaagaggctaggctgcctcagtaactctgaggggcattgactcttttcatccaaaaattcatgttactgccccacattttttctgttgttttacaacgcagtaggaagtgggcagactgtcaggaaaagtgatttatagtcatgtattgcttgtgctttggcttcatttgatccaatgcagatcagctgcactcagaaaactactcaagtgaaagagaaaaagtaactgaagggggaaatctggatgagtaagaattccagggataggaatattaatagcaagctttttgcctgatatagtcactttatgctgcaggggtgcccctttataaagtgcttgtacaatggatgtttgcttttgattttggatttggagtctaatgaatgttctaaattattattagaggagcttgcggttgttacatgtctgcctttattgcttatttttagccatctcccctgatgtcaaatgctcaggcaagaatgatacattcatttataatgtggctccttcagaaatataccacataccttttggtgtggtttgtggctgagaagagtggggaatgcacaagtggaaaactgcagaaagattatgccttcatcacttcaagtatttgagatgaaactagatcatttgctgttgctttttattctcattctaagtgcttttcaaagtcagcgctaagattttaaaatggttttctgttgttggcagagagggaattactctattactttctgataaaacagagtctttcatgatcaaagagaaccaggctctagtagttccagtatcctaacgtggacactaattgtttccctccttttcttcatgaaaacagcttctgcacaaatgatagccttgtgaactagccatgggcacaactggagaagcatttagggagctttagtgcaaattgagaccacctacacatctgactctacagggtttgacaacatccagggtgaatcacaaaacatcagtctaatcagggcttatatagaaagagtgaaagaactctgatttcatcctaaagattatttatattaaccattgttccaaatgcattaactattttaatttagttgttttgattgttaaaaaaaacacatctgtttggtagataagacataatttaagacaaatgttctatttgataagcttttagaaacaacttatttttattctttcctgtgagataactcagatgtggagaatgtgacaaaattttaagcataacatgagaagggctgacacacatagatttctgtgtgcttacttgaaaacaacaaaatttaagaatttggtataggagttgtatcaggtagtgcagagtccccaggagacctagagacccaggtctgggagcctagcggcaagggctgaatgtgggatgacatcagcagaaactcacagccactgctattccaaaaacccagcagcagctcagtgcagggcagtgctgatagtacagtgcctgcaatcctggagtggatttggatgtgtcaggtacgcacacgctcactgctcccccagcagtacgttgaacagtgtgcgtccaggtgtctgtagggcccctcgccctaactcacaaaaccattctgggtcagaagccaccaatattgtcatcatcctcccttttctgagaaccctagtaagtccctccagtggggcaagcccaccttttcccttcattctgtggcaatatgccttcatttcctaatcagttttgccctgctcattcaatgcaaaatggatctgctttccttgggcaccaatatgtccagggattgtttatcaatcttcagttctgtttcctttacatatccctccaaaaatcaggcctgcactgcctgtgcactccacaatccacaggcctgaaggaaatgttatctttgatgtagagacttaaagtaaaactcttcaaattaattatttcatgcaaaaggctagtcctgactctaattctaagacatgtctcctaaactctggaagtctgatgtatcctattatcaacatttatccttaatgtgatggtttatcatttatcctcaaagctgcattgtaaaatgtacactgtaaagtgtacattttaaagtcggttttaaaaaatcatatttagagatcctggtaaaaatctatcaagtcaagacattaccttattacccatggaattgtcttcaactcttacagttcaaatattcctgaattggctttcacaataaacatcctaaatatgtaagtagaaacatatatattgccaactttgtgccttcccaagcaaaattaaaatacaggaaaagtcagtttgttttgcccataaataaatatatgtgtgtgtgtatgtgtgtgtatacacatacacactcagaaaagatagaagcagcagcatattttggcagcatctggtttattggaactcaaacgttctgattgtgcatacagactagttaatgtggtaacaattatgtatttcttccctgctccttgccttctttccctccccagtttttttcttcctgatagtaggtgtgtacttttttcctatttccattggcaagccacatgacaagcaaaacgatcactcgaagaatattgttccctcaatcaagaaaaatgcccattgggttttgttatttgatgttatttgatgacagagacctattgtttttccatttttctttttttgttttccgtggcacctatggaattaagcaatataaaaaatctattatttcagatgttcacgtctaatgaatttcatgtgaaatactggcagtataaccccaaatagaggaaatttgtgaagagtggatgctgcagggcatgagacatctgcacagagttcatctcttccagcatcttgcatgtcccaagcactgccctgccaggcagagaatgctgcagatcacggcagtgaattccagttgttcagagcacatttgacttccaaattctcaaggccacagatttgaggacagaacaatatttgcatttgaaattggaagattattttttgcacaagtgcctatatgctatatagagtttgcccactctgcattatcttccccctgttcccccgttatctggcacaagctattcaaaagacacgcctacttgtaaaataaatggtttgcaaactaaggaaaatacttaaatctcatgtaaatggtactatactatgtataaaaatgtgaagaaacacagaacagctcatgaacacctccactgctgtataaaagaaccatcttttttctggctcctattggatgccttagaaaaatctgtatttcctctttagttattgtgtttgaaagatgaagttgagacaaaagttctattctttttaagttggcagaacttctgaaaggtgatttttagctgcagtgtgactcattccaaatgcagaaatctctgaccctgagttagtctatttgtcatgcaagagcctagaaaagccctgagtgataagaaatggccataggccattcccacagaattttcaacaaaaatagaatcatgcttatgttctagtcatgacttagaacttataactcatgttcggaactgtccatgttcacgcacaggggccgtatcactccgccagagctgccctgggtgccggtgtgcagaggggtccgagagtgactgtctcttcctctgttgtcgaatgtgtgggttatctccataaatggctgccatgagcatccttgttcacacatttttaggtacttgagtgagtgtctgtggaataattttgggaagtgaaatctgtggtcagaggtttgtgagttttacatgctacattttcagaagttgagaaatagcagtaggctgaaggcaagtcgccatgcctggaattcatgaacactagttgaaagaactggcgtgagttagtcatgacaggagagatggggaagggagttgcaggtaggagggccatcttcaaattctcaaagtatagtcactccaaaccaaaattcgatttaatctgtaggactccattctcaaagcacagtcactccaaaccgaaattcgatttaatctgtaggactccaggtggcagaataagaggcaatggatgggtggaagcgaaacagggccaaagtttgacttcatgtgcaacttcctaaggagtgatttgaactccacaaacatgaactaagcacctcaacacaggctgggcaagttgctgttcttttggagcttacatcttagtggggaaagagaaatgcctatgtaaacatataaatcagcaggatacattgtgaggacggtcattgctcagtgagactgcaatagagtgatacgctggagggggctgcaagggagaaggtgggagggacagcatttagcagaatgagcagcacagtcccataggaagaagaatttattgcctccttaggcaaataaattcccaaaccttgaacatcagaaaggaaatagattaatgtgcacagaggattaaattatgtgatctgcaaagtcatttaaaatctatttccacataaaacatattaatgcaacctaaacaaaaggggtctggataccctcatcttcttcccaagcatcaagtctttctatagttaaactgagatgcttttattcttggaaaattttaaggactatctacagcaatggaagaatcgggtgttgggatgtgttcccaggtaataatgactgcaggctgatttggcccttgaggtgtggcctcatggccctctccaaaaaaaatcaaggacctgctacaaagcacaaagccgactgcaatgcttgctgcttactggttagggcagctcctctttgccagcgaccaagcagaaagcaagacaagacaggttctgaagcagtaattcaaagccttcctcgctttcccatgtgagtcattgctagtcagaatattacctttgcagagaggcttaattccaaatttgctcttaaagggatatcctctcctggtttaggtataaacttttgactcacaggacaaattctatcattcctttgggcctaggattgcatttatttccatgacaaaagggcctgtctggtgtttcagcaaatgaaaacaaaaatataaagcccatctccttttgaatgagctctaaaacagttctccactggacttcagaacaagagggagctctgggctgctggctggttgtgcatttgctgtgggttccctccggcaggcgacctctccgcgctgagaaggttatccggataaccaagtaagaaagtacatgaggaggcacagaaagaaaaatgtgagagataacagcataaacacacagtgtatgttgttatgaggcatcacatgatgagatactgctggggagggaagaagtgaggagattcctaggaatcttatgagaatttccagagacaacaagttttgagcttttttttaatttagaaaatttaccttatttttaaaagaatatgtaacatatcccatgctataaaattctagacatagtagatttaaaacagcataatggaaaatataaatatctattttcttttcctatttatgtattctgtgccagtaggaatgtagccaaaaagagagaaaaggggtctctgcagacatggatgtctctgtgacttgatcactgctaacccaagaagataataaagcagaagcatgtatccaggttgctgcagccaagcctgcccggtctgcggggcgtcctcacacatggggcagctctcccaccccacacactgggaaaggcggacagaggctgggcaaagcccccaattttcgttggcactgaccccgatgatttataggcctttgtttcccatgttaaatgtcttacgatcattaaattatttatagctcaattagcatgtgtccaaaaccaggaagttcataggagactgtgtgactgggaattaaggagcaaagcaactttccagtctgtgatttactgggtttccattctgtttcctgttcggatccggaagtagaatttcaaatattgcttttcatgctttatttgggaccgattttagccccgctctcctttctcttgccattcgctggccattagccaccagcctctgcacaatgaccagctggcccctggcagatcttgggcccaggtgtgaagtcgctggagaagcatttcagggccaagatgggagtgatttcattttccattgacactatgcagaaatgaaggggattcaagtgccttcagaaaagcttccttccagcgaatggagttttgggggttttccagacttgcaactgcttttattcttggaagcatcattgttgctttttccccccttccatttatatcccaggaactgattcagaaaccatagaaattggatttggaatcgctgaatgctagcagacagctgactgcactcttcccaagaaaccctgccagctgggttcgggtatcgcgcggtgtgtgctctctctgcctggcccgctgagtcctctaactctaatggattccttcttacaccaaagtgcactagaactaaagtgttttgcttcattctttagacattttgtggtttagggctcaatcagccagggtatgatttgcaatccacagtaaccggtttcagagcagctgcccagcgaggcaggtttcatctcgcttgctagacgttttgtttttttttttttctaaacctcacaccttttatttattagacttggattccagtttcctgagcctgtttgtgccactgattagacaggcttgaagcagaacccaccaggcttcctgaataaaatgcagcagtgattgtattagggggttttaaattgctcaaaatactgtctaaaaaacactaaaaatcatgttactttctagattgaataaaatcctatagaaatgaattcctggacttgatatgtagcaagctggcattggctcgggagtgagtgggctcagttaagtgagctaagatgagatggtgcacaggcgagcacccacctgaggagtgtttggatgttatgatagccagctcctctgtaaagacctgtccttctatgtcagcagcccagcagataaatgacgtgtaaataccacatttaggagggcttatgatgatgccaattaatggagacctttttgaaacaggaaggaggtgaaacatattcctttgcttctacatcactgtgtgccaggcactgtttacagcatctcgtttaaccagcagtcaccacctgacggatggctgatgtggggtggggtcccagggtgggattgcgtgatgggcttggggtctctggctgatgggtgccagagctgggactggaactcctggcgtgactgaggcagacacctgggctacccagcctcacccacgacgccctcactaagtgacccacaggactcaccggaagcagggcagcaaggtccccctacagaggtccccactgcaaaccgatacccagcttagacagcagttctgcagtcggcgtctcaccccttcgggtctcattgtgactcactttgatagccacacgatttaagggtggttcagtagtgatttgatgagtgctgtggctcagggtcattcccctgcccaagcatttcaaattccagaagttcatgccctgcatggtgggtgaaaagtctcaggccaaccatgagcacacagcagccaggcgactgaggcagctgcccggggtggcacgttgctcaaacccatcatttggagtcaaaacaaacagatgattagctggggtggtcactttcaatcaagagttttcacatcgcctagacatggcctcagaatcaggcctggtgtggccaggggctgatctcacagtagacaggaagtgtggcccgagggccatggctgccccctcagaaggccctgtggagtggctggccgagcctcagcagcctcctgtgaagcgaggaagggtcttcctgccggcctctggagatcagtatgggaatgcacaagtaggaaacgctggatgggaatccctctgccctgtgataccaaggcagtgagtttgtagactatggaattgctgtcggagggctctgtaaccggccaaggtcacacaggtagccattggtagagcagggactggaatcccagacccccaacttccaggactgtgcacctttctttatcccatacagccttacagtcaagtgccagtgcaacacctgattcccaggttccagcctttgtcttttataatgggaatcaaccttatcttgacgatccagagatagtcatcaaggaagattaaattatccccttagactcagagtgaccatatcattttccctccacacaaggacacttttgagaatgaaaaggaggagatgtctgtaccagacgctggatgacaggcaccgacaggctgtctgccaggggagcagcgattcctgtatgttgtagaaagtttttcaaaagtcaccttggaaagaggttttgttccttaaccttctgttaaataggaagctccgtgaatgaaaacaactcccttccctaaacattctagtaatgacccaacactgccaagcctgccagctctgcctcatggtcgtgttgactgtgtgagactatgtgagtgcctgctacacagtacgctttcagtaaacatggtattgcctcgataatcccacaaaaatgtcctattcaaatcacctggcacccaggaaatttccttcttttttttcccaggtgaaatatacagttgaaaacacctgacagcaattcccctctcccatgtgtttgcaggatggtggttttggttcctccatctttgatgtgtacaagtgtgatgttttccccccacagacaagtaaaccacattctcttcacattcccaatgttttgtcaatgtacctccttcaatagaggatcgataaggaaaaaaatcattgacaatctcaattagattcactatttcatccaaaagcatagcttagaactctagtttttgttcaacactcttgccctatgagtgcacagaactttaattctgatacaaacatccctgaatgtttagctttgacagagattccaaggtgatttgataagaagcagggctgtgtttgggctctgggagtttttgatatggtttcaagccccatccaaaacccacagacctctagaaagtaggtgcctgccttcctgcagcagccctggagcctgctgggggctttgagcagctgctgccaagccaggcctcacccgacactctgatgggcacggccatggtggcaggggcttggacgctgccaggtgactctaacttgtggccagggtgggaagcactgctccacagaggtgccaaaaccaggttccttcctgtgttctcacatttcacagcctcaatgtaaaaagtaagacatgggcactctggaatattacaaaaatatagaaaagcatgttatagtaaataaaaggctcacagaattttgtcatttaggaacaatgattattaatatattagtgtgtgtttttgctcattaacagtatatcctgagatatttcctataccatttaatattttaaaagatgtttacactggccacagtagctcatacctataatcccaacactttagagggcaaggcaggaggatcacttgaggcttaaaaattagccaggtgtagtggcacatgcctgtagtcccagctactcaggaagctgaggctggaggatcacttgagcccaggagttcaaggctgcagtgagctataattgcaccattgcactccagcctaggtgacacagtgagaccctgtttctaaaataaataataaataaattaaaacatttaaaaatacatgatgtttaattattagaggactcaattttatatctatgtatacaataatttttaagtttcttaatattggacttttagtacctttttaaaaatactatttttaaaaaaatctgtatttctaactttttataacaaggaacctttggctttgagatgactggggaatccattctttcctatagtatccatgtccaatggacttaaagtattaatcaatgtgtttatgttttgttatttttctggcattacaaaaaattctaaatatattgttaccgcctgtataaatatcagcttttgagagaaggacattgtgtagaaataatgaaacactgcaacttgtatttgtattattcttttttttttttttttttttgagatggagtctcgccctgtcacccaggctggagtgcaatggtgcgatctctgctcactgcaagctccgcctcccaggttcacaccattctcctgcctcagcctcctgagtagctgggactacaggtgcccgccaccgcgccgggctaattttttgtatttttagtagagacggggtttcaccatggtctcgatctcctgacctcatgatctgcccgcctcagcctcccaatgcactgggattacaggcattatattattctttaaattcacatgagaatttagtatggcttcaaaaaataccataagttaaaatatcaccaagactctgttcagacaaaagtatcagaaaagtgagccaggcactcacatagtttatagtttataaaagtgagacaggcatgatctcttaacctcactatagtcctgtgaataaggtttatttacatttcattttacctgccaggattattgtaaaaacgccaagcacattgcctacacaaactaaatattcagtcaatggctgctattttcatgagttcgttttaacatatatttattgtcctctactggatttaagaagttatatttattatcatctaagattttagctattccttctcttaaaaatagattttataatcaatggcagtaagggagagtaactcgcagttctctgaatctcaaggggttcctggaagccttcctgaaggtatagtgaaatttcagcttcacattcccatccatgagctccctgcaaatatcccggtctgctctcaggacccagtgacttacctatgcagaggctgtagatagcacctggagcttcctgtgtgccctcctcaaactcagccaatgccgtcatacagtagcaggcaggtgtctttgctgggtagttggactggatgtccctgggattgcagaactggaatggggagtgacatcaggaaactataatcatcaggacaacatggtttgccataactttaagttttaagcgaccgcagattatgcggagagagatgcatgcccacagccatgcttcccatgtaactggagaggggtctgaagtttgaaacaagtgttcctaggcacgggttacagtgtttgttatcatcatacttgatttagaatggggcacaacatgtggattcatggtaactgttacaaccttactcattttaatacctgaaaacatgctttccccatgctgggaatcgaaagattctcctaggaaaagaaaggcttgacaacatcgattcaaaaagggcatgcattttcctcatttaaataactctaatgtgcaagtagatcccctgacctcaagctcagaagagtccaggccttcacaccttctctgcttctgctctggggccagctattgagattcctgtgcccacgcaatgcgcacatcccacccctggccgctgtccacaagaaatccagttgcaccaagcaccccactttttgcacctctcatttatgtactcctaagagcctcaccacaactcccttctaaaaacatgagttcctgactgggaattcgatgctgcccaggcagctttgctcagagggagcagccttctagaaatgtttcaagtaaactttcaagtataactaaattcaaaaaaaacacatacacacacacacacacacacaagtcaaaggtgtgtaatttggccaatatcacaaaccaattagccctttgtaagtggcacccagatcaggacagctgaccataccagcaccctagaagcaccccgtgctgcctcctgggacagggctaccaccatcctaaggccagcacgatgggccagctttgcctgctgttgaattttgcttacatagaatcctccagtaggtactcctttgggtcaggttctttcactcaacattatgtgttgatatttttccatgctgtgctgcaaaattgtatttcttgcattccataactgggcagttccatcataggagaataccacactgcgttcgtccattctaccgccaatggacatatgggttctttctcttttcttgcagttacaagtttatgaatattgtcccacgtgtccctggtgaacttttgtttgcatttctgttgggtacctcagagtggcgttgctgggtcagagggtactggtcgctttagtagctttgaaagatattgccaaaacattttccagcgcagttatagcaaattatacaccaccagcagtagaaaacatctcctaattgctcacagtaaacccccaaagattgccacatacatcttccatatcaattacttaactattcagcaaatttgaagggaaatatatttaatctttttattcaaatagtttataaagtggaatagagatgtgggtaaaagttgtcttgccacctttttagatcggtaaaagtttgttgaatgcaggcaagaaaagatgagaaataatggtacccaatgaaagacatagcagtctacaaggaggggcatttcccggggtgggggggacccacactctgtaactcccacattcaattagcatgttataggtaagctgcagaaaacgaggcagcttgtcaaagaggaacggctcttggccatggttgctgccctaggaggatatttgatactagcagagctggggcaaccctggaggaaaccacctggaatgatgggagaactcctccagggaacatggccctttaatagatctctgttataaaaaataatcccaaagcagccaccagggcatactgctgcgatcaagtcctaggcggtattcccttctgcgccatagaccctgtgcagagtgccctcaacgaaggagcaaggaagaccaagtctcccgagggtttgcatatgtgtatgtgattctgcagtcatggtgaatgacacagtcagggctgcggaaaagcattggtaaagtgtatatttgaggcttcagaagtttgaaaaggctagatttcctaggccaaaacactgaaaatttgcaattagaacttcagtgctgatgctgggaagactggagttagtttgagacatgcacctgtgcagaactgggcccccagaaaaggagaaggaagggaatccagaccagagtagggcctgacaccactcagactcggcgtgtctataaattagaattgcgttacaattacactttgacattttagtggtttttaaagtgcccagcacaagttaatttttcattaatgaatcctttattcataaaatgcttagatggagattacccttttgagcattttgccagtgcttctgaaattaatggggacctcctgttggaggacacagtctgttgcaataggtgaccactgctctgaatctatgtcacctctccaggaccacgggcacaaccatcacctgaggcatgttggagatgcagatggtcaggccctcctagaatctcagaatctgcattttagcaaagtcctgggtaattcctatgtccattggagtttgagaagcactggtaatctcaaatactttaaaagattactagagtaagataggctcagtaggtacctgaaggcaccatcccaaagaccagagtggtagaagcaggtggaccagcctctgaacacatttctcccccactccccggctgtgtggaaggttgccacctttggggtagtcattcaacaaacacgtgtcaactgtccactatgtgtcaggccaccactgggcactggctgtggctagctggatagacaccatttctgccctccagaaatgtcatgtccactggcacatgacaagtcactaagtcattcagagccatgggtgacagctccaggggccgacaaaggagctgtgatctcacagatccacagagaagtgtcccagggcgggcgggaaccaggactgcacagggaggggtgaagtgacacataagaagtcagcccatcagcctgaaatgctcccccaaatcttcccattcagtgttttctcagtagcaaactcgtgggaaaattggttattttacttaaaaaactcatactagaaagctagtttaactttaaaaataaattttaaaaacatttttattaacaaatcctacctttcctccaaagtcaaggagaaaagaatagaagtgaacaatggaccaagtaagcctaaaactctgctctttcccctgctcattttacagttcaagtgccattcaatttatcctggcaagaagaggaaggcatcatcaagaccttaattttctaatacatctgatctgagaagaatgtgaaagctataaaattaatttttgatcaataactacaggccttttgagagagtgccctcctaatgaattgagtacctatttctccatacacagtgtctatcatgacctacaaacccttttcccatgaggtgtaacagagagagattacagccttggaactggatgtcagactctcctggtttaagacaataagccatgacatagagcctgaaaccaacacaatcttccgagtggttccagaaacatataggggataatgttggctctgatgctgtacatccccaacaaccatcaactatttggaaactagaatttcagcataattggagttggtgttaccctagcaaatgctgtgggaagagagtctcactgtgtatcttctcctgtttaaagcctgaatttgttcagaatgtaatatctctgtttagccactctactgaaactgatctaggaaatgttcaaaaaaaggtatcccaaggatccctttgtagctacatctgtgggattcccctcgctctggcgtggcctggcccctctgcatttgacaatacggtcctatgcttttgtcttcctgggctgcgtgaacccaccctgccctggttcacctctcctcttgacccatccttatcagtgtcttgaaaggtccttctattggaggacacattctgttgcagcaggtgaccactgccccaaatctgtttcacctccccagggccatgggcacaaccatccctggagtgtgttagagatgcagttggccaggtcctccaaaatctcagaatctgcatttttgcaaagtcctgggtaactcctatgtccatgagagtttgagaagtactggtctcatgagttcctgacatacaaatagtgctgaggccagtatgctgactgggtagccagatacaagtgaaaaccttcctgttttttgcaaacctggatggacccgaggccgctgacgtgggccaggacaagctactctttttcagtgtttctgttgcatcgctgtgtctctctgtgatcaggtgctgccctccctggcaggaggactgcagacaggatgaccaagagcactctacacagcctgctctccagtgttgggggacgccacccaccctcgtggttcctgttcatctgcctacacgtggagggcccaagagggctaatatgtgactatctccacttcctggtaccctgtgtgaataacttcacttactaaagggatgttgagcaactttattaataatgaagaaagcactttggtttgacaaataatcactccattttttcatttgaaagttaactcttgttagtagagaaagcaatgtattacaaccacaaggacgtttacatggaaatgaaccatctgcaaagcatcccccattttccttttaaatcagccaatgggtggtggtgggagaaatattcaccagagtatttaacatctatcccccttcctagactgtcagctccatccgggcggagactgttggtatctccacagcacacacagggcctggcacacatccggggctcagtgagcacttgctgaatggtgaacagattagctctcctgggaacgttgttgacacatctcataacactggtttggagtggagggcattcatcgggctgcatattcctatttttaattgtattctccactggttacagcacctacagttataaagacattgttaacattgcttataggaagacatttgatggaaatgagtccaaaggcattacggttagaaactggccaggtgtcatttttgagagattagataactgttttccggtagagtgaattgcctgtttgttgcaagttgggactttgctgggctggtttacagggccaaggggaaagagataagtggatcttctagtgagaggtcatctgttttgaaagcctggaagattccatgaactaaatccaagtcttacaacacagggaagtgtgtcatactgtgcagggatgaagtctccaatttagcatgaaaacaagagctcctcacactgtcctcttcagaaagcccatacaatccaaacttctgaatgcttagctgcttacaaccatacatagattgagggataaaactctgatatggaagagaaggtaaacattttttggcagacattcccaggaaaaggcggctctcttctctcattgctgctgctctttcagaatccatttcaacagaggaggagtcaatgggagccccgtgcctctggcagatatcatatggcgtttcagtggcattgtgtgttacccttcttaggtaacagctcagccattagaagaatgtcctacacaccttctcattttctgtgatgagaggaatgtgaggtactgcccttcgagagctgtcatttgtcctagtagccagcagcgtgactgtgctgtcttctgctctgtctccctgtcagccttctgcccagccaccaccactatagttttgttctctccattggaactcctggttcagagaattaccataaaaaacagacccctagacatacaacactctatcacataatggtgactttgtcttctattttggattactgagctttcttgggtaacttccactaaatcgaagttaatattagaagaacttcctcttactagaatcgaaaagcatttaagtgatgcagtcaagtttgtaccataagtaattcagtcatttaacaaatatatatggcctctgtgcgacagtgaccttgactgggaatgaagctgtcccatgtggggcctgttcttcaaaggcagttccctgctgcccagttcagtccagtggatctgggcatctctctttaatccgcattaggggctctttactgattcttcactatccaaaaagacttggaggggagacctgagcccacttctggaaggaaatgataacaatttatttagataatctttgtgcaacaagtcaattcactgaagagatctgctctctaggagcctctgtgaccccaccataactgggaaggctctacctctccagtcttcgggccacatttctctctggcctgctgtcttcccagcactctcagccttgctcatggagcactctagtcctccgtcgaccttggcctttggtaacgtgatttttcacctggcagctcccatctggtctcactccctctttttgtccagtctgcatgacacagcctcacatcgttagtgttccctcactcccctcttactgcccaacctgcaaagtccatgcctgggccagtgcagcatgtgtcctcaatgggctgctggtggcagtggggggaaccgcacagccacgctgtgtgctgctgaagaaatgcacagcctcctaccctcgccctcaagaggcagccatggctgcgcatttctgcccttctgagctccgctcacttttggcagcagccgttccaacctgcatgggatcttcactctctcacagatgtgctgactcctcctgctgcctcccctctctgtgccttctcactctctgttccctttgccctttctccccttttctcctctgcctacctccaagccatccatcacaggacagctcaagcatcagatcctctgggacactttccttagttgttcagtctgatgaggtgtccctcatcctctcttagctgaaaatcagcagctgcctcaacttcttttccagcatgtctcatgagtattgccacaacagcatctgtcacaatgtggggtagtggctgacttgcttttctgccattcaactgagttccctcagtgctggggccagcgtgcagtgtcttgtattcagtatatagctgattaattgatgaattgattaattaatggttcacactagcacagtgcaaccttcaatgcaaagatctcatcaaaataattcacatggtgggatattttagaaggatgaccaggctagtttgtagtaagaaaaaatcaacaagactaggtcaggaattctttttttgtctacaggcttgctatagaagatattgaaaatcatctacctaattacctttattttatcaggttgtgtattaaatatcacgtctgggggaagaaaatgtgatatgtgattacagacctttcctggtacaacatagtacgtttcagattaactcaaggtattgtggtgatattgcggtcaaagccaggtgattaaagagtcattctttgaaacaaatatctgtgcaatcaattaagaaattaatttgcaaattttatttgcttagagtaattgatatatcattccttttacaaacaaatataaagaaaacttaactaaaaatactgcatatctctttcagattatatatcccagaaaggatatatttttctcctttctggtcttcctttttggtgtagcatctgtaggaaatgcatttcttcatagctaagtgtacctccttgtgaaatatcttcagagtctactggtgcacataagcaattgctggcagcagcttgagggtctccatctcacatttatcatatgccttattgcatgaggctttgcaagaggaggtctagagctacaatatctcatggatatgaatgtcaattcaaatcccagtggcagtttatgagggggaaagcctagaagagaagaaacctagaggaatcaagcaggaggggagagtaataaaagactagagcagcaggtttttcttaactcaaactagaattaaatctctgtgtgtgtgtgcatgtgaatgtgcccgtatgtgcatgcatgcacgtgtgtaaatggatgtgtgtgtgtgtgcatgtgtgtgcaagtaagtgtgtatacgtgtgtgggcatgtattgtgtacatgtatgtgtgttttatgcatctgtttgcaagtatgtgtgtatgcacataaaagtgtgaatgtacatgtgtgcttggtgtatgtgtgtgtattaatgtatgcgtgtagttctagagtctagttagagaaagtgcataaagaaatagggaaattaacaagaaagctatagcttaaattataggaaaaacttttctccctatcagtcatggttttaaaatgttcagacttgatatgtttcccagtgctattgtcagaaaatgtccctatgacattccatactacttcaatcaaatctaaaacctttgttccaacatgttttattgatatgagtatatttcaaatttctaccaggtttttggagaggtattttggccataaaattgactaaattattcaaaataaaaaatgaataagcctgggccaaggcttggagacttgcttaactcagttcttaaattttcagattttcaaaattacaaatttaagctctaaaatcatggtgctgtgtatgatattctttgattgcaacttatggttgaaaaactatagagggctttatgctaagagttgtggatcttaggattttcatgaaatctgcattatcatcatctgcaagtttagatggggcataactgatccaaaggatggatccctcgggggcaattcaactggctgattccagccaagatgacaacagtcaggatccgttcccttctgatcatccattgggtgccctgatttcctctacagccctagctgaaagaccagacactatctcaggctggctgccccacatgccttgctccacaccaaattcacagtctataaacctgagcctccagtgctcctactaccatactcactcgaacattcccgattctgacctggagatgtcaacagctacttgatgccactctcttctatctttctgtagctaagccatccccaagtttgtcgattcaccctctttaacccctgtcggggtgtccattgtgccccttcaccctgccatctccctggtgcactgttttgcaaagttcagcatacatgagcgtcacctgggaaccttaataaagtgcagatgttgattcagcaaatctgggatgccctcgggctgcatttccagcaggctcctggggatgtccccgctgctgtgctgcagatgacactctcagtggtgggactccaggctctgctgtcgcctcctaggggtttctccacactccctggaggcctaatgggcccttctccacatggcagtaagatctgtttttgtgtttgtgtttcaagttgggagaaggagattatttaatactaaaatgtgcaacatgggattgagaaaactaattattagtcataagttgagtatgcaacattgaaaccacatgctttaaaaaattataagaaaaaatcatagtatttgaaagttacaagctattatggctaactccatttatctcagttagagaagaagagtcacctgtcaccagggcactgccagaagccaggctcatttccaacagcactgggtgctccagctttggggtgccagctcctcccataaagcaaacacatacctagggatgatatttctttgcaagggctctgccctacagcttgtacatctcaagaagttatgtaattaaactgtctgttttgagaaaattgtagattcacacatactagctgtaagaaatgatgcggataaatccagcgtaccagctttccccacggagacgtcttgcagcgtcacagccaggatgaggcattgacccaggcgaagtccagagcacctgtgcgctacagggccccttgcactgtgctgtcacagacacgcccacttccagatgccatctaggaccccctccaaaaagcagaggcattcttaaaaacacacatctgcacatgttcctcttcatttgaatctgtcagtggcttctcagtgcctttcaaatgaaatctaaagtccttacaagccttgcagcaggaacctctccatcccacttcccctcacactctcagcttcatctctgctaggctctgttcagccaggcagcctttcacagtccctctcctcctgccctgccaggaaggtcccctgcccccaactcttccccacatgtggcggggccccgcttgtccttagaagcccagctgaactgcttcctgaaggaacccctccagaacctctcagaccaggtcaggtttctgcactcttagatcatccccatggcataatcacagttgtgatgttgtgatgattcagtgaatgtctgtctccccactggatggtaagcttcctgagggcaggaacagcattggttccagtcaatgctatgtcccaggactgttcgtttttgcacatactaatcctaaaaggacgatgacaacagcaaccacttacatgacctagatgctcttctgggtgttgtgcaaatattaacaatttaatccttgcaacaatccacgagggaggcattcttctactcccacttaacagacaaggacagtgaagctagtaaagagaagtcatttgcccaaggggaccccactactgttggcagagctgggtgcaaacgcaggcttgtgaagccaggacccatgcattcaaagaccatgccaggtgcccccactgcacacctcatccccacataccagtgagggggagagaaatgctcctgcactgcctctgattaactgctttcctagaagtcacacatataaaagggatttaattctagtgggattgaatctcaatagtttccttattaggttgatttctgttaatagtttaagtactggatatacatgaattagaaaatctagattattagcaaatgcaaactataaagtattttataaatgttatcttgtttgtcaggggatgagtgagatattcattatacaaaaagtagtgtggattttgaggtagaaggtttactaaggatcataccgtagtatgaaatagccacaaacattcagtgaaaccaaacacccccgcttaacctcaaactaacactaaataataaggaatagacttgggggcagtgcaagtgtatttctaatggtgaaaaccattccccagtgaaaactaatgtaccatctagttaataagagctcctctgacccacgcacatcaatacttacatcccaatggtgatgtgacattttgggttttgtatttcttttgcaaattgagctagcatttttgatgagtggcagggctctgctacccaacctttggacagtttccaagcataaaatcacaattccagataattctgtcacaaagatctgggtctcattaggaaggagaggaagctgggagatgatccagtccaacctcccccaaaccaaacatcacggccttctcagttgtttcaccaaccatctaaatgttttagtaattctaaaaattgatgcgctttttccacgaaaggaagtgttaccacattttccaagtgggaggcatctatatccttactccttcatcctctccttcccaccccctcaccccccaccacccacacaacatctgcaattcttaaactaaagcacaaattgttacaaaagttaattgcactttcaaaggaatgcttgtatagaaactttctcggcttcaaggaaaaataatacgctttgaatggctgttcaacagcatagaaattagctgagtagaaggcactcatatagccattaggaccaatcctttctgccgccaacaccccccttataaagacttgacagtgggccagaataaacaacttcaggatgaattcagttgagacacaaagtacacacttccagtttttcccttctctggttactggcctcaataaccaggcagtcaacttaaaaagaaaaacaaaagcttgcttcagattacagattgcagacttcttataatatgtccatttcaccaggccccgctctcagccccgggaaaggccactggaaaccacctcacatggtagggccttgcgggagccagtaataaccttatctccgtcaacatgttctgtcagattgaatggggcagccagagaagccagagttggcacaggaaccaaaacaaaggcttcccatcctcctggagtgagcggttgagcctggattggtgcttagacctataatgggtgcaagcagcgttcattcatagtggctttctagacccagggacttggccccagccctgctgctccactcctcttcttgcttcattaccacgagtctcctagaccaccgaacgatgcctgcatttgaaagacacttctgctgatcaaagcagctgatgtgtccctttgcggttcatttctaattgtccccaaggaggagaaattcaaatagtttattactgagagttaaagaaatccactgaaatattctttggtctaaaattactgtcatggcggagcagcttcaccttagtcattgcccttaaatatgaaagctatttaagaaagtttgcccttaaatatgaaagctattttaaaaagtttaatgaaagaagagaatcacaaaacattttcaaaaagcaaaagaaaacctaagagaaaagttgaaagtaggaattttttaaagaatatacgacgtgtgttctgtgactcacccctgcaagttatttgtgtgtattcccttgcatagtaattaataatgaagcaaagcatggcaatgatatcttttcttgtctagtattctagaagactccatgtttttggaaaatatcactctagttagatctcaaatatattcaatcagaaaatgggttttctacaagattctatatctgtagtcaatagcaaatataattctattaagctagtaggatgtgataggaaactaaaacctaggggagaccaaagcaaggaaaaatacttcctcatccaaacttgagagcaatttaccgtcaggcctactattaatagatggaatacagattccattttcattactcaactgccatattcattattacactgtacagaaaagggaatcacatctgttgaaaacttatatatgatgttcatgcatgcattccagtaattcaacaatttttatttatctttttattgcttgctaatttttcaaaataataagctaaagaaaacaaaatgtttgtgctgttctcagatgacatgttatctctttaaaggacaaaatgtgctgtgaaataatagaatgctttcagcactcaagtgtgagtgagtgctcatacatgagagaaagccgtggggactacagaagccaagaagcagatctagctggggaggcctttgcagaggatgtagttgtgtggagaggccacacacgtggaattcccaggagggctgtggaggcggggaatctgcaggaaagcactggggtgagaaacgtgatgagaaacaattattgtcttaaaatatctgcagggctgtaaggtagagaagcaatacgttgcatctgtgttaagtcaaacaaaattatcaagggactggtttcagcttaacataaggaacaattatgtgatagggttgtcaataacaagagtagactgcttcttcacacactcctagtcactcagaatggtccaggaggagtggacaaccatttggtagagtatgggaaggcaggggccctgggtgggagtggtgagggtagggagtgagtatcccaatctagaagtaaattgtgcccagcacggagctgcaacactgccctgcacacaaacacacacaaataacaatccccagcccctgcatttccctctccggtttcaggaccttgtatcttacttcaattcctttatttagctgatgatgaaataggaagagcttagcactaagaaaatccttttggagtttggccttgggggaaaatgaatcactccaaccaggtctgtcttctagaaagtataggatgaaagggctcctcatcacatacttcctgacctcctgctaggcctttccctaaaacaggggctggcaaagcacaacctgtgggtcacgcctagcctgccacctgtttttgcaaataaagttttattggagcatgactatatgtatttgcttacagtctgtggctgcgttcacactatcccagcagagttgaataattgggacagggaccatatgatgggtgaagctgaaaacatttactctctggctgtattcagaggaggtttactgagcccttctctgagacatggcaagcgctgcttcaggctcatgcttcactagattcaggcctggggcagtaaagagccagctcaggatagcactcccgactcactcattttttcaggcaggggagccatctaatgtcaagtgcctacgtgcaggaactggtctgttaattagcagctctcctcatggaagggataatatattctagaaacaggagtgcggccctattgcaagaatgtcctgagccaaaattaagattcttctatggcagaaacttggctggggcttctcctgagttaacttggtagttgttagtgatttttgagtcagtttttccttgtcaacgaccccaggaatgagtttgggattacagggtagccagggaaagggaaagcttcacgcccgcccccgggacaaggtctgtcttcacactgctacatcccttcacccactttaaaatgaaacttaaaaggaggatttcagttgagtaggaagtgagaagagggctcattttaaaacaagcgttaaatgaaaacccacacacactcagagcacacaaatccaaccacgcttacaaaaccatcacagagggtcaggcgaggcccttttctaaatgaaaaagaacaggggtggagactgttctgagagcatgctgggttccctgaagggaattctcagctgtatgtgccccgcacaggatccctgctagacacaaggccagctgccttcctttcaagccgcagacgcatccctgtgtccaggcgggctggtcagctgcggtcagcaccagcttccccgctccatggtgaggtcatcacaacatgtgagcaggagggcaggccggcaacctctgagtgcttagagaaagggacgggattcctcctgtgcaacccctctagtctcactcagactcaagtctgactaaggggccaggtgctttgaccagggactctcccctctcacttccctcccaggagtcacaggtacatgagtccttgttttacaaatgaagaaaacagacccaacatgattaagatgttgccttcataggggtggcaccaggattccaaaccatggactccactgagcccagtgcccactgacatgtgccagtaacagtgcagctgcctgtggttctgtcgactaaactgccggcagaggctggctttccaccttctttttttttttttcactcttcaaacactttatgacatgaacataaactactggctgcatcgttctgctgacaacatgacatgtttctataacttgaaaaaagcaagcagtggactgctcattggtaaaattgagtcagtaatcttttaggaaggttatttttcttccttttactgcttctcatctgttccccgcagtaaagaggacaagatgacgacgactcagggaacacctccagcctgaagcagcaccatgcgagcttagaccttagggtcggcttagaaaccacaggcggggcggcttgggcccctcggacactccctctcgaagctgcttctccccaagctaccccaaaggcactgagcgccctctgccccccagcaattcaattcactggctgtcctgctcctgtcagtactgagagttgcatgtttgaccctcgggggaaaagtccagaggccctggggtgtccagcatgctctgaggtccctgctgctgaccccttgcgctgtcagcattcagagacattcacacagcacagcctcccaggctaacagctgtcatggaacagtggagcagctagacgtggccattctgtggcccagtgctgcagaggtcaaagggacaagcgcagggagcatctttgctttcagaaaaaaaaaaaaaaaaaagaagcacactggtgcactgacctgctcctggtgtctttgtgattgctcttttctttcgatttttggttgtctttttttttttgaaagaggggcttttatgcttttttcctaatgttcatgggtaaaccaatgtaaatgtgtgtatgtttatagagatggctttaaatcgcaattctgcagtagagattgattttttaaaaaacatgggtaaaaattgaagaaaaattttaaaagaacatttaaaccatcttgggctaggggtggatatgcaccaccccacggaagccaaacaaaatctctctgcagataaacatttgcaaaaagaatttccaatcccaatttttgagtcagagatcttttatttccttgcaaattacatatctgtttcaggatttttgactataagaagaatgaatgaagatgtgtttcttacagataactatgaacaaaccaggaaggataataacttgtatcccccaattcgaatccagaggatgggaaggcataaaaaaaagaaatggaagaaactttatttttagtggtaaatggtgggactatgtattttacgtatggtgaagtcaccaagcccaacacttggcacttgtaggcaaggtagtcttctaatctgaatgtgaagtattatgttttcatttgcttggtaatgaggaatattggtgctttcgtcccagttctcgagctgactgacttctctttctgacgtgtgttcctttagcacacctctacactgcatggctctgagatgtcctgtgactgtttcatgtgtaaagttgcctccccaaaggactcacatattccttcagggcagtgagtacttctgattcatccttagcagctaccttcgcgctactttactagatatgttgtagttgaattaatgaacaaaagaacaagcaactttggtgcctggtgtgcatctcagagcagggtggagtgagcctggccaaagggtcatcatgcaacctctgtggctgactccatctggccacggagcttctcagccatgcttggtattcacatgacttctagggcgacagctcaaccagcaaataaacagcttcatatgggaaatattactcagcctttgtcatcaaggagtgagtcacgggcctgaactgaatagaagatagaggagaaaaggtgtgtggactgggtgagacagcgcccagcgaggtgaactcccggcagccctgcctgtctttacctgcacatcaccttgctagggtgccttcggttgtgagggcctgtctaggaagagaagagttgcaccctggcaggcagcactgagctgtctcatgcaaagctgaggaagaaagagtgagctgcccagtgagcctgctggggtggtggaggctgggctgggctgtgcagtctgcagcccccagcagcccttggcacctttctactgcctggtgctcaccagctctccagtaacaaagagggacgtgaagtcagaggggaagggaggtagcacagggcagtcttgactttgaacaaagagctggcttcctgaagtcagctggccgggttttgaagccgattttccagcagtgatctttgatgccaaccccatttaggaattctgtatctccccctaccttctaccagatgtctctgagctcacctttggtgataatcatgcaatctccgtcatccccacgtccacactgccccattctgtcccaccccgggttctgtggtgctgtcggctccccagcgagccaggaagggagaggccagctctgctggggctcctgccgccctggctctgcactgcccttctctggcaggtctgaggcgccactggaggagccacacggccctgaagcagcaaggcagatgccctggacacagtggaggcacagagtgcaagcaccggcctggcccacagacttttggaggggaagtggtattattcagttcaaaagtatgcctgtgtgtaaagagagagcccctgaacatgagtaagcaaaagtctcagcgcagagattagacaagtagaatgctggcccgagaggaggcgtttactcaccctctgtctaggaaggaaagccaggcccagcacgctcactgctatctatcctctcacacagagggattttgaatcgaagccagcatcctgtcctttctccaatgtcccctgctcaggagtcaggactcagcaaggcccaccccagccacacacagatacagttccaggactcagaactcagcgaggcccaccccagccacatgcaggtccagttccaggattcaggacacagtgaggcccacccgagccacatccaggtccagttccaggactcaggattcagtgaggcccaccccagccacacacaggtccagttccaggactcaggactcagcgaggcccaccccagccacatgcaggtccagttccaggattcaggacacagtgaggcccaccccagccatatccaggttcagttccaggtaaatcatctgccttcctccgtccaaaagccttgtttcctgtgtgtccttgtgtttaaaatggaaacgttatgagaaactgcctgccagggcaaagggtgctgcccggcacacagtagggactcaaaatgaaactattgtattgaatacataacagatcaacgggtattgctttctgaaatcttttttagcccaattttgtttcttatagtccaataacaggtcaaattcatttctgatttactagccattcagttgcccataaaaaatggaaagtgatttaagattattagtttaaaaaccaatgaaggtaaaacagttatcattgaaggcacataggcagaaatagattgcaatagttgctgccatgtgaagcctcagtgtcatgctccatatttagagagatctatgatttctgaggccctttcatgtccatgatctcagtactgctcacaactgccctgtgaaattcgccgagctggccccatgtcaatcagagtacactgagcactgagacccagcatgttgagataactggctagagatcatcccataatggtaccatcacaatcttcacactgtagaagtttgatgatgtcactggaagcatattccacagtcccttgtgaactggccttcctgtgatcagaagcatcagtgaactcccaagagggtgggaactcccaagaggtattctcactctacttagtgtatattttacaaatcacaagcttggctttggattcttttaatggctagaaggagaatcatggggttggaagtccaccagtttgggtattctgttccctaactcaaaataaagagatgttattttcaagtcttctgcttgttaacttaattagagatacatgagtttgcagctgtgctgggcatgccgcagcttggcatgtttagtccagaaggcatattataatgtacatggaagattgtcagaaattcaaaaggactttttgagtatcacatgtgtattttcaagttccaatatagattcacattcagtttgacaggtatctttggatgcctatcagttaagaactatttattagttgtggaataaaatagggtaaaataaggaacaactgaggaaaaaacataaaatttgctttgtgaataaaagttgtcttcaaaattatgactttttccatcccacaaaagttttgattaaacccacaatgaaaatttaaataagtgtatttactttggtttaaccacttatttcattatgactcacaactataggttttctagtttccattattacaaactattgtgtggtttaaatcaatttcatagactagtctagttctatagtcacaatttataaaatttttttatgtggtaaattgagtgtcttcatagatgtacatgattatttctcaatttttaaggaatgtattttttaagatagccttctttagccttctttaacactgatttttgtaaattttttacagatttttttaaatttttggtaattttttagcataaagtaatacatggtcactatggaaaacataaaaacacaaaaactatgaagagtaaataagaaaaacacccagaaatttaccattcagaaaaggtcattgttaacaacacggtgtatcttcctcctgtcatgcttccgtgcatttgagcacatttgagatgtgtatacatgttcactttgagattttagtatagcaaaagaaatgaccggtcctgattcaatgaaacctctggcaaactcgctatattttccttacatatttttaagttcatcctataaatgaactatccattcatcttatttgagattttcttaaatctttcagcaagaaagcgggaaaaaaatcctcctctggcctttaaagcctaattaaatatatgactaagctagaaatattttataatgaccaaccagaaagtggcaaggactgtcactcttcccatacagcccacctcctcctctatctccctcaggcacacggaaacgagaaaggcagagaaacccaggacaagtcatccaagactttggtcacatggccatccattgctttcacaacaaaaatataaatccaacatgtgtgtgtgcatttcataccagtaggtccaataagctatctatatatacacatatgtgtacacacacacacacacatccttacagacactccccagcttactacagtttgacttaagattttttgactttacgatggtgtgaaagcaatgcacattcaatggaaaccatacttctaatgttgaattttttatcttttcttgggttagttgatgtctgatatgttactttcttgcgatgccaggcaatggctgggagccagagctcccagtcagccatgcaatcaagaggctaaacagctgatactatacagtggactgtgtcaccagcattttggggatattgtgttttgtgtttttgaatcctatcatgtctacaaaatgccattttcgactgctattttcaatttagggtgggtttatcaggacataaccctatggaaagttgaggaccatctgtatatctggtagggaaagatggataacaaattcataggcaaataataatttcatgattattattaagttattcctacttaataataagtagtgatcactgccagggagcagagaatgcaggataatgtgacagatgtaatggtgggtacttaagctaatgtagttgcagaacaggcttttctagagggtaggcctttaagcgtacctcgaagatgcaaaggaagcaaagatgcgaagatctgggctggggatggaagcagagacaacttggaggccaaggggagagactgacaacagcccagctcatacctcagcagcctttaatgcatagctaagaaaacaacaaattaaaacaattatagtttacttagacgattctaagtgtctaagtggatttgggcaaatctggagaaacttgttctaatactgtgtcttaataagtaatatagatttgcccaggcttgtgggcagagtggtatacaccccataatagcagaggaaggccacagggcctaccctacaaaaccagaggcatttaaaaacttaaaggaggcagattgcttttattttcagttaaaataaagtgaggagtttctcaagaaaaataataacgagaccaccggcccgccctagatgtccaacaagaatgcacagataacttcgtatatccactttcctgaacctgcccctgacagccaagtggagcacaacaacagagatgaacctcaaaactactgtgctgtgacataaggcttgctcaagaggacagtgtggtgtgagtccatctatgttctaaagcaagcaaagctattctgtagtgaaaatggatcaggacagcagttgcctctggtgtatgggggcagggatcgactgggaggggcatgagggatgacagttagggtttcgatcatgacaggaattcagattactccagcatgtgcatttgttaaagctcatcaaatgctacacttaagattaatcctctcacagtttgtggatgttaccttaaaaacaacaatgatgactgcaaactaatattgaactctggttagtgatataccaatgtgaagtatagtgatatctctactttactttaaaatgcatccaaaggcagactagaggaccatatctgacagacagaaaaatagatatgtgataaggtgaatgtagtaaaatgctaacataaggatgtttgcggtacaattctttcagcttttctatacatttataaatcataataaaattttaggacaaaaagttagtgctttgaagtcctaagtcatagggcctgctgctcttgatgcagtagaatttgtcttcagatttgcaaagggtaaggcaaaccactagcattttgtatggaacttgatgcaaatacttttaattgtctggttttcaaatgtatagacttaaagtaatatcaactctttctttgaatcaactactgaaatacctagtcttaaataaatatttttatgtaatccttaaagtactatgtattcatttttctttcttctttcttttctggtttgataaatattctataaagtaactgtgtttaatggccaacatttgagtaagtccatatgcagatccaaacatctcagtttagacaataacttaagacaatatagagtggctgacatcccctaacgtgggtccagatgcatgttatgttatgtttctgttgcattctcaatagttaactttaataaaagaaagtcaaaagcttatatattttttcaatcttcaaaacatttctgggaggttgtcttagttaattttatgttgctatacccatatcacagactgggtaatttataaagaaaataaatgtatttggctcatggttctggtggctgggaagtccaagagcatggcattggcatctgcttggcagctggtgagggccttcatgctgtgtcaatctatggtggaaggtcaagagagcatgcatgtgaggtggtggggaagagaaaaagcgggtttaactcatccttttatcagggactcactcccgtgatagctaacccattcttacatgaatggcattaatccattccttagggcacagctctcatgacctaattataatacctcttaaagtttccacctctcaacactgttgcattggtgattaagtttccaataaacgcactttggaaaacacattcaaaccacagcagagatcaacgttattgtcaccattttcatatttgaggaaagcatggcacagagagcttggagaagtacttcaaggtcacccaatgaggaagtggctaaacaaaaaccttatcttaaattaattaaaaacctcttgctctttgcagttttgtcttaaatctacctaatttgtgactgtaatttttaagtaatttactcatataagtggtctcacattaaattttctcattgctttatatttctaacatgagatatttggtataaggatggaaccaagatcataccttgttttaattagaaaacctagaccaagtcattgtgatcctcatcctagatttcagttaaatgctgctgtctccttttgggtatgtgacaggggaaagcctcagaagaaacaaccttatgtgttttcttttgatactttagtaattaacccaggatagtattcaagattgacatgccttatattgaatcaaatagcatatcaactgccttcttattctcaagtatagacatgttgggtaattgggcatttaagtttctttgcaattttttccattattaacaaaattaatgagcaacattctgcataaggtctgtttcctcagaatacgtttcccaaagtggaatcatcatgacgtagaatttaagcatacttacttgtttaaacaaattgtccagttgcttcccaaaatgttttgtgaattaagatttacatcaagaatatgtaatgttgttactgtctcccaaatacaggatctttttctgaatataaaagttatacatgctaattgtagacaatgaagggtcattatcctcatagataatgaagtgcttctaatacttgtgcttttattcatttattcaaaaagtgctaaataagccctgaaggggcttttggggggtcatttggggcttatttagcactttttgaataaataaataaaagcacaagtacagtttttttaaaatactgttttctataatagattaatcttaaatggcatgttttcctttattttactgacaaaagttacttactctgtgattgaataataaaaattctttggttcagctgagagaaacttgcaagctgacgtccttgattatttaaaatgaaagcagctgcctgttttcatctctctgcatcctgaggaaactcttctgcaacgtgttccagccctaggttctagctgaccctgttcatctgtttggcacgaggggcccaactaacacttgcggctacctggacgacagccaatctagttggaatgagagttagaggccatagtctgtcagctgggaaagcagcttttattccaaggtgtgccaaccgaaaggccacatgttattgtcacaacctggtacctacatcagtgctgacatctttaagaaccttagaattgggaaatcagtttagccctatctgcatgtgtagccgacaaccacacaattgttccaacttgaggttgcattcagagcaacctcatttcccccatactcctgaggaaaagcagaccagagacgctgggtcaatccagagttatggttggaaaaatgatggaataattctgcccctggtgataggagagagggactccatcttgtcaactgtcatggttcccatgtgaaagctatcattatcactgaaattgaatgagaacacagaagggaagaacagggaaatccccacagagttaaagaggatgtgaagattgcttcatgtttaatgtttgtgtaagtgctttgggttggttatgtgctgtctgaacatgtgctcatttccatggctcattgagagggcagacagtccaatgatactctttagaatcattcccatggggaaggaacaaagaagcctgtaaaatagaaatgcacatgtaaaaagcattgaagaaagtgccagtgtattgattttggccatggtttgtgctctaccacctggttactgtgattgcagaagtgcctttgcagatgaggaagaacctggccaaggctcaatccaacatccaaagccagaggccatatttcttcactcttaagataatttgggttcaaattatagtccctttacacactctctgcctcaaaaggcccaagactctcttttgttatgcttgcctaaacatgcctttcaaagaactagttctgtaaatacaactttattataaacctctcctttgcttttaaaaatggatcaccacgtccatttctatggtccaactttgtcccttaatttaaaattttttcttggattaagtttgatgccttgaaacattaggaactcaagcatacaagattgtatgctggtggtgagggaagtaactgtgcctccgcctgtgctgggtggatcaacatggagtgtggacgagcatagggatgtgtgggtttctcactagctgagagtgtttttaaatgttgtattttgatgtttgttattttctgaatattctacagttagacctttgatttattctttgatgcattcatttgaataatatttttaatctccagccagttaggtttttaatttacacttttgtccctgattttaggtgtagtgttgtgtacactactgcccagtgtatgttatgtttgtaaacattcattgcacgcacaacaatgtgactcacaatatttttgagaagtaaaaagttcattatatagttattaactcaaccctacagttatattcgtgaaataccttgtgaaatttattttttgcctactggagctcttacaggttaatcctgtcttcaagattttcatagaattttcatctaccacccacccctttaaatttcaacatttttttattttggcattttaatgcaattcaatgcattatagggacaagctatctcttattatgaattgcaccttatataaacttaaagatcttttatcacaaatttctttgctgtgtcctttagtgagaatttgtattatcagtcactaaagctcactaagttagtaagctttgcgcccagatgacctgggcaggaatgggtgagtctctgtgtggagagagtgaagaaactgctacccttaatacctggaccttgagggattgttttattttagtttttctgcatttctcagtatttcatgtgatatctgtctttttcttccagtttgccaaggcacgagtaacaagctcacgcagttgggcacttttgaagatcattttctcagcctccagaggatgttcaataactgtgaggtggtccttgggaatttggaaattacctatgtgcagaggaattatgatctttccttcttaaaggttggtgactttgattttcctacacaaataaaattggagaaaatctaagtggagaaaggcctgggcagaattccacttgaagtgtgtttatttttgctatggcaatgacaagtcttacagagctacaaacgagagttttatgagaaagccattttaccagctaatgtcaagtaataactagaaaaggatatcaaatagaaacaggctaatctggagttccatgtcatcatagacactgacgtttatccctgaccattacctcagtcatgatgtgctgccatactcgctcttaaaaactttttttaaaagccctgctttgcaccatttgcctattcccttagtgtaaatactcctactatagctgatttcaaggtaccaagtttcactcagctggtcacagaattcttatttcacgataggcgctaatgaccccataggagccagctctgaaggcttcagagtttcactgaattttggatggggtttacttagccttcttctgtttttcttttacctttcctttttaaataagaaataatgcaagacagatacaaagtaattctttttaatttccattttcactggagagtgttgaaccccgtgaggcatgagagcacagtgttccagaacaatgcttactgctcattatcacaggggtcaaaggctaacgtgcagggattgttgcagatcgtggacatgctgcctcctgtgtccatgactgcaatcgtctacctattttacagttgttgagcactcgtgtgcattagggttcaactgggcgtcctagggctccctggacccattttagaccttgagttcttgagttcctcaaaagagaaatcacgcatttatgttttctcttcttagaccatccaggaggtggctggttatgtcctcattgccctcaacacagtggagcgaattcctttggaaaacctgcagatcatcagaggaaatatgtactacgaaaattcctatgccttagcagtcttatctaactatgatgcaaataaaaccggactgaaggagctgcccatgagaaatttacagggtgagaggctgggatgccaaggctgggggttcataaatgcagacagcagttccgatggctcccagcgagcttgtcactcaattccacctcggagaaggcttttatttttacccagtacacgtgcactgagtgccggctgtgtgtaagatactgcaggggaagttactgagaagatggcagatactggaatgggaagatttaagcggggtaccagtgtttacatggacatgaaaaaatactgagagatagtaagaaatcgtaaagattctgagtaaaagagagtatgaccaaacaagctgagcaggaatcgtgaatctatgtgtgtaggcagtgaataaactgccagtcttattacctggacctcaaggataaaagacatacagtaaaaatcaacccacattgaggacagtttcgagagtcgcgctgctacacagaaagccctgtgtaagttaaggatagagaatgaggtgttctagaactttgaatttttgtgagcaggactcgtgaggttcctgtgagaggaaacaatgaaggatgatagaaaagaagggaaattgattttaaaaaactggagatagcagtgattgtgcctcactgtgcagtgggtttggggccaggaatgttaaattggtaacttcatttaacgcccacaacctttcttcaaagtaggcactgtacagatgccccttgacttatgatggcatcctatctggctggaccccgccgagggtgaaggcgtcattaggtcggatttcagggctaattgaatgtatattgccttcacaccatggcaaagtcgaaaatctgtgttaaatcatgctaagccggggactggctgtgctctgccatcgtacaaataaataaatggaagtcaagtaactcccttgagggccccagctagtgaatggagaggccagctatggccaccactctctgccccagggcgctcaacgcccctcctgtgccatgcagttctgacagggaggcagtgctggtaggaaaggggtgtgatgaaaggggtgcccagcagagggagtcatatccggagtgacaggagcccaacaggggtgcagcgctggaacccaagccagcacctctggtcatggctcctcagttcaccgcctataaaattgtgtggttcccccacaccccttgctgctcagagcagccgcgcacatgcttgtgctgtgcgtgcctcctgtgagatggcctggtacaccggttcctacagtgcgcctcacacgctgtctcggagggaggcagcctgtgcgggtgcctggacctccgagccagaccctctgggttcctgcctggccccgtccctcagcagccagatggctcgggagcacattctccaatccctccgtgtctctgtttcgtcatcttcaaaaatgtggatggcatagctgctaaaaaatggtgacatacttcctaggtggtgcagaaaattaagtgactgtaggaacaggcctcagcagctccttccacttccttggtatgattgttttttaaaccaaggctgggattgtatagatgcagattagttaatgtgataccattaatagctaacctagtgcctgctgcagggtgagcctcccctaagccaccgggaagcggctcctgcagcctccctcacgtgtgctggccctcctctggcagtcattgcctgtggtgtgctgaaggcccagctctgactgtgcctctgtgctctcctcgccccgccccctgctctctctcaggtctttggtctgttgtccgagctgccacagcagcctggacatccctgttggtgtttccagccctgtcctctcctgagttccatccacctgtgcatggctttttcatgagtgttttcacggatggttctgctgtcatctccaacctgataaacaaagcaccacgattcagcccttatgaccccaagcttccttcctcagttccttgcttctgtgcatccactgaagaagcctgttccactgtttccctgcactgggtctcctgtctgcaggaagccttcagccctcacttccacactcctctaagatgtgtgcctgtgcccttctggggaagctcattttcctagcagcctccaggatcttcaggggtgaatccctcctttcccacgttggtactctgtacacacaacatgcccattccctgcctggggagctgggcattgcttcatgaatcagaggtcaattttttctctattaaagtcacagatgctcattgcaccattgtgagaatgaatgaagatagtgcttataaatcagccagcaaggtacccagcctcactgtgtcagggtctccctgggcatgaggtggttagagtgtgtgacatgtctgtccccaagcctgtcagctcccagatcgaagccagtggatctcattcatcctcgcagcgcccacagcacttgcacagggttttgtacacataagtcattctgtcaatgttcatgtttaatgtcatcagtggaacactcccactttgtaaagacttgaatgtgttcatccctgacttttccacatcttgttagttcttctttggaaacagctgtacagtttcaccatcctgtgcatccctggagtctacctgtctctgtcatacattcagattcttcttgtttcgtgtcactctcatatccttttctctaatgaaaagctccgcctgggcatgcaaggtggagccctggatgccagcccctcacctggcatccagggctgtagcactcaggaactgcctccctgccctgcctaccccctacatcatgcgaccattccagtccagccaatcagccccttgggacccagcttaccacatgcatatcatttatgctgtgaccactgactaaaccattctcttccttcctccccatatttctaaatttctaatcattgctcaaagcccaattcagagaaaaccctagctcctccatggcaccatcattaacaattttatctggccgccccccgggaagttcactgggctaattgcgggactcttgttcgcaccatggcatctctttagcagaacataaatgcgaagagcacatgcatccttcatgggaatttaaaggagctggaaagagtgctcaccgcagttccattctcccgcagaaatcctgcatggcgccgtgcggttcagcaacaaccctgccctgtgcaacgtggagagcatccagtggcgggacatagtcagcagtgactttctcagcaacatgtcgatggacttccagaaccacctgggcagctgtaagtgtcgcatacacactatctctgcctccagctcctatgggggacagctctacagcactggggcaggggagagaagccatgtttagtaagtcacattaatcagaaacaaaaagtagtaagcaaaatatctgaccactagaaaagcatgtatttaccacggacatagagatcgtttttttgtggcgggtggcagcccagctggttggcagtgcaggccaccggaggcagatcccctgcagggacagcagagcacttgtgtcctgagaagagctgctgttcatggggctggcagcaccagggcctctcctagcctgccctgctgacactggccagactcctacatgcttctgagtctccagaggctacccggccctcctgaagcaccagggctgaatccacccccagctgagggcatgaacactgccacatggagtcacacacacagctgggcactgccatggagaggaagtctgtccatgtttccttgaatactggtggcctggtccctgtcccattccccagtgaggcagcctgtggggaagcctggcagggaaccaggcgcaggtcagcgtggcgccctgactcaggccagcactgatgggggactctgagacgcaagctcacactcacccagctcccctgggctgcgcccgttcctgatcgcttggactttctgttctttagagtaagaagtgatcaccatttcctgcttctttgtttctccacaactgtgcagtggatgcctgtttgttttctgccctcagaacaaaaaaaaaaaaaaatagagctgacgtgaatcttcaaaatcatcaactacagggctttggatttttgtgtatttgttttattttcattttatggatggattgtgatgaaatgcccgtaatacaagattttccatcttaaccattgtaagttacaatgtcagtggcattatacatccacatgggtgtgtggccatcaccaccgtccacacacagaactcttttatcttgcaaagctgaaactctacccattagacagtaactctctgctctcccttccttcccagcctctggccctggcaggcaacagtccacttgatgtctctatgaatttgactgctctggggctctcatacaggtggaatcatgtagtatctgtccttttgtgtctggcttatttcacctagcaaaatgtcccgaaggtttatccatgctgtagcacgtgttaagaatgtccttcctcttcatggctgaataatattccattgtatgttgacactacattttgtttgtccattcacctatctacagacactggggttgcttccatcttttgactgtttgaataatgctgctgtgaacatgggtattgaggctctttgttttatagacatattattccaccagatacccatcctgacacctactatgtttgcaagaaactgaaagctttattttacattgcaaaatttcatattatgagatcaaggttagcatttcctcagctgtctggtggacaatggggaggttaaactgtgcacattttatttttttttaatgaacctggaacggttatggggccagtgtttgccatggatcaggtcaggcagcccacaatggcaggtctccatgttctgtacaacaactgtgggaaagacccacagagaaagtgctggaaaggggaatgatgggtaggttcatgcagtaaaaagattcaaatactacagggcattgaactataggccaatatagcattgctttaagaataaacaaaaaataagacagtaagaataagcctagcaaaatcaaaagtctataaagaactgacatttcaagccaataagagaataattccttattcaataaattgtctggaatgacttaactattaggggtgaaaatatcaaagtgagagaactataaagggtttttaaaaaggaattaggtatgttgggttagtcgcattggagagtgcaaattcaccatcgacctgatacctgaaatttcctccttaccatctagaggcaagttgggaatgctgccaggctcctgtggtaaaggaagctcctctcttgactggtgctttatggctacacgttcctgctcagaatggatctcatttagtcttcaccaaaaaaaaaaatctcatgagatgatttaagtgttttatggacaagatgtctaaaactcagaaaaatttcacagtgtgcctagcttttatgtttatgttgaagttgggcattagaagttagaatgaatgggtttacttcagagaaaattaaatccatcacccactccttgtactatgaattccaaatacatattaaatacatataataaaatatttaatatatatgtaagtgccagaaggaaacataaatatgaatattttgtaatatcaagttgaagaaaagccaaaatctgacatcataaaagaaaactttcaagtaaaatatgttaatggctaccaggaaaatattgtgcaatgtctgattgccatgaagagggttaatatccttgctatatcactctgtgaagtcatctttaaaagactaagaaaaagatgaatctcttaataaaaacctggcccagaacatgagcagcctctctctctcactctcactgtctctctttctgtcacacacacacacgcacacatacacacacacacacaaatatggccaagaaataaagtaaaatgttatttctaatgtaataagtaggtcaaaatagaaaaagaaagcatcacaccttcctttgcaaagtatttgggttccttttgcttttaaacacctgggtcagctggggtgtcgagaaacagaaattctcacgttctgcttgtgggcatatatgttaataaaaccaagcttggcaatatgcctgcaatatgtatctaaagcttcaaagtatgtatagctttgaccaatcaatatcacatttcggaataagagaaaaagaaataatgaaagtgaaaatcataagagatgtagaaacatattcttatacaagaattccttgcagccttatttataataaattttgtgaacaaattatatatctaaaaataagagattggttgaaaaaattatgcagcagccatgctattgataatcatgttagatagaagcatatttaaaggcatggaaaaattgccatgttttatatgggtttttaaggttataacacaatgtatagtgggattccaattcctgtatatacatagacttatatgtctatattgattaactctggatgagtctcatgtcttctttttgctttcttctattatccatattttatacgatgtgcctgcatttcttttttgtaacagatggtcaatactagaatcataaacagatcttgtttgtttattggcaaatgtttcccgttagaaaaagatgcatttttcttttaaatatttttattttatacaatgattacaagcttataatagaaatttgaaaattatatgtgagtacagggtaaaaagttgaaagaatgggattgcacgctacagatctagctgcttttagcacgcctgcgtaggaccttgctttctctagacctctgttgcagtctctctgcctacctcctcacaacgtccatcccccgcggtcactgtcgtgatgccagcctccccggccttcatgtctctaaggagcaccagcgcggcaattagcgccctttgccttggtggtattctggcttcacagtcacatgggagatcaatcgtcagcttttctgtttgaaatctaaattcttcctgactgcaggggacctcgggacccatgaacacctctagtttactatgtcttcacagtaaaagatatctgcatgactggactctttaacaaatttggtggttaacctactctttctatatagatatagcacttcgaccttcagacttctcaatactgataaaaagaaaacacgacagatgacaggaaaacctttgcagctataatttgtaatcggccaattataaaaactgcaaaaattgaccagatagctaaggttttacacagtcatgaaagtgatctgcactgttaacatttcaccctctgtgcaccattctgtgcttctctctggtttggagtctagaaggttttatttacaggctatgacttaacaatcccagaacggctgacacatgcagtcactcaagactggacacagcaaggaagtagtgggtccatgccaaaggctcagccagacgagacactctagctgtggcaggagatgccagggaatgctccaagcctaagcagattgtaaacaaggaacctcaaattcatgaaaaattcttgcttatgtggcccatgtcagtaattactctctgcctcagtttccgcagctgacatgtaaataaaagcagttcatggttcatcttcttttcttatcggggtctcaagtgattctacaaaccagccagccaaacaatcagagaataagttgaaaagattgtcttcatttattgaatgtgcttaactcaggcccgggaaagggcgtcatcagtttctcatcatttcactgagatatgcatctattacttttacatttcaggccaaaagtgtgatccaagctgtcccaatgggagctgctggggtgcaggagaggagaactgccagaaacgtaagtcagtgaacagcctcagacccatgtgtgaccgcccctctcttccttcacttgcttaggtgattggatttgttttccctctgaagactccaaagagttactttattacagggtcagatgtgaaccagtaggtgaaggacagtcttgcaaatctcaccgcatgcagttaatccagggtgggctattttgggagcttcagcctatcacaaataagtgaacatcagcaggggctgggcgcggtggctcacccctataatcccagcactttgggaggcggaggcggtcggatcacgaggtcaggagatcgagccattctggttaacacagtgaaacctcgtctctactaaaaatacaaaaaattagccgggcgtggtggcgggcgcctgtagtcccagctactcgggaggctgaggcaggagaatggcatgaacctgggaggcggagcttgcagtgagccgagattgtgccactgcattccagcctgggcgacagagcgagactccgtctcaaaacaacaacaacaacaacaacaacaataagtgaacatcagcaagtaccccagccctgtcctctgaacacagcacactttcccaggaatggaagacttgctcctgttgacagcagtcaccagacttcttgtttcctctccctccctggctttctttggtacccacctacacagaagcctgagcacgggttctcatggggacttttccatgtggaccctgctttacgatggagagggccattctcctaggtatggttgtctggctcagcctctcagtggccaaggaacctggggacatgagctcaaaaacggacactatgtccttaagctgaattgtgggggggctgttaggcccttctaaacactacttcccagcaggtatttttgttctttgtatgtgctttctgcattgcccaagatgcatctaattatttagcaggtctcaaagtctagacttgatctcatgagttctcttaagtgattaaaaataaatcaggagaaaaaagaggcaatcagaaaagggcatggtttgacttagtttgaatgtggtttcgttggaagcaaatgtgtcttcactttttcatgaaaaagtctgcaagtgctctgcgacatccctgggaaatgatcctaccctcactcttcagctcacagggaacctttgctctttttcagtgaccaaaatcatctgtgcccagcagtgctccgggcgctgccgtggcaagtcccccagtgactgctgccacaaccagtgtgctgcaggctgcacaggcccccgggagagcgactgcctggtaagatgcccctccagcagcctccctggagcaggctggggctgcacccgccccacccacaccaggacagaagacttcctgtgggggagctgtcaattagcatttgtcataacagacaggatattgccctctgcctggtgacaaagtatctttagtatcctgcctccaccactcactgagaccttgggaaaatgatgggactaccatgcctccatttccttacctgacaatgatgcataacaaagtctctcccagttgaatgcttaaatgatgagatgcctgtgatgtccgtcattaggacctgggcacagaacaagcactaaatactacatgcaagtatttgtcatgaatgtgccttgttgccagcagcacactctctttattgtttgacttcggctatacctctagagacttgacactgtgaggtccctaagagacccatggagagccacacaggtcttgctggctggggctgggttagggcctcctgacacggatccctcggctcctccaccactgctcaggcacctcctgagctgcaccctgccctcaaggggtcctgaagtactcactgtcgccccattgctccagaaagtgccagcagaagccttgctgccccagcgggctctgagcagcactggagggtacaggtcagaagcgtcttggaagtcctggagacgccaaggctggtggatgtgactcctggagtgggagctggtgtgacgaagcccttcctaagactaaatccagagcactctgtggtttcagagaagattcctaaattccagagtttggacccagacccaggaattgtgacttggttggcctgagctgtttctaatgtgagccccagggagaagactgtgcgtggggttggtcctaggaaaagccctcgctgtattgggtctggctcctttacacggcattgttctagcaaggctttctgccattcagcaatacattataaaatataccctcaattgtactttataagggaagcccaatgtcctttataagggaaattaaacataatttcattccatagtcaccgctataatgtgtgaactccatcatctatacgttagtaaacagacgtatttttatcataatccataaattatgataggtgggacagtgcacctaagaaaaaaatggactttttagagaagggtctttctgactctgcagagggcgccagctgggttttcccacactagtggaacactaggctgcaaagacagtaacttgggctttctgacgggagtcaacaccgtgctgcgcttcctccgtgtgtggcgctgagtgtacttacctcacttgcccagcgtgtcctctctcctccataggtctgccgcaaattccgagacgaagccacgtgcaaggacacctgccccccactcatgctctacaaccccaccacgtaccagatggatgtgaaccccgagggcaaatacagctttggtgccacctgcgtgaagaagtgtccccgtgagtcctcctctgtgggccctctaactggtcaggcatccttgtcccgctctgtctcctgctgagccctggagtatcccatcttggagagtctttgggtggatgtgtttgccttgcttggaggaggcgaccctgtgcccgtccaggcacacaggcgaggggaggggctggcttgctaccgaggagcgggcaggtggtggccatctccacccatgggggctgctcagtgcacagggcagatctgggtggccaggccacctcacaggagaaacacctgctgctcagccctcaccactcatccagcagccacagccgtgggtattcagttgtctgctgggcacaaagccgtgggcatgccactgtttagtgcttgtgccaagcaggtatttaatacaccgaaatcagagagtctatcagaagacctgccttcttgagtggttaaaattctagtgaaagttatgcctcttaggagtattgcagaggttttgtttttgtttttattttgttttgttttaatggtttgggtttgagttttgcttgtttgtacttacatttgtactggtggctccagggtttagggaaattgtgacataaaataattcctgacagagaaagcaaaactttgtctaatgaaagagttttagaagccactcttgatctctagaaggggagattaactgagaaaaaaaattgaaagaacaattatgagggggagattttaccctgccagatttgtgtacatgaaaaattttacattccgtatggaaaaaaaaaacacaaaataataagccattataaggtaaatgacaaacaaagctaaagaaaaatgtgccacagtgatgacacagatatatctttgagatagggcttaacagagctttaaaatccataggaaaacacttcgagcctgagataccaagagcagatggttcacagaagaatcatcaatgtcctataaatatttttgaggatcttcttggggaacttaaaacaggaacaggccaggcacagtggctcattggctcatgcctttaatcccagcactttgggagactgaaggggctggattgtctgaggtcaggagtttgggaccagcctggccaacagggtgaaacctcgtctctactaaaaatacaaaaattagccgggcgtggtggcgcacgcctgtaatcacagccgctcaggaggctgaggcaggagaattgctttaacccaggaggcggaggttgcagtgagctgagatcacaccactgcactccagcctgggtgacagagcaagactccatctcagacaaacaaaaaaggaagacatagagctcctaaaaataacgcagaagtctgctattaatacaaatgaattactttaaaggtgagagcaggtggaggagagggctgaggtgcctgctgggacgcaaaacagctggcccctcaagggacccagtgtttcctgccatgatgaaacacctgtattgtccacattgcggcctagaatgttattaaactcttgaacgggattccttctctatttgcaacctttcattctttgtccttaaagtaaataaagccaaaggaggatggagcctttccatcacccctcaagaggacctggaccgcctgtgtgaggcccgagcacctggtgccaccgtcatcaccttcctttcatgctctcttccccaggtaattatgtggtgacagatcacggctcgtgcgtccgagcctgtggggccgacagctatgagatggaggaagacggcgtccgcaagtgtaagaagtgcgaagggccttgccgcaaaggtaggaagcccgccggtgtgcggacgaggcttgttctcggctgctgaggctgggctctcatgccacctccaaaggaacacatcttcctcttctcattaaaaaacaactatacatatcgtttctttaaaacagaagataaagctgtaaagctaggttaggcaatgggaaggcactgaaggttgtgacggggtggggggctctgatgagaacagtcacagagccagccccgctcagcagctgccaggtgcccagccctggggagaatccagggaaggcagagctggaagcagtgcagctccaagcggcccatgggaaataatgaggagaacgcaaggtcagtgtgaggtgacagggatggcatctcctacaccgccgtagccccaaagtgtactataggtcctggtgtccccccttcccgcctgcactctccccagccccttcagtgtttgttgagtgaatgaaggatgatgtggcagtggcggttccggtgaccggaattccttcctgcttccctctgcctgtggatccctagctattcttaatccaacaaatgtgaacggaatacacgtctctcttatctctgcagtgtgtaacggaataggtattggtgaatttaaagactcactctccataaatgctacgaatattaaacacttcaaaaactgcacctccatcagtggcgatctccacatcctgccggtggcatttagggggtgagtcacaggttcagttgcttgtataaagaaaaacaaaatctgcctttttaactggtagagattggtgatcaataatcaccctgttgtttgtttcagtgactccttcacacatactcctcctctggatccacaggaactggatattctgaaaaccgtaaaggaaatcacaggtttgagctgaattatcacatgaatataaatgggaaatcagtgttttagagagagaacttttcgacatatttcctgttcccttggaataaaaacatttcttctgaaattttaccgttaatggctgatgttttgatatttttcaaaagtgcagtttctcctgcaggcaaaaggggacacgttaagtccaggcttgggtcattcactgcggtgtaaacacgctttctccctcccgcccggccccagccagctgccttggtggcccataacccctgagggtagagggaggggacaggggtaggtgacaggcagcctgggcctcaggcttttgaaactggacgccagagccttgtggggccacgggcaagcctcgggtctatgactgccgcctgagctccgcttccttcctctctaaaatgggaagattagaccaaaataacaagactgttttaaggttggaatcaaataaggaaaatttgtaaagctccttgtatgtgataccagatccacaattggcagataatcgcagcaggagcctcttcggggtaatcagatacgcggcgcagcaggggtctcagggccacagccaggggggcggcgggagacatgcggaatcgcagcggaaggcgggaggcagctgtgaactgtggctcggcctgcgtccgccctgcgcatgtacactcagagaagatgataatgaaaaagaaagcaaatccaattttcccacttactgttcatataatacagagtccctgagagtctagagtaatgtctcatacaaaaaagaaactcctacgtggtgtgtgtctgaagtctttcatctgccttacagggtttttgctgattcaggcttggcctgaaaacaggacggacctccatgcctttgagaacctagaaatcatacgcggcaggaccaagcaacagtaagttgaccacagccaaagcctggtagattacatttgcctttttagttggaaattaggcttaacaggagagttgctaagatagggcacagagctcctgcatctctcgccggcattcccaaatgctatctcacatgagcaggcacagggagcaagactgcacgaccactggcacaggctgtccgctaaaccacagacttctcagcgctcgccagtgcttctgcttctgtgtccactccagatcccacattgcacttagttgtcaaatcttttcagtccatttctaacctatattagctcctgtgtctttccttgtctttcacggccttgacacttacaaaacgtgtgggtcaggtactttgcacactgtctaaccatgtctgttcagctggtgttttctcaggatgcaattgaggttatgcacatcttatcacagggaccagagagactttttagcaccactcttcaagaatttccactttttcagctttgacagtggaatagacatgcaggtgctcacacacaagcatctttaatatggtaatggtaatcatcagtttagtggtgtggaggaggagatgggaatctcttagtgaaacccgccttggaagcagcctcgttatgagaactgctgcccctacttgactcttaaagcactagataatactgtgcaacattaaagagaataagagtgcgtgaaatatgcattgcctcccataaactcccttggctctgaatctctgatactaaatatgtggctaccgttgcttcccagaaaggcctttttgctctgaattctctggaatgctttctttgaccaagattcttataaaaataagagatttagagcaattttcttggatggctggtatgagccagttggcttagttgtagggatttaaacaagataagggttacttacttttcacatttaatgagaagtctggtgattccagctcctactgagacagggtggccacacgttccagggtgtgactcactgaggccccagacctgccctgcaaggaaaacctggctctgccctggtgtcctggcctccctgggcatatgtgggggagaattcctaatggtattggttacaggctcctatgcgagaccactcatctgtgtaggagaaaggaaaaagatgggggaaagaagagcagcagggagaggagaagcctctggatgatactctaaccccctgccatccaacacctgaacatcagtctcttcatccagtgctctcagctggcccagcccccagcctggggtcagatgagagcttcctgcaaatgcagatctctttcctgtggctccttctcaattacagacagctcctccacaaggtgcactctggccttgtgctccctccccaaaccagcccagccctcccagcctgcatcatcgtggtcctgtaggggctagaggttctcacacccatcgtggtctggcagaggctggtggttctcacacccatcgtggtccggcaggggcttagtggttcttatacccatcgtggttcaggaggggctagtggttctcacacccatcgtggtctggctggggctagtggttctcatgtccaccgcgtgctttcctgctcctccaggtggctgaggacatccccccttcggtctgaatgacttccatccagtcatctgatatacacattggaccacccaatagcatcctagtgtcatgttggatggtgaagaaaatgccacagttactgctttcagggcctcacaaccttgggcatagctttttggaggaaggccccacttcccaggcatccctcccagacctggtcagaggcccctgctctttgcttccatgttgcccacactcactgtgctcttcacaccggctcaaaatgatctgcttacggggttgtgtcaccaccagatcaagcgtcctggagaggaggaaacatatttaacctgcacagaatttgggacagagaacctctagtgtttgttcaataaatatatgaatggatagagggacaggttgggtggtggatagatggatgaacccacacctttgaagtgtatttggctgtttgagaggttagaatatgttctcaatttccaggcaaaatgaaaatggagaaaatataatgacattaaggcattttattcatcctccccatctgccactgggttaaagatactaaataaacaaggaactatcttttgcctggaggaactttaaaaacacctgcagttttcaaaaggtgcagtgtgtgcctcccacagcatgacctaccatcattggaaagcagtttgtagtcaatcaaaggtggtctggagaaacaaagttttcagggatacattgtttttataatttttcaccacatgatttttcttctctccaatgtagtggtcagttttctcttgcagtcgtcagcctgaacataacatccttgggattacgctccctcaaggagataagtgatggagatgtgataatttcaggaaacaaaaatttgtgctatgcaaatacaataaactggaaaaaactgtttgggacctccggtcagaaaaccaaaattataagcaacagaggtgaaaacagctgcagtaagtcaccgctttctgtttagtttatggagttggttctaatgggtcctttatttgtatttagaatattgaagggctattcccatttaaattacttttttcagttccttaagaagcaaattaaaatcttaagattcctaactgtgaaattaccatgtgaattccattaaaactttttccagatcattaccattcaatgggatgaatttaccctgaggtttaggctaccaattatttgtaatgtaagtaactaaatttagtattagttatattaccttttagttgtaggtcactctctgctcatttcagcctgtaaagactacagctacacacatacacacacagaggaatggaatgagcactttacatcaacacttcctgttctggctctagagcctcagcttttgaagctggtgagagcctggcctgtgctgggccttggccacgggcagcgtcagctttgagtcaagtgctggtctggcctccctagctttgagcctctgtcaattcccttaatctgtttaggctttggcttcctcatccatagaatggagatatgaatgattcctacgccgtagtgctttgagagaattcagtgaaattcctgtgtgtaaaacccttccatggtgcctagcacacagcacacagccaatggcccaatggctcctatcagctgtgggatttgtcatcagaacaccaccagctctgctccaggctgccctgggtaccatcaaaacacaccctgtgcccagcagcacctgctcctctgcacacctggttccttcagcaggggcagtggccgtgggagcacagaaaacatggagtcccatctggtttaattgatgccattgccaaaggggaggactcacggcaccccctctcgggtgccagggtgcctggctcccaccaggaggaagacctgtcctccactgtcaggcacatttcagtcttcccagcagccagcacaactactttgtccttccagtcacggtcggcctctgggaagcccagtctgtgtcctcctccttcaggggtagccagcatgtctgtgtcacccaaggtcatggagcacagggcccctcccgggaaggtgccgtctcctccggcccctcgggtccctgctctgtcactgactgctgtgacccactctgtctccgcagaggccacaggccaggtctgccatgccttgtgctcccccgagggctgctggggcccggagcccagggactgcgtctcttgccggaatgtcagccgaggcagggaatgcgtggacaagtgcaaccttctggaggggtaggaggttatttctttaatccccttgcgttgatcaaaaataaggctccaggttgttgttatagctttacaggcattctgtttgattttctcttccttttattctttgcccttggcttttggaggttttgggttttctgtggggagacgggaagttgtttgattgcgttatttttggcaaatttaagcacaataggaaataagcaagtattattgcctaatataatccaataatttatagaatctcttttcctggaagtatcttaaatttttctaagctacaaaaagttcctaagacaaatgagacagtcatcaatggttcatctagccaacaccgtggccatttgggcttttctttgtagtgcccgattcctggtgtgtgaaaataaattaacacaaattatattgccaagttaatatctgttttatgtgcccccagcatgtgttgaacatcaaacagtaccagggactttaaatatacccacggacaaagaaataattcataatgatgtttgttgaatttagttgcaatcaataaaaagtgcagtttgtgaatgctctgaggttcttgatattgatgtaaggctttgaacgacaaatgaggacaaaacataaataggaaagtaaaactgaaggatagaggccaaggccatgttttagaagatttaaagaaaaagggaaatttggtgagcaccataggaattacagatggctgtaggaattcttcctgttttactctctgggcatggaccacagcttggatccagaaatatttaggagcaggataagaggaccaagttcaattctataggaatcctttagctgataggctcagaacaaatcacataattgatagtgctgcttcaacttcaagtaaggaatattgatgcaatccttacagctacaaatggacagtggtctcatgttttcagttttcaagtgtttcttaagaggcaaggtgatgaaaacgcccacgtggggagccccatgtccttccattagtgtagagaaacctggtgtccagcagcacctgctccctctgcaagcccagcccccttcagcaagggcagtgacccagagaagaagcacagaagacacaaccctgtatcacattttgtttaatggtgccattgaccaaaggggaggatgaaaggcacacacttttttgttgttttttgagacagagtctcacgccatcacccaggctggagtgcagtgatgtgatctcaactcactgcaacctctgccccctgagttcaggtgattctcctgcctcagcctcccaactagctggaattacaggtgtgcaccaccatgtccagctaattttttgtagttttagtagagacggggtttcaccacgttggccaggctggtctcaaactcctgacctcaagtgatctgcccgcctcggcctcccaaagtgttgggattataggcataagccactgcacctagccaaggcacacactttggagaataaacactccttgttcgctgctggagggtagaactatgcttgactactaggcagagtccagtcttactgacaaacagccgtacatctgttctgtcttttcaatcaaacatcagcttcttgcttaacattgatgtgtacatcttgagggatgtcaaaatattgtaagctaagtttttcatacctgtgttccacactcaccatttttagtaataaccattgagcgagttcattctccctccttcctttttctatcacttaatctaaaattatcatttttccagcttaattttgataaccatgaatctggtattagaggcagggaacacctcctcaggactatcttttcttttatcatttggcttgcttacccaatatgcaaaaactatgctgtagaaaaagcagaaaagatatcttgattatgaatgaagctcctgtgtttactcagagagaagatgacccaggattcagttaacaaaatcagctgattatattactatatagtcctggagtcccaactccttgaccattacctcaagttatttggaattttgaagaggtgatttgtgttcctgcaataatgtctcaggggtgggctgacgggtttcctcttcctcctctcagtgagccaagggagtttgtggagaactctgagtgcatacagtgccacccagagtgcctgcctcaggccatgaacatcacctgcacaggacgggtaagagccccttgctgctatccacgtccatttcatgggaagggccttcacagaagccgaacagtgatgatggcccagggcatcctgtgtgggcaggacggccatcagagccacttcccagaggagacggcaggcgctgacagcgctgtccgggcagggtgtcggtgacattagcacacacattagcctgcgatgaacattcactctttctgctgacacccccaaccttatctaagcttatcaaatcctcacatttaacggaggctgttttcacctggtttcccccatccctgacctagtcagcattgctttatcgctttcatcaaacatcctcaaattcttaacattagcttgtaattaattgaagaatttttaaagaaattgctagcaaaactttttaaactgcacaactttgtatctatatgttcaataacatatagatacaatattctttacaataatcttttaaagaatatgagtgagaattcgggcccctctcacaccaaatgtcctgatgttgttaattctcaatgttattatatagggagctctgttttcttgtgagcttcaacagccagttctaaatctactaactgaaaacattttttagacattctctaaattgggcagaagatgacaggactgtgttttgagggataggctgccagcgtggctgcttacaaagtaaagacttggtttataggtttgcatggtgttgggttaaatttctgtcattaaaataattggcgatattgacatagtcatctaattatgctggctctgggcacacacagcccttgagtggacaaaaccaacatgagagaacttagccaaggggaaagcctttccctgctggttttatttctgctacttctgaagtgtggggcacacaacctgagcagtgcttttatttgagtcccaatgcttttatttgagttttgcaaggttattccaagttttacaaatagaaggtagcgtatgactcagtccttgatatgccaaccactgcacagagacttgccaccttcctgtcactggagaaacactcatgtgggttttcttaaatttgcctccctctgagcttccctttaacttcaactataatatgcaagaaagactatctgaccataaatacacatttgggccaatcaagatggttttgccaaggaaagatgcccacaatggttaagcagaatgcaataatgtagagaatatcatttctttcatgctggtgtatatcatatgcattcaaaaacagggagaacttctaagcaactaacagtgaccatatcaagcaggtgcaatcacagaataactggttttctcctttaagaatttttctatcatttggctttccccactcacacacactaaatattttaagtaaaaagttacttccattttgaaagagaaaagaaagagacatgcatgaacatttttctccaccttggtgcagggaccagacaactgtatccagtgtgcccactacattgacggcccccactgcgtcaagacctgcccggcaggagtcatgggagaaaacaacaccctggtctggaagtacgcagacgccggccatgtgtgccacctgtgccatccaaactgcacctacgggtgagtggaaagtgaaggagaacagaacatttcctctcttgcaaattcagagatcaaaaatgtctcccaagttttccggcaacaaattgccgaggtttgtatttgagtcagttacttaaggtgttttggtccccacagccatgccagtagcaacttgcttgtgagcaggcctcagtgcagtgggaatgactctgccatgcaccgtgtccccggccgggcctgtgttgtgcaatgctgcacatcacaacaggagggtagggggacaaaagagcacaggtcctggcagctgccacagtctccaggggcttttgcgtttctctccagatttctaaggttaacatggggattagctgttttgcaatgaataaaaggtaacattgcctggaatgttgcttaaagacacttttttaaagctagttgattgttaagctgttgctacttaaattaaaactactttgggccagacgcagtggctcacgcctgtaattccagcactttgggattccaaggcaggcagatcacttgaggtcaggagcttgagaccaggctggccaacatggtgaaaccccacctctactaaaaatacacctgtagtcccagctactcaggaggctgaggcaggagaattgcttgaacccgggaggcagaggttgcagtgagccaagatctcgccactgcactccagcctgagcaccaagagcgaaactctgtcgcaaaaaacaaaaacaaaaaaaaaagctactttgactggaattagcagaagcactctgattgtgtgtatcttatttactggaataataaagctgtcaatcaaactggatcccactcaacaatcagaaagagaagttgagctgtcatatagtagttcacacttacttctgtttctcaaaatcctcagctttgtttggaactgttactcattctttctctgaatccatctgtatgagttgtgtgcccttgggcaagggtcttaccttctctgtgcctcactttcttttctgtaaattgggataataatgctgcatagctcacaggatttttatgaccatgagttaagatatgtcatatacttaaaatggtgcctggaaaatggtgaatactgagtcaatgatagcatcattgatggtgggatggtgatgaggaggtgggagtcacaatggtggtgttgatggtggtgatggtggtgaggaggtgggagtcacagtggtggtggtgttgatggtggtgaggaggtgggagtcacaatggtggtggtgatggtgttgatggtggtgaggaggtgggagtcacaatggtggtagtgatgatggtgttgatggtggtgaggaggtgagagtcacaatgttggtggtgttggtggtggtggtggtgaggaggtgggagtcacaatggtggcagtgttggtggtgaggaggtgggagtcacaatggtggtagtgatgatggtgttgatggtggtgaggaggtgagagtcacaatgttggtggtgttgatggtggtgatggtgatgaggaggtgggagtcacaatggtggtgatgagggtggtgatgatgatgaggaggtgggagtcacaatggtgtcagtgttgatggtccgatggtgatgaggaggtgggagtcacaatgttggtggtgttgatggtggtgatgatgatgaggaggtgggagtcacaatggtgtcagtgttgatggtggcgatggtgatgaggaggtgggagtcacaatggtggtggtgatgacggtgttgacagtggtgacgaggcgggagtcacaatggtgtcggtggtgatggtggtgaggaggtgggagtcacaatggtggtggtggtgatggtggtgatggtggtgaggaggtgggagtcacaatggtggtggtgttgatggtggtgatggtggtgaggaggtgggagtcacaatggtggtggtgttgatggtggtgatggtggtgaggaggtgggagtcacagtggtggtggtgatgagggtggtgatggtgatgaggaggtgggagtcacaacgttggtggtgatgatggtgttactggtggtgacgaggtgggagtcacaatggtggtggtggtgatggtggtgaggaggtgggagtcacagtggtggtggtgttgatggtggtgatggtggtgaggaggtgggagtcacagtggtggtggtgttgatggtggtgatggtggtgaggaggtgagagtcacaatggtagtggcgatgatggtgttggtggtgaggaggtggaagtcacggtggtggcgatgatggtggtgaggacgtgggagtaacaacagtggcagtgacggtgattgagacatgatgatgatttgtcaactttctaggaaaacaatcatataatctccaacagtgatatcttaatatcttttccaaaagtatcagatcatattataagggccaagtttccagaataatatcagacataatgacagtggacatcagagcttggcatctaaaggtaatgggaatagctctaatgtctcagcgtgaaaaacaacatttgctattagtctgagatactaattatctagttaaggaagtactcacctatacctagtttttaactgttttttaaaatctggaattgattttgaattttaacaaatatttccctgggaacaatgtaagattcttcatattttcgcctttgggtataccaacatgccagctctgttggccactttgtgagctcgatgaagcatggtataaaagatgctttgctagtgtttcacgtaatctatttctataagcaattttggagctaagcctctgaaacagaattatattatctgtatagaataaatgttttatcttcccccttttctttcttctggaatagatgtgcatcagtatctctgcatcaatatctctatatcagtatctctgtgtcagtgagcatatgttgctgggcttaggggaggtccagaaagtgattgggttttggcattttcaatacacttactttgtataagaaatagtttgccaaatatagaaagaggggatttagtcaagatttaaattaaaaatgttagtggtcatttttctaatgtctttctattttttcccaggtcctaataaatcttcactgtctgactttagtctcccactaaaactgcatttcctttctacaatttcaatttctccctttgcttcaaataaagtcctgacactattcatttgacatatggaattttataaatattttctttagtatgtgtgattacattcctgattctgagcctttttagatgagtatatagtttgatataatcttgttattgccacctgtgtcttctcccaaagccattaattatataggaattacacgatagaaatgggtttaatttttaaaatacggccaagtgttgatgagagggaaaatttttttaatttctttcactgagtatttatgacgtgcacaacattcctgaatatattgtctctctcatttctcagatgggatgtattgccttctccatttctattgttaaagaaacacttacaggggtttctttaacaacttgtgaacagcagcatcagagcccagactacagcataagcagctgctgattccaaaagccctaccttccaaccgggcaggtgcagccacccagacgagggggaggaaccctggaggaatagctatttcttttttttttttgtcgagacggagtcttgttctgtcaccctggctggagtgcagtgccgtgatcttggctcactgcaacctccacctcccaggttcaagcaattctcctgcttcagcctcccgagtagctgggattacagacacctgccaccacgcctggctaatttttgtatttttagtacagacagggtttcaccatgttggccaggcttgtcttgatctcctgacaagtgatccacacaccttggcctcccaaagtgctgagattacaggcgtgagccactgcgcccagcaggaatatctatttttaaatggaactgtgttttcatagtacacggtgaggagaaagttgctttgaaatctttatcctaataaaccaaataatatgaaaatttgcctattttaattatatgtaacaaagtttagttactgctataattgcaaatatgtataaattccttaccaaaaaaaaaagaatcaagtgggagccagagaataatttttctgacagaattaaataacatgctatagctgcttgagttcatactcaatagtcatttctgcagagttaccgagggcctcatcagcgtcagcaggagcccctcgccttctgacgctctcacatccttctctcctgcagccccgtcctgccactgtccttgtccagcttctcttcaagggtcaactggtctacctttccctacaagtctgtcacagcttcttgttagcaatccctatggttgcccaaaagcattttcagagcctgcataagactgcatcttgtagaaaatttgcagtttcaatctgccctccctctgccgggtgttcccattgtattgcattcagcaggcagggagagactgctattaggtctgttcctgagtgactgctttctgtctcagactgtttggtgtctgtaggaggtagtggggtgggcagtaacgaggtctcctgtatattccacccctacgaagcctgtgtgtttggtttatgaactaagctcaaaagcaccacaggggtaagactgcagtacatgacaccatggaaaagagggagcacccagacccccaaattaagaagagcagtgtagagaacagagacctggagagcagagatagaaactgttaggatcagattatagtgttacaccagggctccccaggcctctcacatattgaaatgtacttgtccatctttctccaggccaggaaatgagagtctcaaagccatgttattctgcctttttaaactatcatcctgtaatcaaagtaatgatggcagcgtgtcccaccagagcgggagcccagctgctcaggagtcatgcttaggatggatcccttctcttctgccgtcagagtttcagctgggttggggtggatgcagccacctccatgcctggccttctgcatctgtgatcatcacggcctcctcctgccactgagcctcatgccttcacgtgtctgttccccccgcttttcctttctgccacccctgcacgtgggccgccaggttcccaagagtatcctacccatttccttccttccactccctttgccagtgcctctcaccccaactagtagctaaccatcacccccaggactgacctcttcctcctcgctgccagatgattgttcaaagcacagaatttgtcagaaacctgcagggactccatgctgccagccttctccgtaattagcatggccccagtccatgcttctagccttggttccttctgcccctctgtttgaaattctagagccagctgtgggacaattatctgtgtcaaaagccagatgtgaaaacatctcaataacaaactggctgctttgttcaatgctagaacaacgcctgtcacagagtagaaactcaaaaatatttgctgagtgaatgaacaaatgaataaatgcataataaataattaaccaccaatccaacatccagacacatagtgattttaattatttaagagtagtttagcatatattgctttatgatttaattaaaaatctccaaaatatatgccaaagaagtagaatgagaaaaatgtatatttctctttcacttcctacagatgcactgggccaggtcttgaaggctgtccaacgaatgggtaagtgttcacagctctgtgtcacatggacctcgtcaagaatgaccacactgctgtgggtgaagatgctttcctgcatttctgactgtcctctgtcctgatcaagtttctatggctctgggccagcctaccctcagccagggtttctgcagagactgcccagctggttccacgtggctccacgtgccaactttgtcctcagtggagggaaagttggacacacagtgctggggctgctccctgctccgccgttgctcgatgcatggcctgcctctgaattccttggttccactggttttgctgggtccttctgtgcctctagctcctctttttttctgtccacttaccccattggtcccatcacaagcctgtgtgtgagtggcctttctgttcgatgacaacctccagcataggggagtgtttctccttgctttctttcccagacacactgcccagcaaaggcaaaagggcttccttcaacatcagctctggccagtttgccagagcaaagccctgagaaaagcaaggttgaaaagtcttattcaaactcaccaggaaagagtggtgttactctcgatggcgtctagccaggaatcatggaattatacaccgagcacctgtttgccattttggatgtttccaaacatgaaccaaacttccaggcccctctgccatctctggtaacatttacaaagtcccttcctcaccactgcccttccttcattttggcatgctcctccgcccccgagttgacagccatagctctctctcctgccaccagtgtcacatgatcgaggaagaaggcaacttcaaaaagactgggtccccttccactcccatctcttcagtgagctgctaggacacccagcagaacttccccactccacactgcaatctcagggatcttagtcacggggctttccaccatgtctccacctggaaaccagtcatggccattccttcttacatctgctcttttccatctttttcttctcctcctgttcacccgcccttactcttgtggcgccctatggatatgcgctccatagcaaatgattctttatatcttacggtattctagtgagctggcacatgtggcttctggtttcctctctctggaactagacatgacctctgtgggagggaggattaaatgcaccctacagtctgaggctgcatgatgacatcactcatcacaatgatgctttctatgtctgaatcctattcctttataacccctttcaagctcgttcagagagtatttcacacaatccatgtgctcatcttaaaagccaaggacccagaggagtctcagcattgccaaaaagtcccttcacccagcctggccagaggcagtgcctggtccatgtgtatggactatggcacttcaattgcatggaaatactcttggaatgaacaaaataccaatccatgaaaaagcattattgaagtctaagttattttttgaatcatattttgttaatcaacaaattgaaaaatactcattatatggagaggtccagataaagcctcaattttaaaaaatgaggaaaagtgtgcctggtaggggactggggagagcttgagaaagttggaaacgttgccttagaagcctgttttttctccttttagaagctacatagtgtctcactttccaagatcattctacaagatgtcagtgcactgaaacatgcaggggcgtgttgagtgccaaggccatggaatctgtcagcaacctcacccttccttgttcctccacctcattccaggcctaagatcccgtccatcgccactgggatggtgggggccctcctcttgctgctggtggtggccctggggatcggcctcttcatgcgaaggcgccacatcgttcggaagcgcacgctgcggaggctgctgcaggagagggaggtgagtgccagtcctgggtgggctcaggagccctcgcaccccgacaggaacaagggccagccccgagaacgggccattagcagttgtgtatgttagatacataattgtattatgatgcagaaagaatctctgaatgtgcagttatacccagttggtgacatgttggtacatccatccgaggaaatggcaatgtttctaggctgcacccttcaatgtccacaaagctgtgtggcatctgcttaggacccggtgcctgtgtgtgcataggagggaggccaggaagcctggctgttgatcccatgctggcactgtggcgaaggcgagagattcctgctttggaaaacaccattgtccacacagtggctttgtccatgatggacttcgccacagcccagtcctgtgctggaagccatgttctctggaaagagcaacccagcggctcataagcataagcgcgtgtgatgtgccccaaccaaacgaccgccatgcacaacttccctaccggagttttcaatccagttaataggcgtggaaacagacatagaaattgtgtttgttgaaaggtagctgttcagttaaagaacacctgtatcagagcctgtgtttctaccaacttctgtcaagctctgtagagaaggcgtacatttgtccttccaaatgagctggcaagtgccgtgtcctggcacccaagcccatgccgtggctgctggtccccctgctgggccatgtctggcactgctttccagcatggtgagggctgaggtgacccttgtctctgtgttcttgtcccccccagcttgtggagcctcttacacccagtggagaagctcccaaccaagctctcttgaggatcttgaaggaaactgaattcaaaaagatcaaagtgctgggctccggtgcgttcggcacggtgtataaggtaaggtccctggcacaggcctctgggctgggccgcagggcctctcatggtctggtggggagcccagagtccttgcaagctgtatatttccatcatctactttactctttgtttcactgagtgtttgggaaactccagtgtttttcccaagttattgagaggaaatcttttataaccacagtaatcagtggtcctgtgagaccaattcacagaccaaaggcatttttatgaaaggggccattgaccttgccatggggtgcagcacagggcgggaggagggccgcctctcaccgcacggcatcagaatgcagcccagctgaaatgggctcatcttcgtttgcttcttctagatcctctttgcatgaaatctgatttcagttaggcctagacgcagcatcattaaattctggatgaaatgatccacacggactttataacaggctttacaagcttgagattcttttatctaaataatcagtgtgattcgtggagcccaacagctgcagggctgcgggggcgtcacagcccccagcaatatcagccttaggtgcggctccacagccccagtgtccctcaccttcggggtgcatcgctggtaacatccacccagatcactgggcagcatgtggcaccatctcacaattgccagttaacgtcttccttctctctctgtcatagggactctggatcccagaaggtgagaaagttaaaattcccgtcgctatcaaggaattaagagaagcaacatctccgaaagccaacaaggaaatcctcgatgtgagtttctgctttgctgtgtgggggtccatggctctgaacctcaggcccaccttttctcatgtctggcagctgctctgctctagaccctgctcatctccacatcctaaatgttcactttctatgtctttccctttctagctctagtgggtataactccctccccttagagacagcactggcctctcccatgctggtatccaccccaaaaggctggaaacaggcaattactggcatctacccagcactagtttcttgacacgcatgatgagtgagtgctcttggtgagcctggagcatgggtattgtttttggtattttttggatgaagaaatggaggcataaagaaattggctgacccttatatggctgggatagggtttaagccccttgttatttctgactctgaaacttgcattcaattcactccaccaagttatctcatctttgaaatggctttttttaaaggtgcctagaatatgatggcgtgcagtctataaactgttgcccaccttctgtactttctctcagaataattcacattcttctccagtgtctgttgattgttactttgtggaataagttcttggaaaattccacaagattattgttatcttcttactaccaattctattgaactttctccaccttctctgggccttccccagccagtggtgggaagatgctggctggagtctgacagagcctcttctacactggcctgggcttgctgtgagttggtggaaacctttgctcttgtcccaacacagagcaagtgaaagaggaggtcaaggggctcaggcagcggactagggaagcagaatcgaggaaaaggaaaaatggctgacttattacctcaaaactctagagaatttagttgatcttacagccaagaaggacaaaagccagagagtaatatcctccgcctcatgtctaacccacagaatacatagcaagtaaagagaacatgggcctttataaaaatgtcttaagatacaattttttaattggaggaaatctacagtttaattttctctgggcagcttttcttccttttattatagtaggggaaatcccatgttgatatacttctaaatgaaagatgatgaattgatataatacaataaaaaatctgtaaaattgatgatatacttatcaagaaaaattagctttcattttaacggtttacaaattgagtcaagtcctagtaacaaaatgttaagtctattaacataaccacaagaaatacaggaagacgggcaatctgtgaagcctttcacttacaatctctggcccctcacctgtgctgtgtaggaaaatctttgtgcacaatttgcttccttaattcattttttattcattcaacacattctaataaattatacaaaatcatgttgaaatgtgaatttcagtggtatttataaatgcagtgtgaggagggtttggatgtattctaagacaatagttgtgctttgggaaggaagcagtgttcactgaaaagtgcccccaggaccttttaattggaggaaatatgcttctgtggagttggaaatggggtagaagatagataaggtcaaggcttaaaagttaagtgcacccaacatctgaagcgtccatgggcctggcatggtggctttcgcctgtaatcccagcactttgggaggctgaggcaggaggatcccttgagcttaggagtttgagaccagcctgggcaacatactgagacccagtctctacaaaaaataaaaaattagctgggtgtggtgtctcatgcctgtagtcccagccactcaggagatgggaagatggcttgagtccaggagatctaggctgcagtgagctaaaatctcaccactgcactccagcctgggtgacaaagcaagaccctgctcaaaaaaatagttagatataaatattaatatagatacctatatatatctgaatatagatatctatatatactctgtatatagttatttagatatataaatatatatgatatatatttagagagatatatatttagagagatatatatttagagatttatatatattttatatatatttagagatatatatctctaaatatatatctctctctaaatatatatatatctctctctaaatatatatatatccctaaatatattaaataaataaaagaaataaaagaaagctcagtttggcctcctgcttgtcctgtctcctcatcccctcttccccctccatcattttatttccttgccccatgtttcttcactgcggccatgtcccccctcctctccaatgatggatgtcatgtctgctgcagtcagagggcgacaagcctggagtgttccctgaagcctgtggtttgtggtttgtcctgcagctcaggctgcccaggcctcaccagcaatcctggcgggcagggcaccacactgggatggagagggggaagctggaggaggcactttctggtaaagaaagcaaaagccagcagtgcccaggccaatttcaacagggagttaaatagcaccttaatcctgtggcaggacagctcatggggccatgtgtgctcttagaaagactcacatgcacgcatgcacggcagcaatgactccatactcacgttcccctgcagacaccaggcccccacagccggcacacacactgcagccccagttccatgttgctagcagtggcttagtgaatgagtaaagttcttaaaatgcaggggacacctgcccttcattcataaggctggacgtacacctctccttaaggagttcaagagctagtggaatcccaattcatacggtagagccattcacagatgagagagacaagccagaaggaaggaaccaaaagtcatgtcagcagttaggacaaaataacaggctttcaaggtcacaaagcctcagggacactcctgcggtgggactgggctaggagccatgggggctccaactgtgcgctctgcctgccagcctgtgggtgctggggctccacgaagattgttgtggaataccaagcatgcttgctgtaggtcacggtgcacgtttactacttccaagacaaacagccgagaacaaagctcgctttagcttctgcgtacaccgaacgggacacacgactgaacagcgttcccattgtgcctgctgggtggggaggaagtgatggcccagtgggtctatcagatgttagtaggatggggcctggcggggctccaggctctgtgtggccgacacccacgccccccgctctgctccccattcccagccccaggtcagccctgcgaggccctgcagcagatgggctgctcaaactgctctggtttgcagatttttcttccctctcaaatgaatacaatatgttttcaagtctcaaccagatcttgagaaaataggaagagccagagggtttctttggtgttatggttgtacagcttcccagactccgggggagagatgtgatttgtgctttctggcaatcccatggcgtattaaattttcataggctttccagtttaaatttagggtaggcaatggaagggaacgcaaaacagatttctaggtgtactgtgtgtgtgtctcccacgtctaaagtctgttaactggagcacccaacaggccccacaggctgccttcacacagaggacctggggcgcctccgacccattggggtgagcagtgggccatggagggagccagggtcaggagacctggttgtgggcctgacctgaccctgctcagggtggcctcaggtgggccgttcacctcgtcagcctcagcttaccctctgactacagtgacctcagacaaaatacgcttcctggccctgtccagttctgactttttataaacaagcacttatccaagttaaagggatattttcaatatctactgagtccacagatattaaatatctcctctcttctttaaaattgtggcattatctttagaatataaaaggaaaataacacacactctccttgaaaatagagagcctaaacactctgcaggaaatatttaaagctatagtttttgtttgtttgtcttgaatgcaagtggcctggactttgacttgctttgagtctttgaccttcatgacttcagtacagttcaaccctgacagttttgaagtaggtatgtgcctagatctgccctagtccctgctggaatgttgaagaagcaaaggtccaggccctcagagcacttgccacgtacttgccaacagatacggggcggagacttgagtcaacgtaagagcaagtgtgtgccgggtgatccgacactgcagagcgccagctagaccctaagcgtgtgctaggggctgaccaagccgttctttcctcaaaaacttggtggggagggtatttttaaaatcacacaaatatttaagtacagattatgatgactgcctcaaagcagtggctcttcagcttcatcaagcttcagagtccagagggtttgttcatatggaaggctaggcctgtctcctgcatttcaccctcttggcctgggggcgggacccaagaatgtgtggctctaaaaggttcccaggcaatgctgaggctgctttctgaaggaaaaactgcaagataccaggagagtttcatttagattgaagagtcgaggaaggctcctctgagaaagagtctgctaaggaaggaggaggtgggttctggggacagaggttctcccgtgggtaagggtggagggaagctctcctggggagaaggtgggcaggaggaccagaggctggagggaggagggcagtcagcctcggggcttcccaggaacagggacggccagggcagggtttagggcaaggaaagcgtgtgagcatatttgtattttagtaaatatttacagtttgccctccatgtctgcagtttcatatccatggattcaatcaaccacaatgaaaaacgttggggaaaaaaattgcatcggtactgaacatatacggactttttttcttgtcattattccctaaacaatacagcataacaattattcacatagcatttgcactgtattaggtactataggtaatcaggagatgctgtagatgggaggatgtctgtaggttacacacaaatgctgtgccactttatatcaggggcttgagcatcctcacattttgatatttaagggaggtcctggaaccaattccccagatactgagggtccactgtctgtgtcccctcgccccaccttgcctttgtctcctgtctcctatctccaccctgcctcccgccagcctgttgctcctgacctgcccgggcaccctggagcagcaccctatctcagagcctggctcagtgtgttcacttctgcagagaaactaacttgcccaagtccacactcaaaacataggcattgctgagatgtgaaaagcagctgtggatgctttctgctacagtctgtgtgttcttttccatatctgaataaaaggtcaccaccatttgtattttaaagagaaagagaatttatgggtggaaattggggattccctcattctcagtcagacagaaaagagggccccattgtgtgcctgattgcaaataaatttagcttcctcagcccaagaatagcagaagggttaaaataaagtctgtatttatggctctgtcaaaggaaggcccctgccttggcagccagccggaattagcagggcagcagatgcctgactcagtgcagcatggatttcccatagggagcctgggggcacagcacagagagaccacttctctttagaaatgggtcccgggcagccaggcagcctttagtcactgtagattgaatgctctgtccatttcaaaacctgggactggtctattgaaagagcttatccagctactctttgcagaggtgctgtgggcagggtccccagcccaaatgcccacccatttcccagagcacagtcagggccaagcctggcctgtggggaagggaggcctttctccctgctggctcggtgctccccggatgccttctccatcgcttgtcctctgcagcacccacagccagcgttcctgatgtgcagggtcagtcattacccagggtgttccggaccccacacagattcctacaggccctcatgatattttaaaacacagcatcctcaaccttgaggcggaggtcttcataacaaagatactatcagttcccaaactcagagatcaggtgactccgactcctcctttatccaatgtgctcctcatggccactgttgcctgggcctctctgtcatggggaatccccagatgcacccaggaggggccctctcccactgcatctgtcacttcacagccctgcgtaaacgtccctgtgctaggtcttttgcaggcacagcttttcctccatgagtacgtattttgaaactcaagatcgcattcatgcgtcttcacctggaaggggtccatgtgcccctccttctggccaccatgcgaagccacactgacgtgcctctccctccctccaggaagcctacgtgatggccagcgtggacaacccccacgtgtgccgcctgctgggcatctgcctcacctccaccgtgcagctcatcacgcagctcatgcccttcggctgcctcctggactatgtccgggaacacaaagacaatattggctcccagtacctgctcaactggtgtgtgcagatcgcaaaggtaatcagggaagggagatacggggaggggagataaggagccaggatcctcacatgcggtctgcgctcctgggatagcaagagtttgccatggggatatgtgtgtgcgtgcatgcagcacacacacattcctttattttggattcaatcaagttgatcttcttgtgcacaaatcagtgcctgtcccatctgcatgtggaaactctcatcaatcagctacctttgaagaattttctctttattgagtgctcagtgtggtctgatgtctctgttcttatttctctggaattctttgtgaatactgtggtgatttgtagtggagaaggaatattgcttcccccattcaggacttgataacaaggtaagcaagccaggccaaggccaggaggacccaggtgatagtggtggagtggagcaggtgccttgcaggaggcccagtgaggaggtgcaaggagctgacagagggcgcagctgctgctgctatgtggctggggccttggctaagtgtccccctttccacaggctcgctccagagccagggcggggctgagagagcagagtggtcaggtagccctgcctgggtgctggagacaggcacagaacaacaagccaggtatttcacagctggtgcggacccagaaagacttctgcttttgccccaaacccctcccatctccatcccagtcttgcatcagttatttgcactcaacttgctaagtcctatttttttctaacaatgggtatacatttcatcccattgactttaaaggatttgcaggcaggccctgtctctgagaatacgccgttgcccgtcatctctctccgacagcagggcagggggtccagagatgtgccagggaccagagggagggagcagacacccacccggcctgggcaggtcctcctcattgcttgcatccgcctggttagcagtggcagtcagtcctgccgagtcattcgtgaggcgctcacccaactccaggcagatgtaaaaggtgacctacaagaagacaaacaaaaacatctggagcgctcttatgccagcatctgcccttgacaccaccaggcaggctgttgctgggagccgtggtgcttgggtaagctccttcccatggcagagctcctgggacgcattgtagaagcagggaccacctcccaggataaccagatagcagcacaccctgcacagccccttttactccagcatcatcgggcattgatatctcagctgcagccacaggcggcccccagcaccccaggaagtggggagcgctcatgcttctctgagcacaaaaatcactgaatatttttgccattctcatggtcataacccgggccacagagtagaacactcctatcactgttgttagacagtggtcctgggagagggtcttgtgtgcctcggatgccagggcctctttttattgggaggtgcttgttatttctgtgtgtggctgcatttgtttcccaagactgccacaacaaatcatcaccaacttggtagctcaacatagcacagctttattccctcctggctctggaggccaggtgtctaaaaggccatgctcccacaatggttctgaggaggatccttcctgcctctctggcttctggtggctccagcatccctgggctgtggctgcacctccccatgtcaacctccgtcttcacaaggccttttcctgtgtctctgcaaccacaggcccctctcctttctcttaataaagataccagtcattgagtttgaaaattgctaagagagtctgttgtaaatcttcttagcacaaaaaaaaatgacagatatgtgaagtggtagatatattaattagtttgatttgatcactccgctatgtgtataaatgtcaaaacaaacattgcactccataaatatatatattaaaaaagatcccagtcattgcatttaggacccaccctaaatccaggatgatttcatttcaagacttttaactagatttgcaaaaccccatttccaaataaggtcacattctgcagttttgggtagacgtgaaatgtggagacactgtgcaacccactgtcttggggagggggtggtcagcctggggcagatgttgctgggtgtggagctacatccactcatgccctgacctggaacccagacctgcttccccagctctcctcctggttatctgaagcagggaatggagagcactgccctccttgcccaggcagtctctatcacctggttttagtttcttcttagcacatattgccccagaatatctggttggtttatggcttacttgagtttgtgcctacctgtcccaaccgggaggtgagccctggctattccccaaacccggccctgcatgtgggagctgcccttcctccgttcatcagagggggccaacagtccacagctgttcttaatcatctcccagtaacccccagctccacaaaggtgactccttacatggtggagaggtggtcgggccatccgtgtgaaatgtgtatgtgaccgttttccttaaggggcacgtagtcttggcaggtttcgctcaatataggatgagctcaggactccagtggactgtggattcagatctggattctggcgcattcgccgtgtgaacgggggcacgttgctggcctgtctgcgcctcgtctcccgactgtggagtgtgttctgccccttgtctttctgggaggtagggagggcagtgagccccttcgcatcgcccaccacaggcccagcacatggctgatccccactgagtgttcttttcctcctttgatcccctttggctgacctaggttggagcagccactaaaatatacccagaaacatcttcctaatctacatctgtgccaaccctcattccctggcgcagcatgaccatcacatgcccgccattgttcctgatctctgctgctcatgacctgctctccagcgctccttctcatgctcacattccagttggcctgacctagataagtggaggtttatttgaccccaaaaattagccttctacaaacgaatataatagtgtccattacagagaataaacttagtgcgtgtcccatttaagcagaagttactgaaagcctgagtttaagtttccagggcctgaaagttttccatgacagttttctgcataatattacctacaatttcaatctgttatttaaagccattcttgtgtttgttgtactttgattagctttattttgatttgaagtccttttacattacgggcagttaacgctttgtctctgttagatttgctttttagttcacaagagaaacctcattcctctgtatttgaatagttgcaatgatggaacagctgtccctggagggaaatgaaaacagtgattccccaaattgtgacaatagaaatttgctcttgggttacttacaatgtatctgagtattaaaaaattttctttttaaacgtttgaagtaaaactacccagaaacacttagtggctgaccagaaactaaactcctggcatcctcaaaatgggatttattggcttataaatgtcctgtgttgactcacaaaggcacaaactatctaggtaagttttcttctaaatgttgatgggagagctggccactgttatgcaagtttcattgtcctgactaaactgccaaagagattacataaaattatatcaactagacaaaaggaaaaaggaaaaaaaacagaggtgtcttgggaggaatccatatgagaccagtagaccatgagagagacatcccttgccatctacaaggaaaatggattttgttctccatatgcaaaaccatctcaggagcttgcggagacaccacttgcttactagccagaaagagcaggtgcctcctaaattccccacacaggagctcacagtggctttcatgcactgggattaagttagacttaagaaagcctgtctactcttcctgggatttacaagccagctagtaaatcccagaataaatcacacggcacagtcatccaaagatcccgtcatccgtgccgtttggaaagccctgctcctgtgccaccctctccccgtggagcctcccatgcccaggactgcagagtcctgccattcagactgcaactcatctcacattcttccaaactatttggacaacagagctttctcatcacctaatgcagattacagtctcacagaattgagtgttcaggcagacactgatgtggttctgtagtacagcaaacaatatcagtttacagtcctgaggccaggcctggtgaacaacgcacggtagcggtggggcagggttctcagaatgaaactggcttacacatggcactctctgaccacaactgtataagcaccaaactacacttagttccatctatgaggtaaaatttaatgcagatgaacatcaaagaaaacgtcaaaggctcctttttacaagtacgtgggctacttaatttggtccaagtccattttaaaaagccctaggtgctttcacggctctgctactgacaagaagccccagtgcctgtgagctgctaatgggagggagaggaagatgagctgagtgggccgggctatcccgtccacaccgggagacagggaaggagactccaagctggtggtgccagcacattccaggccactcaggcctattcctaggtgccaggtcacgaaaaccacgctgacagatcgtgctgtgtgcgtgtcatagcacacaagcaggactgtgagagagtgaaagtgacactgggtggagcactgaggaagggccacagtgtgttggtggagataggctgtcatggagaagagaccctggcttgctctacattgcttccaatgcaactgcaaggcaggtcccagagggctccggccttcgtcatccaggtttgctccctcccctcatggctttcccatcctcagatgaggactcggcagagcctacccctgctgactaactgtggccccagggtggtgactcagccctgcacctcctgatcccgtctgcactgggccagagaggatgacttacccagcacgttcacatcacacagctttgtggattcctaggtccaaggaccagagatttcagttatgtgagttattttttttatttgttcttgcgtattccacaaagggtcgcagctaaacttaacctaatgatcactttagtatatcactaaaaagacaaagctcacagtgctgttgaagcacattcatcatctttagacattttgactagttatttcttaagcatttacctgctagtgttaagcatcacatgaaatacatatagaagtaagacaaaatttcttatctccccaagtttgccaacaaatacagagcaggaagggaagcaggtcagagcaggaggcgcagctatagtgaggccaccatgcaaggcacagggagggtgagctccaagtttgaatggaatgggtctgtcagccaagccccctggctctgggaagatagcagtgaacaagccagatggcccctcaccctccagagccgtgagtcctgcagaccaaacagcgtgacaggtcctttccctgtccaggaggcctctgtgggtgagagttggctgcggacagggcgtgaaggcacttgagggtggggaagtgactctgactgggagatgctgaggacagggaggaaaccaccagataagggacactggggaggaggggtggacccctcagggccaagcacatggagcctcatcacaaaggcaagatggtggccaaattcaaggtcgctgcaaaaggaatggagaagagagaatagatttggcatttggaggaaatggtgacaatcatgagcacctacccgggactctccatgggtgctatctctacataaactcattccaccctctgattaatccattctacatatggggaaacaaaggcatgcggtgtttacgtcacttgccaagatctcaggatttgatccaggtggcctggttccatggtgcagcctctcagcctgcatggatgccccagctcagagcatgactctcaggacaggggtcccagcagccctccctccctgagcagcagggtgcccgtgctgcaccacttctgtctaggaataggacattctgacactttcctgcctcttccgaggtctagcacttactctatgcctgcctgggaaggtggcaagctggcctgaggaacagactcttccattttttagggagctcaaggccacagatgctctgagatctggagtccagagacaggagcggaggcttctcctggtgaccactctgcttaaaaacttcatcagatccgtagtttcagagcccccctgaaccccatcccttacctctaccagttgcaggtgggtctctggggtggggctgccctccccaccagcaccccaagggctaaaaggttgaggggagaacaccatcatttgtacagggggatcctggaagatgaggcctgagaaagccctgcggggcccctcaccttctccctagctgtggccaagagtgtctggccttgcctgcctcaggaccagcccaaagtggaggtgagaggtgagccccagcccccaggggaagggtgatggtggtcttggtctcagcatggttctggtagaggtgggttattttgaagatgatgaaccttaagcctctttctgatcttgctttaaataaatacttctgaacaacagcaacaacagaatagtgttgataggaaagccctccactccaccagaaccacgcggccttctcgtcctcccctcctccacttccttcctaagtcactgctccatgagctcttccacaggagatttacaaaatagaacacaaacaatccagttcccgcctctcactctgaactcctcccaagactcgtggggtgcggcagcccctgggaacacccagcccttcaaggtcaaacacagcccccgcccctcactctggggtaccctgccagaataagccccgacagccatgtggagcagagccttcttttttgtaagtggaagttccaggctggcttttcaaatccccttttaacctcagtgctgtatttcaaaattcattccagttttcctgtagtaattaacaaaaataaatattttaatttcaattaaagtgagggtctcggagaagaagcaggaactgagtttcctgagaggccccgctgaggctttgttgatatttcttcctgcgacctctgctcggaccctgggagctcacaggccgtatcgcagctcttatctttggggaccagttaaagcataactgcgccaggcacagagttgtcctttcaaatgtgccggcagtgggacggagacccatgcgtcaagtctcctctaagttcacatgggattctctccttgtcccaaagctgtctctgacttaaaaccctccaactgattacctgaattccagaatatgtcctgtgctctctgccctttcccacgcctttggtgaagaccggtgttctgaggaaacagacactgtgtagaaatggctcaggtcctttaaagccctggtgtgaggagtggggaagggctgggccagaggtcagctggatttgttagattgacagagtgacgcggacttccccagaggcacgggaccaaggtgcatgctcacgctgtctcatgctctcacacataatgtgtgtgtgtgtgtgtgtgtatatatatatacacatatacatatatatatatacacacatatgcatatatataaaaccccaagcagcctctggcttagcaggtgcatttcccagcagggcaattaaagccatggtcccagtagtggtcttggggtctcagggtatttggtctgtgcagccacatgcttcagtctctggaccccaggtcatctaacgaggtggtcgtgtggggactgggatagaaaaggtgtctgcacggacgtgtgtgaaagggctggcacatcgccagtgctcagcactgtcagctgctatcaccagtcattcaatcattcattcattcagttgttcattcttcaacaggccgttttaaaaatgtgcccagtataccaaaatctccgctaagcatttaaagaggcagaatgaaagttagcagtggtggtgaaacgaagctgggaatgtgctctgagggcctccttgtgggcttaatgaatatgtagaaaccacgcattttaaatagagagggagaaagggagaggttcctggtcctctgcatggggacttgtgtgtggctctttactgtaggcctgtgccactcctgctcaacagctaccacagaggacgccttcaacaaatgtgaagaacgaacaaaaggtacaaatgtgaagaacgaacagggtagaaagaaaggagaaagcaagggtgagggtgagaaatcaagggacagagaagagagaagaggagatagcctgggagttcacacagccaagaaggtagacactcagttgaaccagcaagaggctgagcctaactctccctttcgaatgggcaggagttcatgatatttaataaacagaggccttgctctgtaagagacagggtaccaggcagagagcaagtcagcatcgcaggagtcaaacgaggcagacagcgggggcagggagcttgcctctgaaggagacccaggctgccagagtagcagggagtctgggccagtcctcttttgggaagcgcttcctcggcttctgccccccctctcctctccctttccacccaccatcctgacataatacttcctaatctggaagtgttgtccagagaagaacctgctcatttcctcttaagtaggcagggaagcactaacgtccagcagcatcggaaacccgtaggagcgctctcggcagtgcagggtgaggggacagtccatgtagtcatgagacgtgggtgtcaggcaagcgtctcttttccaaaagagaaaaacattaaaggcctcacaaacggcgcccaaagactaattctgcatagcatctttgcgagaccctaggttcttatgatgactggttttgcctgagaaagaaaaaattttaattttgctctgacatgccaattcaacaaatcattttcacataatattcatgcaaaaaaaaaacaatttgccagaaaacttgggaatccatccacatctacagcttttccctgcagtcacactacagtgggatccctccatacaggagcggcagagtggagcaggctagagatgcctgtttgtttctgtttgctgcaccgcagcaagcatttctgtcgtgcccactctgtactagaaagtacatgaacatcagccataaagggaactagaaaggtggcccaccctcttggtggagagagaagagagtgtggtagaaacaataataagaagtctgcagaacttgacccctcccagcctctcccacctgccagcctggcccttgcagagagatgcaggctgccattcttaggccaaagcctgggacagttgggctcagcaaggtaggcatccgtcaagcaaggaggagcaggggtcagcagtgaccccagcagccagcagggagaaaggtgcatgtgacaaggacaccagaggccgtgggtcaggatcagccagggtcagggtagcatttctaggaattcactctgttgggcgctgtgctggctgcttctcacatattattcctttcttactctcagagcagagatttcaattgcagcgagattgtggaggcagccagggaggtggggagggtggtgtcttctaaaagcattttcagtatccatgtggtttcagtaataataataataataaaccagtgaaaagtaaaacaggacaaaaatcttcataggcagtgaaccatatcagagagtccaagaaagcacaatgagagtgtggcttaaaaaccctgaacgacattcctttgcaccagcttggtgaggagggcatggtccccgccaccccccacccccactttgcagataaaccacatgcaggaaggtcagcctggcaagtccagtaagttcaagcccaggtctcaactgggcagcagagctcctgctcttctttgtcctcatatacgagcacctctggacttaaaacttgaggaactggatggagaaaagttaatggtcagcagcgggttacatcttctttcatgcgcctttccattctttggatcagtagtcactaacgttcgccagccataagtcctcgacgtggagaggctcagagcctggcatgaacatgaccctgaattcggatgcagagcttcttcccatgatgatctgtccctcacagcagggtcttctctgtttcagggcatgaactacttggaggaccgtcgcttggtgcaccgcgacctggcagccaggaacgtactggtgaaaacaccgcagcatgtcaagatcacagattttgggctggccaaactgctgggtgcggaagagaaagaataccatgcagaaggaggcaaagtaaggaggtggctttaggtcagccagcattttcctgacaccagggaccaggctgccttcccactagctgtattgtttaacacatgcaggggaggatgctctccagacattctgggtgagctcgcagcagctgctgctggcagctgggtccagccagggtctcctggtagtgtgagccagagctgctttgggaacagtacttgctgggacagtgaatgaggatgttatccccaggtgatcattagcaaatgttaggtttcagtctctccctgcaggatatataagtccccttcaatagcgcaattgggaaaggtcacagctgccttggtggtccactgctgtcaaggacacctaaggaacaggaaaggccccatgcggacccgagctcccagggctgtctgtggctcgtggctgggacaggcagcaatggagtccttctctcccttcactggctcggtttctcttagggaccctcacagcactaaggggtgcgcgtcccctgtcaggccctcgaatgccctcccacagccaggcccctctgaggtttcactctggcctgcttggctcctagcagccaccaacccatgatgctgggccctgaaaacacacgcagacctggatgagtgaggccactgggcacaaccagggctcccagctcaccagagcagcctgggacacagagggtgctcagaaacctaccagagcagccctgaactccgtcagactgaaatcccctgttgccgggaggaggcgccgggcctgggggacgggtcctggggtgatctggctcgtctgtgtgtgtcactcgtaattaggtccagagtgagttaactttttccaacagagggaaactaatagttgtctcactgcctcatctctcaccatcccaaggtgcctatcaagtggatggcattggaatcaattttacacagaatctatacccaccagagtgatgtctggagctacggtgagtcataatcctgatgctaatgagtttgtactgaggccaagctggcttttattgttagttaatttacattatatcctctgacatgcaagtattttctttcgagataatgactaatgataatgtaatcattgctgtctatctattgtactgagaaaacacggcagaggaaatcgagtccagctgccgtccaaaagtcactggagattgcaatgagctcgtctggcagggtggggggtatgggagggaaagagcttaggaaacggctctccctgcaaagtccaaccaaactttaacgttaaccaaaccattaatgttgccatgaatttgaagtgaaccagagggaggtggcagaagaagcttaatggggaatagttccggtagagaaatgaggcttaagatgaactaccctggcccttatgtgtcagagagaacggcttgacaaacacacactgaggatgtctgcagggataaaagaagaaagggagatgacccttgcttctcgctctcgggaggaccatctggtccggccctggggattctctgtttcctcttctgaatcccagtgttgcccagcactggcctgtacccatcctcacgagggccgctctcctcacccggccctaggtccctgccctgtcctgagcctacaggggcctcccatgttgagaaagtgttgctgacacattgtctctgaccgctgtgccaggcattttctgctgaattaccgcacttggtccttgaatttcacccagcaacttactgaaaggctggaacccatgaacctaccccttcactgaggaaaataagttaccccagccatctacagcgacaggagcaagggaggagtcgcctcacctctctagaaatgtgtatttgaggagaacactattgaaatgaatttccaagaataatctagtcagtattacaaaagcaaaattatttgggatatcgtccttttttacttagtattttttctttttcctatagcattattaactttctgattttccaaatacatacacatttttaaatttcctgagtctttatctcttctgttaaaatgtaagatttatgatacaaaggcagagatttgtgtccatgaataagtgaagtttggtgtgcacctgtgagctgagccacctcaattaatggaacagataaggaaataaaggtctgctgatgcattgttatttacagccattttcagaatgtatctcctctccacgagggaactgcagggtcctgccccaagccatttattttgtcctcaagcagcccgcccctcccactccaggcacagcccggtctcctgctggtctcccctcttcccacttgctccccctcatctatgctccagacagaggccacatatattttttaacttttttttttttttttttgagacagagtcttgccctgtcacccaggctggagtgcagtggtgcagtctcggctcactgcaacctccacctcccgggttcaagtgattctcctgcctcagcctcctgagtagctgggattacaggcgcacaccaccatgcccagctaattttttgtatctctagttgagacagggtttcactatgttggccaggctggtctcgaactcctgacctcatgatctgcccgcctcggcctcccaaagtgcatattttttaactttatcagacttttcattctctgctcaacatctttctttggtcctccaggtatgttcagataaaacctgagcacctggccatgactgatgggttgctgggccatctggccctggcaactctcccgtccaccaggtccccctcccgtcacgctccaggcatagcctgtgtgtgccagcgcaatgcccacactccatgcacaagtggaagccctctcaaagtcagtggcttagtgccttgatgtggtcacacccattctcaggaagtccgttcccactgaaaacattgtgtgttttcaacatcattgaggctgccacggcagattataatcactggcctaggcagcccactggaactaccagaccatgagcctgaattttttgtttaaaaatcatatcctgttttctctactctctagtctctagtcaaggtgaattattcaatttaataaattaggggcctagtgtgttgtaccaaggagctaaaaagagagaactcgcaacaccttccagcccattctccacctaacactggctatactggctctcctctctctcgctgtttgttccaaaatctaataacctgtcttcccactagaattcatcatacatgtttaaaaacctagttaaatagtagttaaactgactgcatagatctggaaatgagacagtctttcttttacaaatccatatagactatgagttgggggcaggggatgacacaagaatctattttcttgcccccaaaccattgctttccttccaatgttaagcttgtattctgtgtattaattcaggtggttccgtttgggaatggcctctgttacccagagatgggagggccatcagaactcggggttgtctgaaaaaacactggttctaaaattatcactgctttcacttgtttttaaccatcatagttgtttgattttgaaggaaaaacatgagggtttttattctatgcttgttatatctatattgtggtttcgtattttttagattttagtacctgacatttttttaacttttattttaggttcaggggtacatgtgcaggtttgttatataggtaaatttgtgtcatgggggtttgttacacagattattttatcacccagggattaagcctagtacccattagttatttttcctgatcctctccctcctcccatcctccaccgtcctatagaccccagtgtgtgttgttcccctctaagtgtccatgtgttctcatcatttagctcccacttataagtaagaacatgcggtatttgattttctgttcctgcattagtttgctagggatgatggcctctagctccatccatgttcttgcaaagtacatgatctcattctcttttgtggctgcctagtgttccatggtgtatatgtaccacattttctttatccagtctgtcattgatgggcatttaggttgattccatgtctttgctattgtaaatagtgctgcagtgaaaatacgcatgcatatgtctttatggtagaatgatttatattcctttgagtaatgggattgccgggtcaaatggtagttctgtttttagctatctgagaaattgccacactcttttccacaataattgaactaatttacattcccaccaacagtgtaaaagcattcctttttctccacaacctcaccagcatgtgttgggatttttttttttttttacttttcaataatagccatctgactggtatgagatggtatctcagtgtggttttgatttttatttctttaatgatcagtgatgttaagctctttttcatatacttgttggctgcatgtatgtcttcttctaaaaagtgtctgctcatgtcctttgcccactttttaatgggattgtttaattttttcttgtgaatttacttaagttccttatagatgctggttattagacccttctcagatttgtagcttgcaaaaatgttcacccattctgtgggttgtcttcactctgatgatagtttcttttgctgtgcagaagatcttcagtttagttagatcccatttgtcaatttttgcttttgttgcaattgcttgatgtgttttcatcatgaaatcttagcccattcctatatccagaatggtattacctaggttgtcttccagggtttttatagtttggggttttacatttaagtctttaatccatgttgagtttatttttgtgtatggtgtaaggaaggagtccagtttcaatcttcttcatggctagctagtcatcatttattgagtagggagtcctttattcattgcttttttttttttgtcaactttgtcaacgatcacatggttgtaggtgtgcagccttatttctgggctctctattctgtttcattggtctgtatgtctgtttctgtactagtaccatgctgttttggttactgtatccctgtagtttaaagtcaggtagcatcatgcttccagctttgttctttttgcttaggattgccttggcaattcaggctcttttttggttccatgtgaatttttaaattgtattttctagttctgtgaagaatctcattggtagtgtgataggagtaacattgaatctataaaatactttgggcagtatagtcattttaatgatattgattctttctatccatgagcatggaatgtttttccatttgtttgtgtcatctctgatttctttaagcagtgttttgtggttcttattgtagagatctttcactttcctggtttactgtatttctaggtattttattctttttgtggcaattgtgaattgaattgcattcctgatttggttctcagcttgactgttgttggcatattggaatgctaattatttttgtacattgattttgtacaactgagtcttcactgaagttgtttatcagcttaaggggttttgggtcaagactatggggttttctagatataggatcatgtcatctgcaaacagagatagctgttttcctctcttcctgtttggatgtccattatttctttctctcacctgatttatctggccaggacttccaatactatgttaaataggagtgttgagagagggaatccttgtcttgtgtcaattttcaaggggaatgttttcaacttttgcccattcaatatgatgttggctgtgggtttgccatagatggctaatatgttgaggtttgttctttaaatacctagtttattgagaattttaaacatgttgaattttattgagagccttttctgcatctattgagatgatcatgtggcttttgtccttagttctgtttgtgtggtgaatcacatttattgatttgcatatgttgaaccaatcttgcatcccagggatgaagccgacttgattgtggtggcttaagctttttgatgtgctgctggattcgatttgccagtattttgttgaggatttttatgtctatgttcatcagagatattggcctgaagttttctttttttgttgtatctctgccaagctttggtatcaggatgacattggcctcatagaatgagttaaggaagagtccctccttctcaatttttttggaatagtttcagtaggaatggtaccagctttttttgtacatcttgtagaatttggctatgaatccatctagtcttaggctttgttttggttggtaggctatttattactgattcaattttggagctcattattggtctgttcagggattcagtttcttcctgaggtttttatttttatcaaatggaacttaagctttttcatttccaatttttttatgatctaaaaatgtgcagtttacagccctgttcagaatctgcatcttcctcattctgcagatacaggtccctcagagcaggtgactgagtgtgtatcctgtctggagcataatacttatgctagtagagttactgttgtctttattgttaattaccaaagtttaccacttatcagtcacttactacttgctgggcattgcactaagcatttcagttgtattatcttgttgggtccttacagcaatcctgtgaaacagatactgctattaccccactttatagagaggtagactgaggcttccagcattgaagcaaattgcccaagactacagaaatgtaggtttctaaacatcaagaaacagtaaccagtaatgatgactaaagcaagggattgtgattgttcattcatgatcccactgccttcttttcttgcttcatcctctcaggggtgactgtttgggagttgatgacctttggatccaagccatatgacggaatccctgccagcgagatctcctccatcctggagaaaggagaacgcctccctcagccacccatatgtaccatcgatgtctacatgatcatggtcaagtgtgagtgactggtgggtctgtccacactgcctagctgagccttggtggctgctcttagccaaacagctgaggcctttgcatccctggagaaatgtcatcacattacttaaggcaggcacacaaatccagaaacatctgtaaataccccttcaagcattcttttaaagacacttcttgactcattgggcagtatgacctgacatttgcccatgtttgcaagcaaataaataaaactaaagtcttccgcaagccattacaccaaaatattctattcgctgagttactcaatgaaataccgagttgccctatattttgaagcctgttaccagagagactgaatgtttttaaatgcatggcagtgagtaacaacataaggctaatagagtcaacatttctgctttgacttaaaccttttaaaccagtggatttatgtgaagtctctgcagtgtggcatttaaacatttcaatctaaataagagtgtgtaatttgattgatgctattattctaccagattcacgagtgcagtgggctctggaggtagcattacatgcatgggatgagcatttgcaaaagaaagttgtatagggaatatgacagagccaagttaatgtaaatattaatgcctttctgaactctaggccacagagttgatcttttttaacttccttggtttgggctaaggaagctgtgatccagagaagccacgtgatttgtctaaggtcacatagcagtctggcctaaaatagcttgatatgctgtggatggaaaataaatgtgatccctcaagaggcatgaggatttccaggcagtagccatacctccaaattgtttaatctggatttagattgttgggtagtcacatgcagcagcacagttaacagtgtgtcctcctgtggaagttgccagcacagccagccctctcacttgcatgcatgcccaccagccttctcacttgcatgcatgcccactgggtatgtgctgtactggagacgccgggggtaggggcccagtcccaaccccaaattctttaaagcctatttttctaagttgcatctggtttcctacctgaaggaatgctaagggtggatgttgagtgaggaccttggtgcagggcaccctgcagtcaggatagttcatggagagcaattgtacagacccacactgctccatcccctcaggcgtaacacaggatgctgaccccaggaagagtgggcgtagaaaaactagagggcattattgttattctgattcaaatgtacagtgctggcatggtctttaaacagtaaccagtactagctggccaagacagaaaagtctaccacaaagacttggttctttcatcacttatttgactggaagtgtcgcatcaccaatgccttctttaagcaatgccatctttatcatttcttccagtgttctaattgcactgttttttctcattccttccccaggctggatgatagacgcagatagtcgcccaaagttccgtgagttgatcatcgaattctccaaaatggcccgagacccccagcgctaccttgtcattcaggtacaaattgcagtctgtgcttccattgggaagagtccctctaatgagcatctcatgtcactgtgttctgtcacatgccagcctggcctccctgtgtcccagatcgcattattaaaccctccagcgcattagagcaagcctcagtaaggcgcaggccacatcgtgaactaagcagcatccgtgagtggggcccacccaactccatctccccctccccgtctgaactctcctctggtgctcgtcctcactgtccggctagccaaagcctcagctgggtctaagagagaagcatggtctattgggctttggtgtcaggcagacgtggcttcacacccctgactctccacttcttcgcatcacccaggcagccgatccacctatctccttccataacacaggaataccaaaaccaagctcacaggattgtctcaaagattcaataaaatatgttgcaaaatacgctccctaacacctcacagcaaggtgcacactcgatgaatgctgcagcttcttccctttctgtttcctcagaagctatttgaatctcatgtaggggctttcaagcatcaaaggatggttcatgttttattttaaggcacccacatcatgtcatgaggggaggcagctataatttagagaaccaagggggatttcattataacaaaattggcaaacacacaggcacctgctggcaatagacccctgctcctatagccaagaagtggaatagcatctctacgggccattctaatagcctcaaaatctctgcaccagggggatgaaagaatgcatttgccaagtcctacagactccaacttctaccgtgccctgatggatgaagaagacatggacgacgtggtggatgccgacgagtacctcatcccacagcagggcttcttcagcagcccctccacgtcacggactcccctcctgagctctctggtatgaaatctctgtctctctctctctctcaagctgtgtctactcatttgaacaaattgaattttagggaaaataaccatctagtgaaactcacatggatatgaagtcaattttaaccaaatggtaaaatcaaaatcaaaataaattaagtgtattaattattttgttgcattgcaacaacttgattgtaagccttttaggtccactatggaatgtaattaaatcaaaactaaacctagttgctctaaaactaacgattaagacaaaaattaaacaccttcacaatataccctccatgaggcacaccacctgcattcaggaaaagtggatgagatgtggtacaagcattccatgggcaacttctctgtttctttttcagagtgcaaccagcaacaattccaccgtggcttgcattgatagaaatggggtatgtatgaacaccttataagccagaatttacagctctccactatggctctattttacatggaaaatgccttaacctaaataattttaacccagataatcttgagttttcttcctgtgtgggtttttccctgcacggctgtcacgcctcacagtgccgttcaaagcgtgactcctggaccagtagtagcatcgcctggccttgttagaaacgccatttttcaggccactgccccagtttgaccaaatcaggacctctgggggtggcacccagtagtctatgtttgagccactttccaggtgatgctgatgtctgttgaagtgtgaggccgtggtctagaccgcactgtgccatgcagaaaccactagccacatgtggctacttcaacttaaatgttaatgagttaaaatgaaataaaatataaaattcagtttctcacacatgtgaagtgtccagtagccacacgtggctagtggtgaccgtattgaagagcaccgctcatagcacacctccctcactgcggaaagttctgctgtacagcacccagcacagccctgctgcccaccctgcagcctgtggcccagtagcaccagcacccaccagggtgcagactctcaggcctgcccaacctactaatcagaaccagcatctcaaggagatctcgggtgatttttgcaaacactgaagttggggcagccctgaccggagtaaccttccctcatttcctcctgcagctgcaaagctgtcccatcaaggaagacagcttcttgcagcgatacagctcagaccccacaggcgccttgactgaggacagcatagacgacaccttcctcccagtgcctggtgagtggcttgtctggaaacagtcctgctcctcaacctcctcgacccactcagcagcagccagtctccagtgtccaagccaggtgctccctccagcatctccagagggggaaacagtggcagatttgcagacacagtgaagggcgtaaggagcagataaacacatgaccgagcctgcacaagctctttgttgtgtctggttgtttgctgtacctctgttgtaagaatgaatctgcaaaatttctagcttatgaagcaaatcacggacatacacatctgtgtgtgtgagtgttcatgatgtgtgtacatctgtgtatgtgtgtgtgtgtatgtgtgtgtttgtgacagatttgatccctgttctctctgctggctctatcttgacctgtgaaacgtatatttaactaattaaatattagttaatattaataaattttaagctttatccagatactcataacctgctaacacacacacatatacacacacatacacatacacacatatacacacaccacacacatacacagacaccacacacataccatacacagacacatacacatgcacacacatatacacacacacctcaaatacatacacaccacacacacatacatgtatacacacatacacacaccacacatacaccacaaaaaccccacacacatacacatatacacaccacacacaccacatacacacacgtatacacacatatatacacacatacaccatgcatacatacacaccacacatacatacagacacaccacacacacgtacacacaacacacaacacagacacgtacacacactacagacatgtatgcacacatacacacacaccacacatacatacacacagacacatatacactacacacaccattacatacacacgtacacatacaccacacacaccacacatacacacaccacacacacatacgccacacacacaccacaaaaaccgcacacacatacaaacatatacacactacaccacacatacacacacacaccacacaccacacacacacatacacacaccacacacaccacacatacacgcaccacacatacacacacgtagacacaccacacacaccacagaaacacacattaacacaccacatacacatatgtatgtgcatatacacacccacaccccacacacacatgtataaagatttagatatatataaaacatatgttatatatatgttgatgtaatatctaatatctatatatctaatatgtagtttattagctatctaatatctatgtcatatatatcaaaatctttatatataaaaatatgtagaaatctttatacatatgttatatgtatataaagatttagatatataacatatgtaagttatatatatgttagtgtaatatctaatatatagtttattggctatctaatataatataaacagattatcaatattataagctattagaaaaatgcaagttaaggcagatgatatacctctttacacaccaactacacacaccaactacacacacacatacacacagacacacacgacacacaccatacacatgtacacacacaccacatatacacaaacgtacacacacaccacacacacatacacaccacacacacaccacacatacatacacatccacacaccacacatgtacacacgccacacacacacatacacaccacatacacatatgtatgcacacatacacaccaacaccacacagacaccacacatgcataaacatatagacatatacacaccacacaccatatgtacacatgtacacacacaccacatatacacacaacacacacaaatacacacaccacacacacaccacaaaaaccccacacacacacaaacatatacaccccacacatacgcatatatacacacacacatacacaccacacacatacacaccacacacacaccacacatacacacacgtacacacaccacacacacaccacagacacacaccacacatacatacacatacacacaccacacacacgtacacacaccacacacaccacagacacacatagacacaccacatacacacccacaccacacacacacaactcataccacacatacatacacaatagacacatacacaccacacacaccatacatacacacgtatacacacaccacatatacacacacgtacacacacaccacacacacccacatgcacacaccacacacacatacaaatatacaccacacacacatacaccacacacacggtgcacatacacacacatatacacacaccagacacacataccacatacacatcacacatatatgtatacatgcatacacatacacacacacatacacacactctcctcaaggcagtttatcctctgagaactttaaatttacaaaagacacatatgtccattactttgagaaggacaggaaagaacccactttcttttgcagcaacagcaagagggccctcccgaggctcctgctccctgtcataagtctccttgttgaggacattcacagggttcagaacccagggatcctgcatgggatggtgctttgctgattacttcacctctgatttctttccactttcagaatacataaaccagtccgttcccaaaaggcccgctggctctgtgcagaatcctgtctatcacaatcagcctctgaaccccgcgcccagcagagacccacactaccaggacccccacagcactgcagtgggcaaccccgagtatctcaacactgtccagcccacctgtgtcaacagcacattcgacagccctgcccactgggcccagaaaggcagccaccaaattagcctggacaaccctgactaccagcaggacttctttcccaaggaagccaagccaaatggcatctttaagggctccacagctgaaaatgcagaatacctaagggtcgcgccacaaagcagtgaatttattggagcatgaccacggaggatagtatgagccctaaaaatccagactctttcgatacccaggaccaagccacagcaggtcctccatcccaacagccatgcccgcattagctcttagacccacagactggttttgcaacgtttacaccgactagccaggaagtacttccacctcgggcacattttgggaagttgcattcctttgtcttcaaactgtgaagcatttacagaaacgcatccagcaagaatattgtccctttgagcagaaatttatctttcaaagaggtatatttgaaaaaaaaaaaaagtatatgtgaggatttttattgattggggatcttggagtttttcattgtcgctattgatttttacttcaatgggctcttccaacaaggaagaagcttgctggtagcacttgctaccctgagttcatccaggcccaactgtgagcaaggagcacaagccacaagtcttccagaggatgcttgattccagtggttctgcttcaaggcttccactgcaaaacactaaagatccaagaaggccttcatggccccagcaggccggatcggtactgtatcaagtcatggcaggtacagtaggataagccactctgtcccttcctgggcaaagaagaaacggaggggatggaattcttccttagacttacttttgtaaaaatgtccccacggtacttactccccactgatggaccagtggtttccagtcatgagcgttagactgacttgtttgtcttccattccattgttttgaaactcagtatgctgcccctgtcttgctgtcatgaaatcagcaagagaggatgacacatcaaataataactcggattccagcccacattggattcatcagcatttggaccaatagcccacagctgagaatgtggaatacctaaggatagcaccgcttttgttctcgcaaaaacgtatctcctaatttgaggctcagatgaaatgcatcaggtcctttggggcatagatcagaagactacaaaaatgaagctgctctgaaatctcctttagccatcaccccaaccccccaaaattagtttgtgttacttatggaagatagttttctccttttacttcacttcaaaagctttttactcaaagagtatatgttccctccaggtcagctgcccccaaaccccctccttacgctttgtcacacaaaaagtgtctctgccttgagtcatctattcaagcacttacagctctggccacaacagggcattttacaggtgcgaatgacagtagcattatgagtagtgtggaattcaggtagtaaatatgaaactagggtttgaaattgataatgctttcacaacatttgcagatgttttagaaggaaaaaagttccttcctaaaataatttctctacaattggaagattggaagattcagctagttaggagcccaccttttttcctaatctgtgtgtgccctgtaacctgactggttaacagcagtcctttgtaaacagtgttttaaactctcctagtcaatatccaccccatccaatttatcaaggaagaaatggttcagaaaatattttcagcctacagttatgttcagtcacacacacatacaaaatgttccttttgcttttaaagtaatttttgactcccagatcagtcagagcccctacagcattgttaagaaagtatttgatttttgtctcaatgaaaataaaactatattcatttccactctattatgctctcaaatacccctaagcatctatactagcctggtatgggtatgaaagatacaaagataaataaaacatagtccctgattctaagaaattcacaatttagcaaaggaaatggactcatagatgctaaccttaaaacaacgtgacaaatgccagacaggacccatcagccaggcactgtgagagcacagagcagggaggttgggtcctgcctgaggagacctggaagggaggcctcacaggaggatgaccaggtctcagtcagcggggaggtggaaagtgcaggtgcatcaggggcaccctgaccgaggaaacagctgccagaggcctccactgctaaagtccacataaggctgaggtcagtcaccctaaacaacctgctccctctaagccaggggatgagcttggagcatcccacaagttccctaaaagttgcagcccccagggggattttgagctatcatctctgcacatgcttagtgagaagactacacaacatttctaagaatctgagattttatattgtcagttaaccactttcattattcattcacctcaggacatgcagaaatatttcagtcagaactgggaaacagaaggacctacattctgctgtcacttatgtgtcaagaagcagatgatcgatgaggcaggtcagttgtaagtgagtcacattgtagcattaaattctagtatttttgtagtttgaaacagtaacttaataaaagagcaaaagctattctagctttcttcttcatattttaattttccaccataaagtttagttgctaaattctattaattttaagattgtgcttcccaaaatagttctcacttcatctgtccagggaggcacagttctgtctggtagaagccgcaaagcccttagcctcttcacggatctggcgactgtgatgggcaggtcaggagaggagctgcccaaagtcccatgattttcacctaacagccctgatcagtcagtactcaaagcttggactccatccctgaaggtcttcctgattgatagcctggccttaataccctacagaaagcctgtccattggctgtttcttcctcagtcagttcctggaagaccttaccccatgaccccagcttcagatgtggtctttggaaacagaggtcgaaggaaagtaaggagctgagagctcacattcataggtgccgccagccttcgtgcatcttcttgcatcatctctaaggagctcctctaattacaccatgcccgtcaccccatgagggatcagagaagggatgagtcttctaaactctatattcgctgtgagtccaggttgtaagggggagcactgtggatgcatcctattgcactccagctgatgacaccaaagcttaggtgtttgctgaaagttcttgatgttgtgacttaccacccctgcctcacaactgcagacataaggggactatggattgcttagcaggaaaggcactggttctcaagggcggctgcccttgggaatc

SEQ ID NO: 180 - DNA, 207326 bp, Homo sapiens
  source 1..207326: mol_type = genomic DNA
gccaaacgtggtgaaaccttgtctctactaaaagtacaaaaattagccgggcatggtggcaggtgcctgtaatcctagcaactcaggaggctgaggcaggagaattgcttgaacctgggaagcggaggttgcagtgagccgagatggcgccacttgtactccagctgggcaacagcaagactccatctaaaaaaaaaaaaaaaaaaaaaaaaaaaaaaaactttctgggctgagcacagtggctcatgcctgtaatcccagcactttgggaggccgaagcacaaggattgcttgagctcggagttcaagaccacccagagcaacacggtgagaccccccccccgcctacaaaaaatagctaagtgtggcagcacagacctgtgttctcagctagggagactgaggcgggagaatcacctgagcccaggaggttgaggctgccgtgagctgtgatcataccactgcaccccagagtgaccctgtggcaaaaaaaaaaaaaaaaagaaagaaagaactaactttattttcacttaaagataattcaaatgcctgctcttccaggaagccctcctggatctctcagattgagtttctctcccttctctttaagccatttcattccctctggtctctgcatacagaactaggtagacctagggcctggggggcccagcaaagcccaaccctggggtgatgcctctgggatctccagcccttggctggtcctgccctgcactttgtggggaccaggggaggggctggattggctctgagccaggtacacaagagcatactaagagcttgctggagtgcattctttcaaccagtttttcctgagcacccacactctgccaggaccacatgactgcccctggggatcctgtctccatcccctgtcgacccccaacacgtggcacactcagcacacagtagatgcccgaagtgctggctgcttttggccaaacaatcaaaggcaagggacggccttcctgcagccttggagacagacagcctggctccagatcctgctcacgccccgtactgacccggtggcttgggtgggtcccttaacctctctgtgacatggacatgatggtcgcagcagctctggagagcagtgagatgacaggggtggccacacttcacataactgctggtcccgggcatgtactcagtggtagcatcacttgttattctccttccctaaatgtccgtaaacgtcccttgctggctgggtggaaccgttcccaaggaaagagtgtacaggcattcccaagtccccaggagctggagtcttggggactgaccaagcacctaagggtgcagtggcttctcaagcaacatcctggggctgccccagagaggccctgggcgggggagggcagtgcccagatttatccaccaatcgcacaggctgctggcactgagcacgttcttatctgcccagcccagcatgggggggtggccaggccggccggggcgggacgctgcctggggctggacgcggaggagccccaagccctgctgggtgggtgacagccgctgaggctctgagtgaccctgcaggctggtggccagccggccgcccatcttccacaccatgtcggacggcgagggcccctccgccggtgagtggcagcgctatatttacccgctgtggctccggttgcagagccaaggccgccagtcgccgagggcactggggcccccgcaggctgcaggcagctgtgagctggacccccttcctccttgcccgacgcctggggggcctgtgccgctggaaggggggagcttgactttcaaagctgggttccgccacaccccctgactgcccagtgtagccagtgcaggaagctgtgcctgattcaagctctcctggggctggcagccggggccagagctgacccaggacagaggggcaggggctgcgacgggacccatgggtgggctcaggatgccgtgggccactggaaccgcatgcagacgagtgtgtgtgaacacttaacggcgggggagagcacacagcttccgtctgattccccaagtctgagacctctgggcgttctgagtccctggtccggcagcaccaggcaggccctctgtgtgccctcatatcctctaggttgaaaatggccagcgacacaggcaggcagaagggcgatcagattctggggtctgcccactgccctttgctctgcctgaggccagaggctgtggtggggactggccacctatgtgcctggctggctgcccccggctcctgccagttacagagccagccttggcggaatgggggctggggacggccaaatccagggggactctggagtcaggctgtccaggttcaaattccagttatttcacctccaggctgggtggtcttgggcaggtagcttaacttctctgagcctccgtgtccccaggtaaaaatggagactgtggtcctaaccccccaatggctgtgaaaattaaatttatgatattgtgtgaaagcgcctgtgggtgcctggggtgcactgagtgctcagggccctgcgtgctggcagcaggtgggcaccctgggcagcagatgggcatcccaggcagcccaggcagccaggtctggcctcctccagcagggcctccttcgtaagccaccgattgtcgctggcacgtggattccttctccataaaaccccacctcggaggctctcggaactcatcagggtctcctggggggtgtggggcagatcgtgggtgacagcaccctgcagataccctgttactaatgaacagtgccagcgccttggcctggctgggtaggatttggaacagagcaagtgagagtgtgagagtgtgtgtgtgtgtgtgtgtgtgtgtgagagagagagacagagagagagagagagtgtgtgtgtgtgtgtgtgtgtgtgtgtgtgtgtgttggggaggggtacattgacagaaggggcctgacctcaccctcttccactgggtgccagttgtcctggctgccagaaattgcccgccggggctgcgggagccccgggagccagcagacagctctttctggctggccctgccccacacctgacgctaacccggaatagctctccctctccaccagggacatggccctggttttagcagtttgtaaagccacccgcatggagatgggtatttcaggaaggccaggacaatatttagcccgtcggagcaaaggaatgggcactgagcatgcacgtgtgtgcgcagcctggaggctgggaggtgacgtgggcctcaccatcccttccccatctaggagagggtcagcccagttgggttgggaggtggggcttggattccaggctggctctgtctgccctggtgggcaggtggccctgggcaggctccaggcttggttttcccatctatagaatgccacgtgacggtcttttgtctctaatatgtgggtttgaagttgaacttggctggcaggagtaaaggcggcatcttggtgcaggaaggtatatttacttatgggtagaagggggtcttctggagcacacagtgtgaagttcaggcctttctaggattcctgcccggcagcaaccagtggttgctccaaggacactgctctgaaatattttcacctgttttcagtaaccgatccccaagccgtgtcggcagtgggaacattctcagctctccactcgtgactggtgtgacctagggcagactattcaagggcactgtgcctcagtttccccatccattaggtggggacaatactgggacattaactcctcaacgtgcactaaggattaaatggctaacagcatgtaacacacctaaaataacgccaggcttattgttagtggttatagctcttattatttcaccaatacataagcaacctagagagggagatgaggggagcagaggacccactgtgtcctggacacactgttttgtttattacctggaggtgggggctatcagctccaccgtgtaactaagaacactgaagctcagagaggcacatgtgaggtcacccagctggtcaatggcagagcagggattcgaacccagttcctcagaccctgttagcacagaagccaggttaggcccctcttcccgggagtcccacctgcacacccaaggagggcgaggctggctattttgtggggctttttggcttgcacctgaagaagcagctctcatttcagggttggctagctcaacattgcctccaatagcttgcaacctgtagagaaaaacatagtgccttgttagggtgtcaggaaaattctgcagagcaggagcacagcaggaggtggccggcccctggatttatggccctgtgcctgggtgggtgagccggagctaaggttacccgggagtcagcaccgtatttatagcaggaactctcctgcatcaagtaccggcccacacaccacggccagcaaaggcgcttcctttacagttgcctgcattctaggcttggctctgtctcttcggggcagagtcacgtcacctttctaagcctcagtttcttcatctttaaaatggggggttcgtcaattctctcactgggtctggaaataggatctgtaagtgcttggcacctgcctggcatagatggggcctcagaagatgctggctctacacatcctgggtctgttgattgtcttttcctgcctttgaccttgtgatttacccatctccgtcctggccagaatctgcaggaagagaatccaggtctctgtgctgtaagctgcacccatgcttgggaaagtttccagcaaagcaactttacaatcctaagcaccgaagagcaggctgttctgttttcagcagagcaatgaatgcaggtccatcagagaccagggttcaaatcccagctctaccactccctagctctgtggcctcgggtgagtcacttaacttctgtgagcctctgtgacagatgggcatttgccctgctgcagcaggtatggtaaggacaggcctctaacctgcagaagtgttcagccagcagagtgaccctgtctctcctcctgtgtaaccttccgccagtcccactgccctgctctgggccacagtcaccctgttcgtgtgttgagacatggctgcccttgctggtgcgttttgtaagtgcgtgtgctgggaagttgttcccccgtctttatcacctcccccaatgccctgcagcttctgattctcaccaagacattcagctgggtgagctgacagatccctggtgtccccaaaaggcccccaagtacttggctctccaagtacctctctctgcctgaagtcaaggatggttttccaagcatagggcctgcaaacattagtggggccacccaactgctcactcaattctccctggcatcccagaacccagacagcaccccagctttttgcgcccacccccccccagacctcacagtgggcccctcaccagggaccagggcagcgtccaccttctcttcctgtcccagccacccccagctctcacctcagtttctcctagaaggcctcgccccccaatttatgccatcccagtccccaaggaggtcgcactgctctctgaggtgggggggcctggcgtggtgtcccttccctggatttcagggcagacaagtgctggaaagggtatgagatgcctggagtggccctgggatatgggaacacctctgagatgacctggtgaatcgtgccaacgtggccccctgccctgctcgtaggagtcccgagctgttggatgctacaggcctgtctaggggcagtgggagcctttggtgctgagtgacccagggcagccctccttcgtgtgtgacctcagagaggttaagtattagccatccacaggccagcacacggctctggacacatgtcccgagttctgacatcaagtaccccccacctcagcccctgtgaagggctgggcctgcctgggtctctctgagggtccaagccagactccatgccctgtgccttctgggtgcctgcacatagggtggtggcagggcatgagtccctgaggagcaagaggtggttttatgtgacgtcagtggttgccaaggctggaggcagcaagtggcctgggttttcactgggtttatggttactggccagttcatcccttggggatagggagccagtgaaggctctggagctggggatggagaaggtacatggcttgcttcagtgcagtgggtggaggaattggaaggaggatctggaggcccagaggccaaggaggaggctggtgagatggtcctggggagaaagggtgaggtccacacagaagaggagggacccggaggagggcacagggagatctggcaactgctggggctggggtgctgggacggtgcagtggaggctgagcctgatactgccgcccctattaggagggcccaaaggacatactgtcactttcagggctccatggggtgacctggcagtgtttcagggctcaactgtaaaacttgtggagtgcgtggagggctgggtaagatccgagccccatgtgccctggccctggacacaggcaggtccctctcctctccgagcctcggcggtctcatctgtaaagtagaggtgacaccataagctcaggggtgtcatgggtattggacgggatgactccttttaactccttatgaactgtggggcacaagggaagtgtgggtgatctccaggcatgaacctttgaacagcaccgcaagtgtgccgggcacctgtgatattgacaccaagaaggactcaacctcagcagcatccagcgacctctcacgagaggctgggcaccgggtggggacatgcaggaggaatccgcagttgggaagtcccccttcagtgcccctcacggcgcccctacgttgaggttcacaccgcactcccaacccatgggatctccatgttatggagcaggggaaactgaggcccaagagaaagagagactggctcagtcacccagcgagggcatggtgagctggggctcaggctggattcccaggcacaggtcgagcccctccagcacttttgctgaggtgtctcctacttgtcccatcgtccaggctcagtggaggcctgcctcctccagggacccttccctgagttctgcagcccctggggaccctgcacccttggagcacccatgccctgctacccttcttggatagtagcttcgagtggcaccaccccagaccactgcccttctcacagaagttacgagctgtgggatgttgttaggcatgtccaggtgcggctggatccttcagtactgtgcgatccaggacaggcccccttccgtgtgcggcctgagagatgctgatttgttagcacccacccgcttatctgttatccatccacaggccagcacgtggctctgcacatgcatcccaagtcccgacatcaggcagggccccggtaccttctcagccctgcactcactcggcacacgaacctccaggcagcaaatgaatacattcacatgactgggggccccacgccagtgtcggaagtaccctcgcaggctttttcatctatgacaagagatgcaggttagaaaggcaactcggaaaggaaagctatccacttctgttcttttaaagtattgggtcaattctaagggagcattcttgagatagcaagatagattttattttttatttatcatgtttttaaaacaaaagctttaaaataaaaaaacagctaatggttgcaaatgctaacagcttttgcatttagcatttgcaaccatttcactattttttttcttgaaattcacagtcaaaataaaatatagaaaccagttgctgaggtgggtaaaaggtcgcccatagacacccatttcaaatttccaatttttgcactttgatttcaaaattttgccttcatcaaaacagcctctttggttattttgtttcttactctttttttacataagtcagaatgggatcgggatgctccagaataaacaaatctcaatggctcaataccacaaaggtacacttctaccttataaaaagaccactgcaggtctggtgaccccctccctgctcccagggcaggtccctacacggtgacccagtgtgatgcttccataaagaccaatgttttcccagtcactgcagccagccaagagagagatggcgacacagcaccagttaaatgcacccaccgggaagtaacccaccttgccacagccaaagtttcactggctacagcaagccacatgggcacaccaaatggccagaggacagagtgtgtctctccattaggaacagcagtaatgtctgcacccctttcattgagtttttttcccccgaattgaccgtctgtttctttgtttgtttttcaagtaatccattttaattatgaaatagagcacattgtgtgagctgtggtcaacaggtatccaaaatgtaaatcatgtgatttccaatatgcaaatcataacgccaggggcaagacttttcaaaacatcgctccctcccacggagttgcatttgcattttaaagcacgaaaataaatttctgaatgattcggtcatcacctccagcgaggaaaagcataaccaagaaaaaccttagccagaaatatcttttgactttttatttgctgaggtacaaaagagggtgttggaatgagtaggctgtggaatccgtttattcagtgtaatccacagatccgaaaactgagataggagtttagaaggaaatgatttttgaataatactgggggaaatgatgagaagagcgtgttttcttcactctaatacagatatgcactctctctttgattctatgacaccattaaagagaagctgtgtcatcagtttagtagctggttctcccagttgacttttttttttgagacagactcttgctctgtcacccaggcttgagtgcagtggcacatctcggctcactgcaacctctgcctcccgggtttaagcgattctcctgactcagcctcccaagtagctgggactacatgcatgcgccaccacacctggctaatttttgtatttttggtagagacgaggtttcaccatgttgcccagtctggtctcaaacttctgacctcaaattatccgcctgcttcggcctcccaaagtgctgagatcacaggcatgagccatcatccggccccaaatgacttttaatggtgggcgtgtacatacacatatggcacacacacacgcacacactatgaaacacatttaaataaaactttacagtataacagagggctgtggccacacacatcacacattgctttgtatgagataagatctggtttaaaaataatgtttgcaaagactagaggttgcctacgaaccctgtcataagagtcagtgaatcaacttggattgctagaaataaaaccagaattggacctgatactgctgagctccgtttggggggtcagacattcctgcagtattcagctctgtggtccaccctcgaggccaaactgtttagagaactctctaccaagtttaaacacatcttttaggaatcctgcctcatttattttgggtggaaaaacatgtcaagtgctggtgctggagcagaaaacatccttcctgccacttctcgctcatagtctgagttaacctctgactctgtggacgcttactgagcctgtgctgtgtgcatggtgtactgccaggcactgtggtttgaggctagagcagggaattcagccagccttgggtctccccttgtgggatttgcctctccagcccactctggtgtccttgtccttagggttaatagactgaggttactggtggactaaacaagaatgtatacagtaggcactgaaaaatggcggctccccctcccctaggccctttcacacactcagttccacatgacgccccctttaacctatgtagtcaatgttatcattccattttatagacgagcaaatggagatttagagaaatggagtggcttgcccaaggtcacacagggagtaactgagacagatgggactgagacaggtgcgctgtccccaacctggggtcacccacctcaggagggtcagaaaagtggcactcttttccaaagaagggagctgggtgtggcggtggcttgggggaagggcctttatcaggacccaagcccagcaatcccctctgaacttttcgggaggagggagaggtctcagggggcacctatgtttggagcctggatggaggcttggccctgagcccagctatgtggcggaagcactagcttcaggcaagccctttgcctctggggaggtttccacaggatggggtgggggcggatgtgcagcatgaagagaaacaggagtcttccttgtagcagaagccgaggactcaggaggtgccgcctaagccccagcatctctctggagtggtttcctgctcgcccggggacaacagccaaagcctggtgccccggctctaccccatgggcagagctggctcagtcgcaccccacgccctgggccccctccacgcagcccagggcctcacaccatccccattctgctgctggtggatgcttctgtcaacttcatgcctaagaaggctggctgaggctggcatagagccttgtcctgtgtccccacccctcgagcagggctcctcccacccagggctcccagttcttcctggggagagaagcccaagtggccgggtgctctggtttgttgagcatctgccgcgccctgccctgggcggctcctccgcactcctgtttgctatcctgtgcttgcctccgctctatcgggcgctgtgccccatctcacaaggccagatacccaggataagcatgactaaggaggtagaaaaacaaccaccacccgggcacctgtagtcccagctactcagaaggctgagggaggagaatggcgtgaacccaggaggtggagcttgcagtgagccgagatagcgccactgcactccagccttggtggcagagctagaccccgtctcaaaaaaaaaaaaaaaaaaaggaagaaaagaaaaacagtcaccacctctggaaaaaaaatcatgagctccgaactcccctggaaatgtatagaaatggcgaggagggcactgcgcattcttccaggcctggaccaagggaccagcctctggcccaggagaaaggcaggcccggggtggcacagatcggctccagatgtacagggcacatttggggaatggcagctgtctggcctgatggggggcaggggtctgagggggaaggagaaactctatcctaaagtgggtttggggccacctcggttgcccagttggggggtggcatgttgggtagacagtggagaagggtggatgtcctatgggtgaggggctgtcagagacccaaggaacatcctttctgtgtctattcatgtctcattcaccaaacccaggtctgcactgcaccagggctgggctgcgccttaggaattcatggggcgagcagggtgagcttcagggtcaggcttgggcccgcttcttatctactctctgcaggggctcggagtaaggacacctgccagtcactgggaggcctgagtggaagccaccaagcccacccctggccacacggggacttggtgctgccccaggggtcccgctgcagggtcagcaatgcacgggaaggggcctcatctcaccttagacacttggaaagccaccccctcctggactttcttccttttctttccatcttgaaacactgagctggttgagagagggtaaagacttggcaatgaccgaaaaccagggatgaggtgccctaaagaggttcccttagggccgacagctgtgacatccatgagatcatgcgtgcctgggtgcctgggaggagccccactcactgccaaggcggaattcgcccgggatgcccgggcaggaggtgtggctgcagccaggattcccggggccctgcagggtctgtcaggtgaccctagctaagagcctgtcacagggatggcatcgctgctctgggaaagcccctgcccgcagccccaggacagcccctgcccgcagccccaggcctgcccactcagagcatgtggggtcctgggatccggagcttgccccgaggctgcgggaatatgtggggtgagtggtactcacgtttctccccggtttctgggaggaaaagggaggggccagcgatgctcaaggctgcagctttatagaaagtgtcctgggttccaatcctggctttgttatctttttttttttgtctcagtgacacctttgttgagatgtattatataattcacacatttagacccagcgcagtgactcacacctgcaatcccagcactttgggaggccaaggcaggaggatcccttgagtccaggagttcaagaccagcctgtgcaacaagttcaaggctgtagtgagtcatgatcgctccactgcactccagcctgggcaacagagcgagaccctgtctcaaaaaaaagaaagaaactaaaaataaataaatcacacatttaaaagtatatatccagtggttgttagtatattcagagttgtgcaaccatcaccacaatcaaatttagaacacttccgtcgtccacggaaaaatccaatacccattagtagcgaccccttctagcttcctccccacagcccttggcaaacactcgtccactttgtttctgtagatttgcgtattctgcatttttcatatgagtggaatcctgtaacacgtggccttttgtgcctggattctctcgcttaggaaacatttttgggttcattcgtgttggagcctgtatccatcttcattcattcctattgccgattaataccccagcatatggatataccatgtttcactcgtctgttcaccagtggacgggcatttgggttatttccacgctttggccatgatgagtaacgctgctatgaacactcgtgtaccagtttctgtgtgaacatctgttttcatttcccctgggtgcacaccgggaagcgggatcgccggatcatacggtgactctatgttgagcattttgaggaaccgccaggctgtttccagcggtggctgcgccattttcccttcccacctgcggggcatgctggctctgactcctcacatcttcaccggcacctgttactgtcttctcgcccccccagccatcctagtggtgtgaagtggtatctcactgaggttttcatttgcatttccctagtgtccaatggtgctgagcattttttcacgtgcttattgggcaccacctcttggctttgccaccttaagtctcggttttcatatctgtaaaatggggacaatgacagcacctgcctcacagactgtgatgagggctcagtgagataatgtcagggtcctgggacatttgctgcttgaagctgcaggctggggttagggtccttcctctgaaagctggtatgagggagggacatggagaaagctggaagcctggaggtttctgtgagccccaaacccatgtagacagggacaaacatcagtagcgagggagctgacttaccagcccagccctgggtgatttctgctggagctctgatgctctgctgttctgcggcaggccgagtgaccccgacatgtctacacagccccagtgaaatgcagatggcacacgttcaatgcagacaggctcagcccatcacatgggcttctaatttttctcatggggaattattgggcctctgccccttggctgctccccgatggggtgacatcgtgctccttggacttgctgtgaccggctttgccaagcttgtgtctgtcagtggagagctctggaaggcagccaggagtgtcctcccgcgaggttggctctttctgccccttatcagggaacttctggtggaggtgccgatggtcaggccgattgtgtggccgtcacctgagcctggagccaggcgggaggtaagggagtaccaccagcctgtcacgggtggaaaacaaatccatctctaacagcaggctcactaggttgccccggagggaacaattcacgttccatgctggaatcccgtgggagaagagcggagaggctcccctggtggcccccggatgttcagttgagtctgcagtctgggaaaagcaggtcagatgcgatgaggactccaggctccagggagaggtgctggcagcacatgggggcaggtgggggtcccaggctgtttctgggccctgctgctatgtcctcacccagctggggccacagtagaaagtcagggaggggagcatgactgaggaatcagacagattgctttggcattcaagctcgccaccaagtgctgtgtgatctttgcaagtcagataacctctctgggcctttgtatccttgtgtgcaaaacaaagctgatgacaccttatagggtgcttgctacacatgaactatcacccgtattcaagggcacagtggggggatcagggtgggctttcattttaggtcgagtcccctgaaaagcagagcttctattccatggatgtggcctcctaagacagtcactcaggagaaagctgtgaaggagggaggaaggcaggatgggttctaggtggagtccagcttgattttgttcatagtcacctccaccaccccgagtctaacccgatcgcccctcagttcagggcttcgacctctgcccttgaaggaagcatccatggaaggctggggtggcctgggggagaggtctccctgctcagaagccagagcctggctcagagacgatgctccacaggcattagctccctcgccttccacctccaggcctcggtttccccccctgtgaaatgaactggctggagcaaatgtttttaaagaccttccagtgtagtaatagcctcttttcttaaaaaagaaaattaaaagaaactacccaagcaatcattcccttagccacccatcacatcccaagcacctactgctagccaggccactgctgggtcctggggtacagaggacagtctgcccctcacctgcctccaggagctcacagcagatggacaagcagacggacaatgagagccccgtgtgccatgtactgtgacctgagaaccacaggggggtgggcagggcagccttcctggaggagtagccctgagtcaggtcttgaggcacaagtgggaggtaacaaggggccactgcatggagggtcctgggtgacccagcacggaagcagaggcagcagcagctgctgaatggtcaatcagccattcgactaacatttactgatcagctgcagacaaagatgacagtatgattcccgtccttgggggcagactcttggagcaggggaggtgtcatgcagaaaacggacaagataaatacaaagcccatagtgtgtgtgatggtaaggagggtgctaaggatggggtatcgtgaatcagggacggggtgtcagaacagggctatggagagaggcctggatactcgagaaggacctcagggatgtgaaagaccgggccatggagcttctgagaaaagggtgttcctggcagaagaggcagctggtgcaaaggccctgagttgagagtgtctggtcttttcaaggaagagcagcaaggtcagtttgggcagagtgaaccccagaaccggggcggaagacgagcttagacaggaggggttgggaagacccacaggggtctatctgcagtctgaaaaggatattggtattgaccctgggtgagaagggagccagggagggttttgggcagaggagtgacaggacctcacatccgttttacgggcacgtggcagcaggagggaatgttcattctcagcgagtctgagcatcagaagataagaggaggcaaacccaaggccgttttgccagcccttgctggaggcatccatcacagcgccccagatgccgttactccagagacaccgttaatcgccccaccgcgcagggctgatgtttaatatgccatcagctggctttcttggttcaaacacactgagagctcccagttctttgcctcgagacagcaccagcagcatagcccccagagaagcatttcccttcttatgtacccaggaggacactcgaaattccaagtccttgtccctagattcccccaaggcaaggtctggaaatgatgacacacacccacagtcctacacacataaacacactctcagacacactcatcaccaacgccagggtcgccgggcggaatgcaggacgtccagctgaatttgaatttcagataaacaacaactgttttgtggaagtggaagcatgtcccaaatattgctccttcttggcagctaaggaatctcccctgaattgcccctacaccccagcacctccaggccagcagaaagtgtcctggtcccctgggtgcaggaaggctgtgcccaaggagccagctgcctgctgaggtgccccctggggagagggtgctgtcccagggaagcagtgcctgccttggggcttgggactcagctgccgccacggggcctccagaccctgacccttggtagctggtaaaccacagctttcaggggccaatggtcttcctgtgtggcttcccagccccctttaaggaagtgatttatggctctgagaaaacagggtcagtcgggaggaagcacagggggcctggtttcctttagaaaatacacattaaaaaatacacagttttaaacagcaggtttttttttaatgatgaaacctgaataaggaaacaaacgctacactgtatgaatcaggaaagaactatcccaggaagctggaaggcagggcgtgcaatgaaagaacgaggcctctgacttgaggcagccctggcttttattccccgccctggcatctatgggcaagtggctgcacctggcccagcctcagtttccctcaggatagccataagagggaagcagcgaagccggcacagtgggcaggacacatgtggaggggtcttgcaaagacacctgaggttgatgcctcatcccgcagggaagcagccgcagcccccacccccctacccgcaccccccgcccccccgccgcccccccaccccccactgcccccgcacctgctttccgaggggcatttcatctccacccagtggccatggttggcgcttcagctaacaagacacttcagggggaagtcctcattgcaattaagtccgaacctcctggcctggtaatgctggccctccctggggggtcaagcggatccctgtgggcccctccggcctccctgcccaggacccgccctcacctccacagcccaggcagatggattctccacacactgctcagtgtttctcacctggtgcctgtcagcacccatctcccttcctggaacaccttgtggtccccagcaaagccctccttcactccctctactccctccctggcagggaggggcctcctctgtatggtgacagccagtaagtagcctccatcgctcgtgaggtccgtgtctgcgtctgcctgatagacggtgagcgtctgagggcagggtcggtgtctgagtcatctctaccccagccctggcacatagtaggtgctcagtgggggtcttgctatttctctgttgctgcttgttgccattcttcctttagaaagtgcttagggaaaattgctgtctgcaaggctgcttacaaaaaccatcctgttttctcttccccacaaccgcatcagctaggtggtattatcatccccagtgtacggaccaggagatggaggctcagagtggatcatcacacagctactccatggaggcagaggctccactgctaggctgccaggtggcaaagccagagggctttccaacaagggccccccaccccaggtctgtgtctaagaccctcattggctctgctgctgcatcactggcagctcctggataaatccttcccctctctgggactcagtttcctgatctgtgaaatgggggaagctgcagttgctgatctctaaagtggctcaaccctgggttgcgaggacacagacgttgctggcctttgttggacccctggcatccctggagtgccagccttctgaagatgtttatctgtcccagcactaagctgcttcttgtgacatcatcttaatcctgtctcaggcggtgacatcaccagcttggcggggtcggccagggcaaggagggggccccatctcccagcctggcatgccacctcccctgccccctgcctccccccacggtggcacgcatggcgtttgaagctatgggagtcctctgggggtgcaaagggctccaccagacctctgggtggggccgtgactcccagaccagcctgcctggctccctgtgtgggaggagtaggttacagacggacctcccaggacccactttggtggtcttgaattttggttctctgctttcaacttctgtttgactcaactgtacagctggagatagaggcgtgggcaggcagggtttgcatgcatcaactcacttcttccgagttttgttttgaggacaaatgagtcagcttggcaccccggcacagggcagagagcactggcaaagccctctaccagctgcgttatctcagcacgtctctcagcctcgccaagcctcagtttcctcacctataacgtgggatgaggactatggagcccacgcagtgctggagaaacttctccaggtcatgcctgtgaagcttggcctgagagaggggctcagaggagctgttgcctcccccgccccatgatccggagacagcaggcacctgcctctcgtgtccatgcagcattacaggaggggacaggtggccgtgaggaaaagctgtaaacctaaccagctgtaatcccgctaatggtttatcttcttttcatgagaaggaggcccagcatcctacacggggcagggaacaacaggcctttgtgttcttttgggaaatgggatggagctcagaagaaaagtcaggcgttggtgccttatctttcctggcaaagctggggcctctgggcccaatccctgctggcaaccaaagggtggcatgaataatggaaaggctggcatgcagcttccaggcacccagccggtgacaggagctgaaggagatggaccgtggaggacaggcagcctccagcagccttgggggcctggaggccccggggagcctggggctgccggaggggcctgagaggcgctatgctgatgctgccagagagtcaggggtctctgtgtcagcgtcactttgaagcttatatctcaggtcccacacgctgtgtgtccttgggcaagtcacttgatctctctcagccctcctcttcttgctgtgacatcctcatctggtggttgtggcggctccagaagagaggcttccaagtgcctagtgcacagtgggtgcttagtggtgccagctgtggaggggagagctgggggcaaaggagcagctaaagatgttggttcctgtcccggctgtggactggctgtgtggcgctggaccagcctctttcccattccgtggtcacttgccctcctggggaacagggtgcctctctggatccccaagtctgcagaaccccaattctaattcacacagatgctgactgctggctccatgccaacccccgcaaggggcagggtggggaaactgtgttgtgtgcatggtaggtgtgcggggaccaagcgggagctgcaagaggaagtgtggcctgaggaggcagggggcaggagcctggccctggacccaccctggagcaggtccctggcccagggtagcacagggctacttcacaggcgaggaacccgaggcttagataagctcaaggaacccgcccagggtcccctgccggcaagtggcagagtgtagctcccatggccacacgtgtggcccacagcccctcgcctagccaggatggctccgcaagaggacaacatctcaccccaggatggctttcagggaaatgcagccaagaaggggagttgtgctgggtggggtcaccagggtgcccagaagccagctctccaaggtcagcaagtgctgggccccagagaaggaccccaggaggcgactgcaggtggcacatctgatggcatcagggttgggggcactgaccaatgccagtcccttccgacttaagggggtttggtggtgggggcagggtcaggcagcatgacccatactggtcatcgggtggcagccctggctctgccctgctgatgtagcaaggcgggaggcagaggctgaccagcaaggccactccggcctattgctgtgagtcaccgcctggctcaaggcccaggcaaaggccgcgggaggcctctgtctggggttcccacagtgaatggctcatcggttccttggtgttcctggtgggctttggggaaacctttacttcagataacagagtgagtaggtagatggtttggagccatatgacagtctaagcctatacctaaagaatggtggggtcatcgacccaatttctagcacctaaaacctttggcccagtggttctcaaacgctggtgggcactgcagtcgcctggaggtggggaggtgtttgttaaaaaattacaccttcccgagcccccacacctgtggaatctgaatcttggggctctggtgtgattcccgtgcccccagcgtttgaagttcagtgtgtcaggcaccctcagacacattcacaaagactctcaacccccctctcacgtcccctttcctgtgttcccagcctcacacatccgcacgcggcccgcactctcacagggcgcgtatacactcatctgcatggactcacatccacaaggatgcgcgtgctcctgtgcccacaatgacacgcagttctacacacacatccccaggaccggcggcacaatttgcagggccaagtgcaaaacgaacatatggagctgctgtttaacaatcattaaggctgggcatggcggctcacgcctgtcatccaagcactttgcgaggccgaggcgggaggatcacctaaggtcggcagttcgagtccagcctgaccaatgtggagaaaccgcatctctactaaaaatacaaaattagctgggtgtggtggtgcatgcctgtcgtcgcagctactcgggaggctgagacaggagaatcacttgaacccgggaggtggaggttgcagtgagcgaagatcgcgccattgcactccagcctgggcgacagagcacgactccatttcaaaaaaaaaaaaaaaagaattgttaaaaatttcaagactgtggcagcagagcccccagtgacagcacaggttgtgtggcaacaaaactggccttgcatacagtcgcgcataccgcttgtgcacatctaggagcctcgtggataaacatgccacacggcacagacacccacgcatgtacactcatgtgcacacacagcaaggcttcaacctaactttttattgggatgaggaagcgtgctggttagcgtttaataagcaaaagcaaagttgagtcatatgtgtgttgcttgaaagcaagaaacgccagatggagcattaaatgaatcactgtcttgggtttcatgagtaacattttaattgggttgtgactagtttgggaaaacttttaagctcccctccacctcaaatccaaattaaatcagcaattatttaatgctcccaatgccatgaagctccctgaataaaatgtgagctttaaaaaacaggtttcaagaatacgcttctctgccaaacaaattacaatgcacgaggcagctctttcttcctagaaacaaggaggggaggaaacttgcatttattgagcacctactatgagccagcccctgtgttcagggatgagcacacataatctatgcactaagattcctaaatgctgagcatggtgcctggcatatggcaggtgtttggtaaacagtagcttattactgtatttcatccgaacccagggtctcactgactgtaagacatacattattttctggaccatagagaaagaaaagaacactgacactgaaatcctgatgccagccaagacacgctgggaaaacatgctgtctcagaggtgcttacacatgaacactgtgttcgagagtcaacggaagccagatcataaaagaaattacctccccagttcacagacaggaaagactgagggccaggaggacaacctgccagggggctctttggctcttgagatgatgtcatcagaggctgaggagggctttttctggagttctgccaacatgaagcatacagagttccacccaccatgtatggggattgctttgtgggggaggagacctgcctcagtaccccgggaaatgttgctgatgcaccctgatttgtgcagcctgggggttcagggcagaggtttcagtctttggatctccccacatttgaccaaaggcaggcacagttgggatcattctcttcaaagcaagttttagagattagtagtcattttgagagccccaggcctgcccagagtcagtcctcgccctagtcacgccctcatgcagtgattcattaggcgaagaaactggccttggaaggcaatgagctcatgaatatgcacagcgggtcctcataaattatgcattccatacggaggcttctggggagaggctgaggagcaccgagtcgctcagccctgcaacagaaggcttgctcacaaggactttctgtaaagtgcatattcctgccctcctgccctgtccatcacaatgaacttgtgggcagcactctagttctgataaaacatcggactctgggtttgcaaagaaattggagtttacttagctgtgactttgctgatggccatgctggcaggtctagaggggctgtcagggtcagagtgggcctgcacatgacttgcttcacgcccatagatgtgcaaagccgtctgaccttacggaggccccagcagttgaaaagctgctgcccagatgagtgatttacatgttcctccaaatcagagggtgctgaggtgtagtggcctgagagtcatggagcaaacactgggctggtagtcagggtgggacctggttttagcaagaaggagagggagggggctctgcaggtgtctgcattccctaccacagatgtctggggtgagcacagcagtcagccctcagcccctccactcccttccacaaggccaggctgggcacacagtaggcatgctgcagtcaggcaggggctcaaggtgagttctgcatggcccgcttggcttaaagctgcttctccctcatggggccttccttcttgtccagctgcactcaccatctctgatggttctctgaccactcagccacccctcagccagcctggagggcagccccgggccgggaggtccccttctcttagtttctccttagtttctgctgacagtgactgtcagcacctttcctgctatcaacagccatatgtgtgagcacttcagacacttcctgtcctttcatcctcctgacagcctgggaaggaatcgggtgcaccgtcctacagtccaggccttggccagagaggaaagggcttgtcctggcagctccgaggtggcattgctgggtttgcgctgtgtccagccaagctcagttcctgtctccagcctgtgctgcgcaggctgagctgagccttaaccaccctcagcagcagcagggcctggggaagcacctggaaaacgctctttgcgttcatgcatcaagagctgtgagactaggcctggcatggtggctcacgcctgtaatcccagccctttgggaggccgaggtgggtgggtcacctgaggtcagagacaagcctgaccaacatgatgaaaccccgtctctactataaatacagaaattagccgggcgtggtggcgggtgcctgtaatcccagctactcaggaggctgaggcaggagaatcgcttgaacccgggaggcggatgttgcaccccagcctgggcaacaagagctagactccctctcaaaaaaaaaaaaaaaaaaaaaaaaaaaaaagagctatgagaccaggcttaaatcactccatttggaaacaccccccaaacttacaaatgtgcaacagaaacaaaacctctacagaaaatggactaaatggagaaaaagaaaatgaaatcagctgtcgtcccttctcccggaaactcagccctgtcagccacatgggtttcctttctctcccttctctttctttctgtgcaaagttgccctatcaagtcattggtaaaatggtgcctccagtttcctccccccacccttatgtcacaagcatttcccacattgctgcatgatctccgtaatgaccattttaacaactgcggaacatggagtgaaatgtactggctttcggcatggaaccattctctgatgttgggattactgtgcagggtgtttagaacgcaccgttcaaaggaaacgacttttagactttcatgaatttaattcttatgtcacattcctaatgggggatcagcctgtccctcctccatacagcatgcaaagtatgtaagcctccttacagcatgcaaagtgctgattttccctttctccctgaaagggctttgcagacagactgggagcctgctcaacgcccaaacaccaatattaatctcagtctcgtcaagtaagccccaacttgagccagacggtccctcagtgtgtggcaccactggtcccatcttataatggagcaaacagtatcttgcccaatacctgcattcaaccagtacacgcaaagctgggatttgaacacagctctgtctcattcaagggactctggtgtgcattttgctctctgctacccatggaccacagagacaaccaaggcctgagccacaggcaagcggggagaaagaaaaacagaaccacagacaaatgccagagccctctcagaccaaccatgccaaccaaggctcgtaaagtgttttctctgtgccagacactgttcaaagagctttacaaatgttacctcactcagtcctcactgtaccctgggaggcacgatttttattcccaccttaccgatgagaaaactgaggctcagggaagctgagtgacttgggcagagtcacacagcttgagagtggcagagtcaggattggaactcaggctgactctggagactgtaatcatcacctccccacccctgtcagctccaagtttagttcagcttcatccccctctggttgccagcacagggccttcccattgtagggaccctattaatatttgtggagtggctgtttgacagatatgatgttttggagactgcagaagaaggaaggctggcagagcggtgtgctgggtgtcagacacagaccagggttgctcactgggtgtcttactgggaggcgcctggctgcccttcccaaggagagcaaagttgcccaggattggggcgtacatgtgggaggcatgcttaccaaatttgtgggtgacaccgagcctggggtgagcagatggtgtgggagaatgcagaatgggcattcaaaatgatctcccctgggcttttaggactgggggcaaaatgaggctgggcacagtggctcacacctgtaatcccagcactttgggaggccgaggtgggaggatcacttgaggtcaggagttcaagaccagcctggccaacatggcgaaaccctgtctctaataaaaatataaaagttagccagatgtggtggcaggcgcctgtaatcccagctaatcgggaggctgaggaatgagaatctcttgaacctgggaggcggaggttgcagtgagctgagatcacgccactgcactccagcctgggtgacagagtgagactctgtctcaaaaaaaaaaaaaaaaatcgagaactgggggcaaaatgacatgaaatttgaaggtgacaaaatctagcacttggatcagccggaagggtaacctgattggaaaccaatgacaattagggaaatatgtggaggtggggctgatgggctcagtggctgaacagacgtgggcacggacaggaaaggggctttacataaattaatttgcacaatgagccctgttccagggagtgaccttgaccttcagtgtcttcctctgtatcacagggacaataatagcacctgtgccactgaattgcttttaaatctagtgtttttttcataaacttcaaaaaaaattgaaatgcaacatgcttacagaaaagtgcatccattttacgtacacagcttgaggaatatccacagtaaacctatctgtataaccagccccctgaacaagaaacagaacttacaccaccagaagcccctcgcaccctcctccagccattaacccctcaggtaaacactgtttgggcttctaatactggattagcttttgcttgcttgtttttaacctttctgtaagtggaaataccaaatgttgataaagatatcgactgggtgcagtgactcatgcctataatcccagcactttgggaggccaaggcaggaggattacttgagcccaagagttcaaaaccagcctgggcaacatgatgagaccctttccgtacaaaaaattttttaaagtagtcaggtgtggtgtcacatgcctgtagtcccaactacacgagaggctgaggtgggaggttcacttgagcctgagaggttgagactgcagtaagccatatttccagtcactgcacttcgccctaggtgacagagtgaaacactgtctaaaagtaaattaagataaataaaaactagagacatggagaaactggaactcacacatgttactggtagaagataagttgttaaagccattctaggaaactgatattatctactaaagctgaataacacccctacgtatgtgtgtgatatgctttggctgtgtccccacccaaatctcatcttgaattcccacgtgttgtgggagggactcagtgggaggcaattgaatcatggggcaggtctttcccatgctgttctcatcatagtaagtatcacgagatctgacagttttataagggagagtttccctgcacaaactctctctttgcctgccgccatctatgtaagatgtgacttgctcctccttgccttctgccatgattgtgaggcctccccagccacatggaactgtaagtccattaaaccactttcttttgtaaattgcccagtctcaggtatgtctttatcagcagtgcaactaatacagtgtgtctgatgtatgttcatgtatgtatgtggtgtgtgcatctataaatatactcaccgcttctccagatactcctggagctgtatgagtagacatggacacacctactatatacgtggatttattgcaagacaaccctcttcatagcagcacactcaggcaccttcacaaggtatttggtaccttcacaaggtggggcactactcccggtgataaggtggggagaggctaaaagacaggctgaagctcacaggcaggaccagccaggccccaccagccctcagagaggctccctgaaattatttgtaggaatcactgcggaagcatgaggagcacttagactcatgcccaatgagcttgtggtcttcgtgttattgtcctcatcactgcaatgacctctctagatcctcggctatgctgcacgatgtttcgattgatttcaccttttacatccctcacctctctgacctcagcacagttgtgtaataaacacaagcatggataatgatgtgggctggctctcagggcagcagggagcaccgggaggaccctaatccaaatcaccaaacccacctctgccatgcaaggtggaggacagccctggaggagccggggcctgcaggaaatttgtgttctgagaggttcatgacctgtgcaggcttctttggaaggcagctgggggtgtgttggggccgcccttttcttcttgctaacaccgccaggcagccgaggtccccaagtgtttctggaggaggagacagttggctgcaggctgaggagccctggtaccagtgagtgggggcagtggagatgcccgctagtctcaggccaccgctgacttgctgtgtgaccttcctcctttcactgccctctctgtgtggctcactcttccatgaggacgttgggctgggtggctccagagctgttctcctcctgcctcctcccccagctcacagaggtctcacagcagctcttcacccaggttgttctccttccttctcgcagcagccctgcaattttacagatgagggaagtgcggctcagagaggctaagcgatttgcccaaggtcacgcagatagtgccaggtggggctggaattcagctgccctgttcagcctccactccacttccctggccaccgtcctggccgaggcagagccctgggttggtcttccccactgaagtctccctgggtgatgtgcatttctgacaagctcccaggtttagcggatgctgctggtctcaagagcaggctttcagcagcgagctctgtacattcacagtctagtggagcatgcaggttggcgaacagatgaaggccaaggagcgtcagggcaggcttcctggaagtgccgctgcaaggagagaaggaggtggctgagaaggaaaggggagacaagtcccaaattccagcccaggcacagaagcagcagggtgggctccacatggccactgaaccacaggagcttggagcaggatgtgatacagtttcttgatagacttttggcatggccaggactggatccaagtcagtgtatagggacacccaaaccgctgtcctgcccgttcctcagtcagtgttgttttttttactatagcaaaatatataacaaaatttactatcttaatcgtttttgttgttgttggtgttgttgttgttgtcgtttttagagacagggtcttactctgttgcccaagctggagcgcagtggaacaatcatggctcactgcagcctcaacctcctgggctcaaatgatcctcccacctcagcctcccgagtagccaggaccacaggcgaatgccaccatgcacagctaattttttttctttaatttgtagaggtggggtcttcttatgttgcccaggctggtgtcgaattcctgggctcaagtaatcctccagtctcggcctcccaaagtgctgggattacaggcgtgtaagataggcatgcccagcccgtcttaaccattttaagtgtacagttgagtggcattagtccattcacatagttgtacaatcctcactcccatccatctccacagcccatttcatcttgccaagcggaaactctgtgcccactgaacaataacctccccccaccacgccaggcccctggctaccaccaatctactttctgtctctatgaatttgactgctctaggtacatcatgtgagtgtaatcatatagtatttgtccttttatttccggtttatttcatttatatatcctcaagtcaaggttcctccgtgttgtaacgtgtcaaaattttcttcctttaaagttaaaaatattacattgtatagatttaccgcactatatatatatatattttttgagacagagtctggctctttcgcccaggctggagttgcagtgatgcaatgtgggctcactgcaacctctgcctcctaggcgcaggtgattctcatgcctcagcctctcgagtagctgggattacaggcgtgcaccaccacgcctggctaatttttgtatttttagtagagacatggtttccacatgtttatcaggctgctcttgaaccccctgcctcaagtatctgcttgtcttggcctcccaaagtgctggaattacaggcatgagccaccgtggctggcctggattaatggttaataattaaaggttaataaaatggttaccacattttatttactacttacacattcatggctaacgattaatggttaataaaatgattactacattttatttactacttacccattcatccatcaatgaacacttaggctgtttccaccttttgtcgattgtgaatgatgctactaggaaaatgggtgtgcaaacacctatctgagtctctgctttctattcttttgggggtagactcagaagtgcaattgttggatcacatggaaattaaacttttacttttttttttttttttttgagacagagtctcactctgttgcccaggctggagtgcagtggtgtgatcttggctcactgcaacctctgccttgtgggttcaagcaattctcctgcctcagcctcctgagtagctgggattacaggtgcccaccaccatgccagctaatttttgtatttttagtagagacagggtttcactatgttggccaggctggtctcgaactcctgatcttaggggatccacccacctctgcctcccaaattgctgggattacaggcgtgagccaccatgtccggcctaatttttaatgtttttgaagacctcagttggtatgtttctatcacacatagaccaactagcaattttaggggggcttcccaacagcagctgaggaagactattgtattccagcattagttaatgtcaaatgaacagctccaccattctagtcttaaaaaccaggtttgaactcttcaccattgaatttctcttggaaaatgttaaatgtccgcccaaatcaacatcaataatttgtttcacttggcaaggataaatgtttaaaatttaacgaagccagctgatttccacaatcccaggttgccaagcagcaatcatggtaataaatgaccaatgcttttcttgtaagaaaaatgtttgcatggagagagagggtcggccgctaatggagagaggctggccaccgggcttctataggaagcaaagtgcaatccatcatcctggagtgttggctttgaaaatgcagcgtgtccactgggagtcaccgttttccaaaggtcctcttgctggccctgctgaatcacagtcccataattcccccaccgcataatatttttccatcgccatggtgactgtgtgagaagaaggcacggtgagaaacttcagggattacttcttatttcacggaaacgagatttgacttctgctaaaaagtgggctacaaatttctattttaaggagaagagctgggttccatgaaccagagcttactatagccgagagggagcatgggtcaggtctggtcctggttccagcacttgctagtcattgactttgggcaagactatttctctccaagcctcagttcttttctctgtaaaacggcattggccgggcacggtggctcacgcctgtaatcccaacactttgggaggccaaggcgggcagatcataaggtcaggatatggcgaccatcctggccaacatggtgaagccccaactctactaaaaatacaaaaattagctgggtgtggtggcacgcacctgtaggccctgctactcgggagtctgaggcaggagaatcgcttgaacccaggaagcggagaggcggaggttgcagcgagctgagatcacgccactgcactccatcctggtgacagagtgagactccatctcaagaaaaaaaagagggggatggagaatgggaattagggttctctgtgggatcctttgaaaaaaatgcaagacatttacaaattgtgagacccttttcaaaaaacaaaagccaaatacaagcccccccttatttcaggccaaggtgctgttgcaggtggctttgtcttgcattactgttggctgctttcctcaaggcctcccccaagtcccctcattcacatacacatctgtcaccttcaacaagacagggatttcgccatgagcttcaaggagacagagactttgtcttatatttattctgaacaccccccacactactttgctgagcacacaactatactcagagctggcctcaagaaatccttgaattcaaattcagatccagtaaatgcttgccaggtcccatctgccttgggctggtgggcacagggtaaatcaggtggaagaggccaagtcaccctgatttgaagtcactccttcgacttcccagtggcttctcccagagatggggcacggagaagtgatcccacacgaagggtgcacattgaatgtaagattcatcccaattccagaaagcttcgaaagcataaaggtgtgtcttagagcggaggaaatccagccattacaatgccacgtgctaagtgaaattctcaagggtgtgctattcttagacgtgacccaggggagggaggaactcattcttcatggtggagtggtgagatggggtctctgagggtctcacggagccgctgtctgagctggggtggtgacgtctgtggcaggaaggattgtggggttgatggagctgcctcggaggaagagggtccaaaatggccaaaggaactcgggcacaggcgcagagacacagagcagcatgatatggctcacggaactatcagtcactccacatggctggaatatagcaaagggaggaggtgggggtaaggcagacaggcccagggccaggagtggccatctctgtgacagcacgggattactgggcacaaagatgggcggagcttcaactgtgtgactcttgcaccagaacagctggggaaaggggaaggtagagatgcattccaacaatccccagggctgcttctgtggtctttttttttttttttttctcagatggagtctccctttgtcatcaggctggagggcagtggcacaatcttggctcactgcaacctctgcctcccaggttcaagtgattgtcctgcctcagcctcctgagtagctgggattacaggcacccgccaccatgcctgtctaatttttgtatttttagtagagttggtgttttaccatgttggccatgctggtctcaaactcctgacctcagatgatctgcctgccttggcctcccaaagtgctgggattacaggcgtaagccaccacgcctggcctgcttgtatattatttttgacagcagtttggggatccagggtgacccaaactggtattggttggtggtttcgatgtgggtttgaggttaccaagaactacagacccctctacctagtaggggaaccaactggaaggctccctgtctggtcctcctttctcagccagcctctgagccccacatttgctagtgactctgagcagcgtggccatctcctcggtcaagtcagcccaccagcggttttgcagcaggtgctgagcactcggggagctggggtgtcagcacacagacagggagcactgttccaaggatcattttctcccatcacagggccctcaccgtgggcaccagcaggaggtggccctttggaagtggaagcacacagcccttcaaggcttgtcctcagtaggcagtgctggccccagccctgagtaaccttggcctcccccacagtgggcagggacgcaagctcctctccatttccagggatcccattctccccagggccatgcatttagagcagacaggtcagtttcaatggtttgtcaatctgatatcacttctttctgagacctgacaactagttcagggtgatggtcactatcaagtctctgcagtacctgcccctacacttgagaaatcagtcacatgagtttcagcatcaggacaaatgtcatgatggcttccagatgtacctgcctttaatgctcaggttttctcaggacaccacttaaatgtagggacaattcctccgaggctacattcccatgaggagctggctgagaagtgggcagcaatcagcaccagcagatcctccttatcttgttcttgctcctctttcctccttttcttgggaatagaaatgggttctgctgagcttggtctggcccagttcacccctccaaccacattccctaccagtcccttctgtcccctgcaagttccagccacctgatggcccatacatgccagcacaaacgttcccgcctctttactttgctcactttgcttttctctccttgtccaccgggttttgatgacacttaacctttgtaccattcccccccatttcccctaagatagtggaatgaccctcctctgtcctcctatgatcatcagagctgtgtttgtcagtttgggctactataaaagaatatcatagacttggtggataaaacaagagacatttattgctcacagttctggaggctgggaagtccaagatcaaagtgctggcagatctggtgtctggggagggctgtcttcctggttcacagacaattgtcttcttcttgtattctcacatggtggaaagcaaagaaagacgaagcaagctctcgtgtctttttaaaaaatttctttctatctatctatctatctatctatctatcttttttattttgacctgcatgaagagagatcatgtctttttttaaggaaataaattcattcatgtgggttccactcttatgatctaatcacctcccaaaggctcacctcgaaattccaccatttcattagcatttcaacacatgaattttgggaggacacaaatgttcagtccatagtatcagctcagttactttacctccctgggcctcattttctccatttgtaaaacagggatgttcctatcacctggcgaagtaacaagaattattgaactgtgacatatgctgaacacagggccttgaacatagtaggtgctcaagaaacattaatttcttccctttcttactcttccttacagcagtttccgctgatttttttttttttttttttttttgagacggagtctcgctctgttgtccaggctggagtgcagtggcgcgatctcggctcagtgcaagctccgcctcccgggttcacgccattcgcctgcctcagcctcccgagtagctgggactacaggcgcccgccactacgcccagctaattttttgtatttttagtagagatggggtttcaccacgttagccaggatggtcttgatctcctgacctcgtgatccgtccgcctcagcctcccaaagtgctgggattacaggcgtgagccaccgcgcccggcctcccactgatattataatgatcagtatctgtctcacccactagatgctgacttttgcagagtcaatggctgagatgtcttacctttttatttattagagtatattttttgtcaccctgaaaaaagaccccatacccattagcaattggtcctcatcttcccttcccctcagtctctgggcaaccattaatctacttcctgtctctatggttttgcctattctggacgtttactataaatgggattatggtctcttgcatgtggcttctttcacttaacataacgttttcaaggttcatccatgttgaagcctgtatgagtacttcactccttttatgaccgagtaacagttcatcgcgtggataaaccacatttgcctaatcattcatcagctgagagacatgtggattgtttccatttttttggctattacaaatacttctgccaggctgggcgccatggctcacgcctatattcctagcactttgggagtctgaggcaggtgggtcacttgagcccaggagtttgagaccagcctgggcaacatggtgaaaccccatctccacaaaagatacaaaaattagccaggcatggtggtgtgtgcctgcagtcccagctacctgggaggctgaggtgggaggatcacttgagtccaggggattgaggctacagtgaaccatgatcatgccaccatacttcggcctgggtgacagagtgaaaccctgtctcaaaactaacaaataaaaaccaaaacaaacaaacaacaaaacaaaaaataatgctgccagttggttccttttcatattttctgtttcttgcctatgtcataccttttattacaacacagttttcattacttcattgaatattgttataacagctgctttaaagttcttgtctaacattttcaatatctgggttatctcaggattggtatgtgtcgattgaccgttttcttgagaagaggttgcatttttctggctctttgtgagtggagtgatttcggattgtatcctggatgttgtgattgttctgtgttgtacactcttgattgtgtcatattgcttaatagtgttgatgtttttgtttcagcagacaattaacttgttagactcacacctcaaactttgtgacacttgtagagggcaggggctcagctctcagtttagactgcttttaatatgccttgcaaactgtgtgtttgggcgccagccagagagcagggcagagtttacatgctaaatttggggttctccttctctggctacctcttttcttgggtttctccccattctctaataaccgtggttgtccagggctgcttctcttgcttcctctgtccagacaacagactttctactggaacacggtcacctcgtgccaccaccacaaagagggctgccctgaagacagagctgtgaaaatgtgaaactcaccccctgggggttgattcctctccctaggtttggacattgctccaaaacctgcctgcttttgtcaactctccaaagccctccaggcattgtttttattattttgtatagcgtttgtgttgtctgcaggaggtttttaggacttttattgcttcataccagaagtggagcaaaaggttcatgaatcaatacttgctctatttcatatctacatatagtattaatataattctcatattttctgctatatttcacaacatttcatttgaacaatgctcatctcagtccctgctaaattgattttatgacacattagtgggtcacaacccactgtttgacccatggtgctctgatgcttgacagacaaggagcaggtgctgtgactgtaagagccccttgaatgaataaaatacaagaatttctcccttccctgtccatggcttagaaggctttgcatcttgaacatcctggatgcagagcggtcacaggccatccccacagataggttcctacagatggggtgtgtgaccatgttctctcctcctccacacccctctggggcttacagctaccaaagcccaaaatccttcagggctcaggcctcagggctaaacagtgattcacagactttcacacttccccacacacccccgcgcatgccaactttttgtttcggtaaataaagacattcaaaagtaatgaccatctactctggccctcatttcataaaagcaaggctactttatcaccaatgtcagatgaacaatctcagaataaggctaagttctaaaattaaaatacattttatttcatgacaaactccctctacattttcctcactattctgtagacaggcactggggagcctcccacacagctagggcccctggagcacaggctgcaaagaccccaggaggtcccagaatctacctgccttaggcccagagaggggtggacgttgcccaggaccatgccgctggaacaggaaaaaggttttccagttttaccccaggcaattctccatcaaaatgccatctgactacaaagaggcaggcacttgcttccggatcccctctctgctctgcagaactcccaggccacggagctgatttcactaactgcagccgtccccctggggcgccccgtctgccctacttgccatcacccagatgcgcaggatcttgtggcagaaagcaggagcctggatgggaagaggagcagccaggccgaggtgggcgccgctccccctccccggccctgcccaggtcctcagagagctgggacctgagactcattagtgcctgcataatggatgcctccttctctcttcttggaaatccccagcccatcttgcttaatggccacgagggaagtgggataccggcgctctgctcgtaaagccggcctctgccccccgcatctccccttggaggaggggcggctgggcggcttacacaggggaggcctggtctcttgtcttctgcttcacgacggctgggtgagcatcttcccccactccctccttcagtctgtccttctgaggggctggggtactgggacaagggcggggggcctctgaaccacacttggggtgggcagaaagagcctgggccaggagaagagcccttggcaggactccaggggagacagggagggagggaggatgacagagagctccaagcaaagagcagaggggttggagatgagaagcaggattctaggcatggggggactttcccaggctctagaatgactctggtcacagtgacagcgtggccttgtgacctccaccctaacccgcatccacgctcctcaccacattgttcttaggcagctctggggcctggcagggcccagagtcacctggtttggccatggcgattgttaaaagatgcaaatgcttctgtaatgcccagtatttttgtaatgttgccctatcctccatgcctcccgagtgtaccctttttccttccctcaccctcctcctctgggactcctcagacctccccatatccacccactcaagggttcatgcttggcacgggagcagccctccaagcccctgctctagccctggccacataggatgctgcataatttcaatagctccactgggatagtctgggtgctcagcagcatggctgagtgacgtttgcacccttgggcggatgccctgcctgctggtgagggccatgcttgtagtgccctgcagttctaggggtaaggggccatcttcccatgtctgtgtgaagccttgagtaggggagaagctgaaggaaggaagggcagaaggagggggtggcttgccagcatcctcttgaatgagaatgaaagttgagagtggaaattttaattgcaaaacccactgacagcttgactttaagggaaaagatgagctaaatttaacctagccagttaaagagccaaaaatgcaatttactaattagcttaaaatggaaagtagtccagtgatcagaaaaaaagcttttctgtttaaaaaaaaatacaaaatagagttgattcctcttttcatactgacatgcatttgaatactgttatgtaattaggaatgcggtttgctggcgcactgcccaggacacagaggcagagcatcacagcatcacagccttcttgaaaagttacaggagccttgaaataggcatgagcctatgtcttcaagtcaaatctgtttcctaattacagagcatccaggagggatccgatctctgttctcagggagtgcagagctcagtgggtgaactaggcaaggccacagaggactgtcacagacctggacaggtactaggcactgaggcattcagaggagggagaaagggcatatgacagggagggaagagccggctcccggaacagtggcatttgagatgaacttgagacgtggtggctggggaaatgtggagcagtgggaagggacagtcaagatgtgagatggaaagagtgaggcagacccagagtacagcaagtgcttcacttcacaggcaagtaggctgaggcatggatggacgtgacagatcccacgccagcaaggttgatctggcaccatgatggcaggcccatgggctgggtttactcttcatgacgggcagcagggagcccaggggcttttgatctggagagtgattgcattggagttgcgttttagtgagtggcccagccgccatgtggaagctacgttttcatgactgtggtatgtattttacttcacatgatttttgcaccaatttgaaaggcgtgcctaagatatgcatataacttattagcctctccgctcctttgtgtaatggcagtattgggatagcaattcaaggtcatttcaaggaccttgaataaaacattttgtagattcatccaggacccattataagaacattaatagttttgacacgaaaataatatttgagaggaattttacagcacaatttcatgatacagtttatgtttatattcttccagctaaaacatgatttttcaaaactatggctgtcttttaagaatattttcctgctgctttcaaatggtgcaacaaaatgtcctacaagcaaaaatgaaatcttagcaggtaacacagccattcctagattaaatatatagaagagattctcctcagagcccttacagatgaagctgaaaggaagcaattatgtttgttataaatggaggaaatataaaaacctgtgaaattgaccaggtgcggtggctcatgcctgtaatcccagaacttggggaggccaaatcaggtggatcacctgaggggtcgggagctcgagaccagcctggccaatatggtgaaaccccgtctcaactaaaaatacaaacaattagcagggtgtggtggtgggcaccagcaatcccagctacttgggagactgaggtgggagaatcgcttgaacctgggaggtagaggttgcagtgagctgagatcgcaccactgcactctagcctgggtgacagagcgagactccatctcaaaaaaaaaaaaacaaaacctgtgaaattaattagtgcagaatccctatgatgtacagccgaacattttactatcaggtttattggatataactagcttttactacaggacgtcagtaaaagtgcacaaaataatgtaattaaggggcacagctcagtatatgctacataagtgaattctaatttgtcatcacgagtaatattggccgtaagtgaattcccctcttctcaaatggtgatatgtttcctgaaagtttgttcttcagctacctttcctacagccacgtcgatttctcaacagagtggccagtataagaagacatagattacatattcatatattgtgcaggatttttttcctgatggatttatcataggaaaactttaaatcatgagcttcaaccactgttgtcccaagacctcaactgatttcaaatgtagaattgagagttcttcagaaaatcagctaccacgcaaaataaagtaaaaggcacatacagctttaacctccttgaagtttttcttattaaaaggaaaggtcctctctgagcaggaattgagatttcctcttcagctgtcccagcagccaacccacagaagaagactcacagcaaatgtttgtagactgaatgaatcaatgaacaaactgagaacaaataaataaatgggagctcaagaagaaagattaaaatgtacatgattttaagcttaatttaaatttatcagttacagactgcacgtacttaaaaaaaaaaatcaagcagttctacaaggcttaagacaaagaagttgcagttccctcccctcatttcccacgccatccctagcgttcttcctacctcccggaagcagttaccacttccaaatatgttacccttgccttttggtatgtctttacctttctttctttttttgtttctttttgtttgtttgtttgagaggagtcttgcgctgtcgcccaggctgcagtgcagtggcatgatcctggctcactgcaacctctgcatcccaggttcaagtgattctcctgcctcagcctccccagtagctgggattacagccacctgccaccaagcccagctgatttttgtatttttagtagagacggggtttcaccacgttggccaggcttgtctcaaactcctgacctcaagcaatccgcccgcctcagcctccaaaagtgctgggattagaagcgtgagccaccacgcccgctgcctttacctttcttgaaataacatgcatatactgctacttcctgactgtccaagtccaagcatttttgtggggcagtttgttttgttttgtttttttgttttgaaacaggttcatgctctgttgcccaggttaggcttactgcagtctcaacctcctgtggctcaagtgatcctctcccttcagcctcctgagcagctgagactacaggcacacaccaccatgcctggctaatttttgccattttattttattttatagagacaggggctcactatgttgccaaggctggtctcgaactcctggactcaactgcctcagcttcgtgaagtgttgggattacaggcatgagtcaccaatttgcaaggcaccaatttgaaaaggtctgggccaggcattttttaatctgttaatgtcctgccaggaagatgaagatttagttctcactcacattgcttactccatactcacatgtggatacatacccttcctcttcctaatatagtcatgtcagaattttaaaatttggcctgtgtgtttatattactatgactatcaaacactactcaaagttaagccatattgtatgattgaatttcctttcttagacaattttttgtttttcctgtagtaaattactgtcttctattttccatgtatcattcactaagtcatccccaactattctgccttatatgtaaatctttttctgacagcttctaatttcagcttcttggtggcatttctccggagcctctgttatcccactgtagtctggactggttgcctgttagcatgattgttactgtccatccacttcctgcagattccttttatttctctcctgtgttgattccttgttttctgaatcccatgtaatctttcttggcaactccctcgttttggtgaagcacatcctgcagtagcttcctgagaaaggaggcacagaagagctaagtttttgagatcttgtgtgactagaaatgtctttattccacttgcacacatgatttgatggtgtgtctgggtctttaattacaggttaaaataattttttccctcaaaaatgtattctttgcatttatctgttgttttctagctcctatcattactgtttagaaatccaatgccattctaattcttaattctttgtctgagactgttgtttctctctagaagctttttgaatgttttcctatccccagtgttctaaaacatctggtgcatataacagctgatggacgtaacatttggtgggtataaataacatttggtggtggtgttttgttttgtttttcctccaatgtgctgggcactcagtaggctctttcaatctagaaattcatgtgtcatgtttctttgttttggaaacttttcttgaattatttctttgatgatttcccttcctctattttcttcattttctcttcctgaaacttgttattcagatgctgaacttcccaatatgatatcccatttttttcctcctatattctgtgtagctttgtcttttttgttctatttttctgggagatttcttcaactctatcagtagacattgctgtggggattgtatttctacggccatatttttaattttcaaagatgttttatcatctaattttataaatagcattcttattttgtggatgcaataactttgacctatgaggatataaataatagttttatttccttctgctgtctgtgttgtctgtttcctcatatcccctcactctacctttttttgttacttttatatgttctcaaatgttcagattcttggctctccattcaagtcttagaggggggacattcaaacagtacctgcaagtcctgagactacagatgacacttgtcaacaggcgaacttcactttatttcccaacctgcccaacctctaggtctttccacaagacttcgtcatattccctaaaaaaggtccttccacacttttgcctggacagcagacccctggctgccaatgttctgagagctgagggtaggaaggggctggggtgaggtctgatcattcagcatcaggctatcatttatttgccatcttcaggatgcttcccctcccctctggtatgcctttgtgtagagaaccccttggttcacctatttaacagattgaaactccaatcttcacagtgagaggaaggagacgggggaggaatctatctgcttctgtcttagtcaccttgggctgccatagcaaaataccatacactgggtgactcaaacaacagaaatttattcctcactattctggaggcttgaagtctagtcagagtgccagcatggttggttcctggtgagggctctcttcctggcttgcagactgccaccttcttgctgtgtcctcacatggcagagagaaagtaagagatatatctctctctctccctttttataaggtcactaatcctaacagatcagggcctcacccttaagacctcatttaaccttaattacttcctaaaggacccatctctaaatacagtcacattgggggttgggttttcagtgtatgagtttggaagggagcacagttcagtccacagcagtttcttaagcagaccctcttttgcccccactgtgacaggtacctggtcctgcccattcctaagcctttgggggttctctgtggggaagtaggttgctggttggctgcccacccttgctagctttgagttcagcttgtctggggcagatgagactgtacctccccttttcctattttccagtttgaagttgtatggaggttgtttttcttccatcctctctgtcctcaggagttttagcagaacatggaggcaaactcaatactttccctggaaagatgctgatagagcttcctgccaacaaggatgtttatgttgccaacaagtgccatcataagcatcacgtgccgcatcatgatgagtgggtcagggatggactgcacgtatgatgatggtcccataaggttatgacactgtatttttaatataccttttctctgtttagagatgtttacgttcacaaatacttaccattgtataatagttgcctacgatattcagtacagtagcctgtcatgcaggtttgcagcctaggagcaatgggctgtaccatgtagcctaagtgtgtagtgggctgtaccatctgggcttatgtaagtgcactctacgatgctcgcacaatgatgaaattgcctaacagcatagttcttagaacgtatcccatcgttaagcaacacctgtgtttgttgaatcaatggttgaagcctcacatttcctatggcatttcatccacctcatcctttaaccttcctctcccgggtgatgaagcatctctccttctttccaaggacacgcgcccctgcccccagaatactggttgggtccagctcagtcctctggacccctgttccactggccgcctcccttctccttgactcgtccccagcttctaattctttcctctaattctttcctcctcccatcaagtgtgcttggctcttcccctcctgacaccgccccctcaggtgggtttcccggtgcctttctcctcccccaccacctgtttcctggccagctctagccctaaggccctgcccttgctcatggggtgtgcctcccatgctgtatggcatcctcactgccaaggccatgccctccccctgcactcacttcctgattcctacaccccaccactcctgccctctagaccccagatcctctcttggcttcttctgcatccgcagtgtggtctggcgggccagttccccaccccacagctgggaggatggctgccagcccaacccaggctcacaccacctcacctggaacaggtcccactagtttgtcttcatgcttcgtgtcccctggcccaggtatgtgcacttcccatcagtcttcctgaagcacagtcctaattctgtggcttccaaggggctcccattgcccatagactaagcccagcctgttagtatggggtcccaggttcactgcaatggggccagatgccttcagtctgagctccctgtcccctctttgacattaacagagctggatgtctcatcagtttccagacatactgagtatgcatttctagcctctttcccgcctcctctccatacctctcatctcccagactccttgaggctggaggtatgctcccccgcttttgacttctggactcctcagtccgcctcagaccctggggtttcactaatccccatgtgtctgtcggtcccaaacccaagcaacaaatactttccaaatatgccttgcagggcaagcacggctaaacccgggtctgcacctacagcaggaggcccgcagccccaccctatcgtagggcactgttatcctacctgtccccagccagggtgtcagcttgcatgcttgggtagaatctgccctttcccctctccttccttccccaacccctccacccccaccacctctctcttattccatcttccattgaagaggtggctgctcaaagtagaaaagtgagggtttgggcctgacaggactgggtttaaatcccagctctaccatttaccaacgttgtgacctcaggccaggcccctgagcctctggtcctagggagtttccttacatgcaaggtgcaggcagtaccagctaggcttgcagcagagactggagccagcgcctgatggtgactgggggcctgtgtgagtgtgacctgcggcgtgtttgctcccctctgagctgtgagaccctcgggtgtgggatggtgcattgttccccattgtgtctcctgttcctggcacaacagggcactcagtgtggcgaaatgtgtgagcccagggtcagttctcagcaattgtctgtgatgaagaaccggtgaccaagcctgtgagggagataggggagcaacttcttattgagttgacttccagaaggatgctgaggacctttgccctactctctggtatagctggagtcctgggaccatggcaaaaatatgagcaagagttaccggaccccccattaattaggaagaagtacagcatctctagaacaccaggatggaaaagcctgtgaaggagatgatgggaggggagtaggcaagcctcagtagtgagacttttcctggactttcctgatacaaatccaggtttctggccatttctttttatttcttgtaacttcgatattgtaaggcagcttatgatagcatttgaagcataacctgtatcaatctagacaatcttctttcaatgcacactatggaaagactctaaatcgtttatatatatatatatttttattatactttaagttctagggtacatgtgcacaacatgaaggtttattacatatgtatacatgtgccatgttggtgtgctgcattcattaactcatcatttacattaggtatagctcctaatgctatccctcccccctccccccacccacaacaggccctggtgtgtgatgttccccttcctgtgtccaagtgttctcattgttcaattcccacctatgagagagaacatgcggtgtctggttttttgtccttgcaatagtttgctgagaatgatggtttccagcttcatccatgtccctacaaaggacatgaactcatcattttttatggctgcatagtattccatggtgtatatgtgccacattttcttaatccagtctatcattgatggacatttgggttggttctttctttattaactaggatggccatacaatttatcatccaaactagaatactttccagagttaaaggggtactttttttttttttttttgagacagagtcttgctctgtcacccaggctggagtgcagtggtgtgatctcagctcactgcaacctccacctcctgggttcaagcaattctcctgcctcagcctcctgagtagctgggacaacaggtgtgggcctccatgcccggctaatttttgcatttttagtaaagaaggggtttcaccacattggccaggatggtctcgatctcctgacctcgtgatctgccctcctcggcctcccaaagtgctgggattataggcgtgagccaccacgtctggccccaaaggggtactattaatgagcacccaggacaaaggcctaaacctggctgtcccaggccttctgggatgagtggttgccctaatattagcttatttgctctgtggttagtctgtggcatgccaggaacggccataaaaccttacaggcaacgcgatggagtgaatgaacaaaatgccctggaaatcctgttgattggtggagatgctacggttggaaattcatttgcaatctactgcggtgcccgcactattgcatgaattagagacaatcacaacatcaagtttcctaaatgtaaggactttttcttgtcttctttttttttttgagataggatcttgctctgtcgcccaggctggagtgcagtggcacgatcacggctcactgtagccttgaccacccaggctcaagcaatcttcccacctttcagtcccctgagtagctgggaccacaggcacatgctaccacgcttggctaatttttgtgttttgtatagaaacaaggtttcaccatgttgcccaggctggtctcaaactcctggactcaagggatctgcccaccttggcctcctcaagtgctgggataacaggtgtaagccactgtgcctggcctgcaaggacattttaaaaagaattagccaagcaaatattgcttttaatttcccacttcagatacttcaaaatatgtaaattcttttgatggagtccaatcattaggaatacttttgggtaaatagcctactgggtttcttagataatagagttgtcatatccatttggactatcaacagattatctgtggaagggtctgaagttcatgattctgcagtgttgacattgtgtaataggataatgaagctggagaggcccttgataaggccgtctttatcacacagtgttgtttctcggccagtgcctctcccccattccagcccatccaggccggatgacacacgggaaaacaaggagctggcttcaccaggctgacaaggtctcaccttcataagataagctgtagaactgcatccctgtgtgaggctcccagccaggggcatggccaaggagctcacagactgagtggaaagacatttccaacagcaggaatctcacaaccaaagccccaggggcagactattgtggggtgtttgggaaatggaaaagcagagggattgacaggggccaaagaactggaagaactagaggagccatgaaggaccctgaaagccagtctgcatggttaggacttcgctatgtaggcttcttttttttttctttttcttttcttttttttcaaatggagtttcactcttgttgccccgtctggagtgcaatggcatgatctcggctcactgcaacctccacctcccaggttcaagcaattctcctgcctcagtctccccagtagctgggattacagacacacgccaccatgactggctattttttgtatttttagtagagatggggtttcaccatgttggccaggctggtctcgaactcctgacctcaggtgatccacctgccttggcctcccaaagtgttgggattacaggcgttagccaccgcgcccagcctcctttttctctaataaggagaataatcttaacactggaagggatagaagaaacatccctggggagaaattgccaagagcctaagaaaggcaagagatggcaagagactgttcagttactgtgaatacattctccaggcctcagtaagccagctctaattttgccagatgggagtcgcagaaaactgggaagggataaaaggtcataagtttccaaaaagcagaaaaagttggattctggaaaatacagatgatacgtttgatattaatatcggttctgagcaaaaattttcacagatctttgaagagctagcatgtaaacacttggaaggaaaagtggcgcctaagagccaaaccaacctcgttccctgtttttctgtgttaccagaccgaatttacaaagcaacggagaggctccttcacaaaatcctgtggacaatgaagaagaaaataggctgggtgaacgaacggttggggtgatttcatttttagttaggcaggtatttccaaagcactgagaaacacatcaatagagatgtggctggggaggcatccagtgccatacagaggactctgcacccctcccgcagcgctaacctgatgatcaattacaaggacgaaggagacattgaagggtgcattatggcacattcacggctagttcacggaagttcaacatggagcctacagtccacaccctggctgctcaaaaaaaaaaaaaaaaaaaaaatcaacacacgcttcagttgcatcaatagaatcataatattcaggttactaaagggagatgccacccaggtgaaagtgctctgaggttactgtatgcagttctgagtacctgaatcttcaggattcaggataaaaggatctggttgggtggaatggacatctctccagacaaggggtctagcaacaatgtcacatgatgggcagggaggaaatggagaatgttaccctggagaagatgtgtgttctcttccaggcatttgaaaacctatcatgtgtaatgggcaaccacttttgtccagagttcattcattcactcagcatttactcactgccaactacgttcaaccttgtgtcaagcatgatgggcattaggggtatatcatctcccaggagagacagacttgtacacaagttcccacaaggcaaagcagactggcacaagggcagatgtgctcatgactgcagaggccctgttgatggggcagctcctaccctggcgggcaggggaggcggacactgaggactagggcacagcactggccaaagttcaaagccttcaagtgcacggcacgtctgagagtcgcgaagaggagctttcggatagcacagtggggcaggggtgtgttgaatgccaaagatggcatttgcagcaggagtgcagactgacttgaagttcgtgccaagatgtttgcacttaatatggtaggcagcagagaatgaaaggacatcagttagcacctctttgggtaagttaaccctggagtaatgaagcagggctgggtaaaccaggacacaggctactgttgcaatgttccagaggagacagaagccagaaccaggacagagggagatgaaattgaccagacaaaagtaggattggtgaagaatgctttggcaagggcaatttaggataaaaataaacaacaatctttttaataattggagtgcttcagatctgaaaggggcagagtgaccatttgtcagggatgttgtagaagggacagctgcatcagcaagtgggttggaggccgcagagttgaatgttcccttatggttgttagactcagtgattacctcttattttgtagagtaacaattttatcatgagaagctatattttatattttaatatgagtagtgaatggtgctgcatctgtggaatagtcaattcttgactctgagattctttttttttttttttttttttgagacagagtctcactcttgttgtccaggctggattgcggtgggcacgatcttggctcggctcactgcaacctctgcctccccagttcaagcgattctcctgcctcagcctccctagtaactgggattatatccacctgccaccatgcctgtctaatttttgtatttttagtagagatgaggtttcaccatgttggccaggctggtctcgaacccctgacctcaggtgatctgcctggcttggcctcccaaagtgctggtattccaggcgtgagccaccacacccagattgactctgagattctatactaactgtattgatctgctcggactcccttaagaatgtgccaccaactggaggcctgaaacaacaggaattaattttctcatagttctggaggtcagaagtccaaaacccaggtgtgggcagggctggatccttctgtggcccctctccttggcttgcaggtggccatctcctccctgtgtcttcactttatcttccctctgtgtgcatctgtgtccaaatttccccttcttataaggacaccagtcatattggattcgggcccagcctaatgccctcattttaacttgattacatctgtaaaggccccatcttcaagtaaggtcacattctgaggtcctgggcattaggacttcaacagatgaatttttgcagggacacagttaagcccatgacattaactgaaggtcaacttttctctgctcttagagtaaaatcagaagcccctgacaggctgtccaaggcccgctgcaagcagggcctccccatctcctaccctagcttgcctgatgtggctgccccttgctctacccacggctgttctggtagcttcttttcctccttattccagtccagaccctcagaaataatctgaaatccttccacctagctttgttccttggcgcttatcatttgtatttatacaactatctgtacaattattatatgtccaaatgtctcttagattgtgaccgtgacccacaacaagaaatgccttgtattatacatcgcaactcagcacatgtaggtacattgtaagtaaataccaatgtttccagcacaaatactcgttcttactatgctcagtgcagtccaaaattgtctattccatttcatgttaaaaactgtgttagaatatacacaacagccaggcatggtggtgtgtgtctgtagtttcagctgcttgggaggctgaggagggaggatcgtttgagcccaggagttggaggctctagtgtgctctgattgcacttgtgaatagccactgcactccaacctgggcaacacatggagactgtaaaatatctccctaatatgtgtgtgtgtgtgtgtgtatgtgtacacacacgacataaaagttaccattgtaaccatctttaagtgcccagttataaagcatgaggagattcacattgttctgctacccacaccaccattcatctgcagaactttctcatcattccaaagggaaactttgcgcccattaagcactcacttactattccttcctctccccagcccttggcaaccaccattccactctctgtctctatgaatttgacaaccctaggcacttcgtgtaagtggagtcatagactatttgcgcttttggggactggtttatttcacgctgcataatgtcttgatacatgctgatagcatgtatcagaattcccttcctttttaggatgaaataagattccaccctatggatggaccacattttgtttaaccattcatccatcggtagatactcaggttgctcccacccctcggctattgtgaataatgctgctatgaacatgggtgtatgaatatctgtccaagtccctgctttcaacaattttgagtacccagaagtggaattttctatttctttctttctttttattcatttatttattttttttgagacagcatcttgctccattgtccaggatagagtgcagtggcacgatctcggctcattgcaacctccacctcctgggttcaagtgactctcatgcctcagcctcctgagtagctgggactacaagtgctcacctctacgcccagctaatttttgtatttttagtagagatggggtttcaccatgttggccaggctggtttcgaactcctgacctcaggtgatccacccacctcggcttcccaaagtgctgggattacaggcgtaagccaccatgcctggcctctatttcattttaaaccttgccaatgatgactctttaattgacttcacggctacctgcagttcggaaagcactgtgttctatgtgctacattcccagccccaagcatagggcctggcactgtgtaactatttttggtagagtgttggattaaacaatagatgcacaaggctgcacatttctgggtgatttttaaaaattgcctttctatgaataaaggctacagagctttcactttcctttctctttttcacacgttgtacaaatgctgctattaattccactgaacactgtggttatattgtcctacagagtacacatcatttattacaatgacaacatttttggtgctcaggatataaattaactcacaatggcgtggaatatcagtctgttaaaatgtttagcaaaaacatcacacattattaattttcagagatttttcttgaactttccccaaagatcttttttaatgctgtgtagattatacctaagtgacttaacatgcatatcattgtaattattctaaatttagcttttttttagagtaagattttaccactgtgggaaaaacatagctgtttaatactctaggttaagagagcaatgatcttctttatcatctcaaaagaaagtggactgagttcttaattgtcttatttgtaactttagtggaaataatatcttctaagaaaatctccagctcaatttggcagctgaagttttaaatatatgtctcctttcccatgtctaaattgtggccaccaaatatcataacattaaacataaggaatgctaacattctttttttctttttaagatcgggtctcactctgttgcccaggctggagttgagcattgccccagctgcactgtatggaatgcagtggtgcaatcatagctcactgcagcctcaacctcctgggcccaagtcgtcctcgcacctcagcctcccaaataactaggactacaggcacacaccaccacacccggctttaaagaaaaccatcttctaattattcatgattattacttccttttcaagttcagaaataccacacctcagctttttatgccaatcatccaacatatcctgaagtataaaactgcaaagtggaatagagagagcatgaacactggaatagacagatgggaaatgaggaagatgaaatgtgcatctgggtgttaagtctcaccctttgaaagccgcttctccatagcacctgcctgctgccttagagaggcagagaacccacctgtgccaggcgggcgcaagaggacactttacctggccctctgccaactttggcccctccccccatttcctttccctgccaaagttttctttttttcttttcctttttttttgtgacagggtcttactctgtcatctaggctggagtgcagtggtgtgatcttggctcactgcaacctctacctcctgggctcaggtgattctcccacctcagcttcccaaatagctaggactataggtgcacaccaccatgtctggctaattttttgtattttttttggtagagacggggtttcccatgttgcccaggctggtcttgaactcctgaattcaggcaatctgcccacctcggcctcccaaaatgctagaattacaggcataagccccgccctcggcctccctgccaaagtgttctaacgtgcatgtacctgccctctccctttgatatccagcaacctattgcatcaccagggtgctccaggtcacctgggagccctctgccaccagacagaagagcctcaccccagcctcatcctccttgactcttcctgcagagaactctacgcaaatgcccactggaagctttctgtgctcttagcttagagagacaatgtcctctgctgattctcctgcctctctgaccattccttcggaatgtccttctctctcctttgtcaaggctgtaccccagcccctgtccgattttctattctcttctttagagacttcatctacaacccctttgctgacaactcccaaatctcaattctttctctccagttgctacagggcacttctaattggaggttgtgctgtccccgcttgaccttcctgtctttccagctgtatggtcctatagcaacttccctctggccggcccttggtgcctcatttctggagcactgcagacatcctgggctgttccagcaacaggccgcggcccctgcagcccagtcggcaggcagacccagctccctaacacagctctcaacagtggcctgcctgcgtgaaccctccaagcgttcctccatctccccccaagtctggttcaggctcctctgcagctcttggggcctctcttacctggccccttgccctcagtccagtcttatttcccacttgtctgcacaatgtctgcaggcaccgttccttctttcctcactagcagtgtcctgcccactgtcctccatccaccaagtcacagtcaaacccgcagcacctgtggcccttcagccttcactcacaatgtatcttcccaattaacaatcctgctaggacaggaataagctcttaaacttctccctctgcccacagcatatagcaccagtccttactaacccatgcactaaccgtgccgcacgcagagtgacagagccctgtccctcacctgccatctactgatgtccaagctgggcttctggaaggacaggcctctgagcccaagcgagacctacgagttttcctaattttaacttactcagttcttatttcacctactctattcaacctgcacaagttagtacctaccatttcagattttggcatggaactgaattatgactgatgcaacaggaagtgtaaacgttctgcagtctctttgggaccaagctcattcttgggttagatgatccattttatatattctaatttattgcttcccactcgttatttggcgcatctttacttactttactccatgggtataaaatgcgaaccattaacagcatttatacgtgtatggcctggaaaagttacaaactcatagatctatgtgtttctccgactgcgctattttctcctaactcttggtgtctttctgatgtagaataaatactgatttccttagtcctgtagcaagttaacaagcctgtaacgtgacagatctgtatcccaggggctgatcatagagaaaccacaaagcgatgttttagctgcgtcgagtcctcaacacgggggacttccagcctggtaccaggatagcctctctggcccagtgtgagcgaaggttcgagctgacttgccagtcccgtgctaagtctcactgaggcagggccttgctgccgcggaaaaacgtgtggacagaggaacgcgccggtcggatgtgggccacagtgagccgcggcgtggaaacggccgaaatgtgcgggcgcgttgtccatgtttggtcgtggagctgcccgcgggcgcgggaacagcgcgtcgggggcgggtgggcttgggtgtccgtggcggaggttaccccgggccccacgcgcccgctctctcccggccttggtctttgtccccgcgcccccgcaagggccgcccgccgcgccccgcagcccctgagcccccgtgcgcggaggcggggcctggccaaggggacagcgggcggcagacgcgcccctgcggctcccaggccgcccgggccgcgctccccgcggggaaagaggccgcaggcgcggggaggctcggccccgccccgccacgtccccctcccggcccgggccccgcggccgccgaggccgccccctcgcgggcggagcgggcgctgggctcgcgcggctgcggcggcggcggcgggcccggggttgccatggtaaccggcagcagcagccgccacagcagggccggccccagcgccagcgccggtcgcggtcgggctcagctcagtgtgtggtgagcggcggcggcgcggccgggccggggagcgggcgcggcccggcggcctcagcatggaggacggcttctccagctacagcagcctgtacgacacgtcctcgctgctccagttctgcaacggtgaggggcggccgcgcggggccggggcggcgagcggctggtggcgggcggcggcgacggcgacggcggggaccaagccgaggggccgaggcccggcggccgcgggcgaggccgcgcaaagttgttgcggaggggcgcgcggtccccgttcccgccgccggcgcattgtgttggagccgcggggccgcgcctcgctccgggccgccccgggctccccgccgccaccccggctcccggcactggcgcgcggaccccgccggctccagcacccgcggagcgcgcccgggcggaggcgcgtggggcacagggcggcggggaggcccgggcagcctccgcgttccggggaacgtgttgcttttttgcttcccgacccacatctgtttggaaatgactggatgaagaactcgggaaacaaatcctttaataacaaaaccctcctgcgaggatgcacgcagtgtttggacccccagaacccattcaggtctactttaatgaaatcatcacaatttaatacaatctagagctttttaaatggaaagccaaagtggacctggcctcagtgttgcttcttattttgtttatgggataatggattcttttttctttttttgtttttgcaattttacaggaaggaaacattcatatccaccaatatggcatctttttaaaaatatgaaatcctacatgcttgaaagatttcagtctcattggcagggttgaaaaagattttcatagcacactgaatattttatcagaacatgatgtgtgataattcacgcacaaaagttaaccacacttttttttttttttacatgttggatttattgctccatcaaagggccccaaaagtttgttaatgggaaaaaaaaatgtgtatttgatagaatttgcttaagtgcagtcggaataattttgaattctagaccctttgacaactggagcaatttattttgctattgtattgtgatttagggaaagttttcttgttattcgacacctgtttgtcactgtagcagtaaagagtaatgagtgtgttgattcatcctctgtagtggtattttttatctctggtgaaatttatcatcttgttcatggtagaatgtatactctgatagcttttgcagcttatactttacatctgaaccatttgtgggccttcatgaatttagtaattccctcttcagtggaattaaagaaagtttctgctttttctctgaatttaacgccagtttccaagagcagaacacctgtgtttttgagcctcagaaggtgttgagggcaggtagaatgtatttggtatgctggtggtccctggaatactttatagtatagagtcatgggaacggttttgctctccagtaggttaaatagattcctcaattaacattttgaataggttccttaattgacttataatcaatcatatttgaattattgtttttgatctaaaaagtagttatatgcttatggtagaattctccctatgcttagttggaaagatatgtggctgaaatttgtattaaatgactttgaggcatcaggtcttacaaatttaatctgtgggcgtattattgacagcttgatttgcgatatgaaaatgagcctagatatttttattggagcagttgtttggggcctggtcatactgttcctaaatagcagtttagtcatgaagttgacctacacgtctgttcatgaatgttttcgttttctgcattttccttttaattgccagcctagagatattggcatggtattttactggtggtgatgtccagaagaaagtaaaaaccaactcttatattttgtagaagtattggtttaaagaaaaaccaccttaactagaatcaaacaataagatcactttataactattgaattacttttctcaaaaagttctcagctctgtatttgttattttttttttaggttgtctaatgaataaagtttaaagcaagagtggcctatggggcagaagtcaatgttaactggtgatgtcttaggcaacagatgttttgatgtgaaacattttaagaggctttcattaagtgaagatataaatgaatacaagtcagttaattactatgatgattcaattaaagcagtggatcacagaaatgccatttcactaggaactaaattaaacatttggatatttcattagctacattggcaaacaattttttctttttaaatgagagacttacattacaatggcaagacagcagcataatacatgaactcatacattttcatatgttcagtatgcgtcatgctgttaatagtgacagaaactaaaaaatcatggttacagctttagaaaatataattcacacatattatttggatgactgtcatagttaatttccttctggtcaaataaagacaagatcaagatatgcgaagttgaggcgggaggattacttgcagccaagagtttgagagcagcctgggcaacatagcaagacccccctctacaaaaaatttttaaaagttggctgggcatggtggcttgaacctgtaatcctagctactcaggaggctgagatgggaggattgattgagcccagaagtttgaagctgcagtgagctatgactgtgccactgtactacagcctgggtgacaaagtgagaccctgtctcagagagagagagagagagagagagagagagagagagagagagagaagataatgtgtaaatgagaagggagaaagagaaaagtttgttctaatgaatgaaatttctgtcttctcttatacttctttcttggtgtctctcctcataatttgtagtggacattaaatgcaaagttaggcagtatctagcctcctgaaaaggctcatcctcatctttcaggaactgtctttctcatttaagcagaaaatgtgtgcattgttttcttcagagtatttgaaatctgtaaagtgagctagaaatcacaagcttttttttttttttttctttgagccacaccttgctctgtgacccaggttggagtgcagtggcatgatcacagctcactgcagactcaaactcctggggctcaagcagtcctacctcagtctctcaagtagctgggactacaggtgcgtgctatcatgcccagctcacaaacttcttttaatgctgggaaaaaaaaaaaacctgaagtgttttaaaaagtgaacagtagctatcctttataagacaatttatgatttgggaaataactccatattttcttcgaggcctcattttgaagtaggtggtgttaccatccttcctttgtgcctgagaaaacggaggctcgaagagatttggcaactttatcaggccacagaactaggaagggcttggataccagtctaaatctttgtgtgtgtatgtgtgtgtgtgtgtgtgtgtgtgtgtgagagagtaatagctttattgaaatatttacataccataaaaatgtgtttttaaagtgtaccattaagtgcgtgtagtatattcacagaattgtccagttgttaccactctctgattttagaacctttgcattactccagaagaaaccctagtacctactagcagtcactccatgttcccccatcgccctcacccctggcaaccattaatctactttctgtctttatagattctgggcattttatttaaatggaattatagaatgtttggtattttgttcctggcttctttcacttagcatatgttttaaggttcatccatgttgtagcctgtgtcatcatgccattcctttttatggccaaattatattcccttgtggagagataccacactgtttaaatctgttacttgttgatgggttatttgggttatttccactttttgactcttatcaataatgctactatgggcactcacatgcacatttttgtgtggacctatgttttcatttctcttgggcagatatctaggagcagaattgctaggtcatatggtaactctgggcttaacatttttaggaaccagtcttaactttttgaaacctaaatattaagcttgttttattatacatttttgataaaagaataagtaattaaggaaatggatgaaagagggaaagaagtgggagcaagtaacaaaatgttgctcatgcatttccatgagtcctttggatcctttgatcaatcacagctcaccaaaacgagtcagtgcacaactgcacgtggttgccacaggttataagaatctcagtgcctgaacggacctggcaagtaatctcatctcatggtttactttcttaagcctttgagctgtttcttcaaagtaaaggttacccaggaacccaatggtaaagcagatagatacagagctggcatagctgacagggagtggggagaggatggtgctttggccctcctctccttcccccacccctccagcttgaaatctctgccctgtgggggaagctggaaaggctgttcaaagctagaaaggctgttcaacctgtgcatgagcattttcaagagactggaaagtaactacctctccaggcaatccattttttctccagacagttcagactgtcagttcctacaagcagtgaaaaatcagccgaagttgtgttccttgggtccgtagagaataggtttaatatcttatccatatattaggtcatcacatgtttgaagacaatgattatagttctttctcacatcttctagctcttaagacgtaattttagacccttaatcatcctggttgcttcatctacacctgtttccttttgtctgtatttctttcttaacttgatacaactgaatgtggtattccaggcatgttttctacacaaagaagattagaattggatatgtcacctcccttattccaaagtctatactttttttttttttttttcgagacagagtctcactctgtcgcccaggctggagtgcagtggtgcaatcttgcctcactaaaacctccgccccctaggttcaagcagttctcctgcctcagcctccagagtagctggaattacaggcgtgtgccaccagcctggctaatttttgtatttttagtagaaatggggtttcaccatgttggccaggctggtctcgaagtcatgacctcaggtgatctacccttctcagcctcccaaagtgctaggattataggcatgagccactgtacctggcctatacttctaataatgcagcctaaggttatatagactccatttcttgtcacatcacattattaccttttactgattttcaagtaaaattcttgtgtactttacatgtactatggctaaatcttttcttaaatttaattaccttttttttttgagggtaagtttcctcgaacaggcagagccctatcagattacaacaccattataatctgtgttgtaatgctataaataatcccagcacttactaagatatttcagcattatagtaacattgaaattgaccattgccttacagggttgtgattgtggttaatagccttttttcttcttgccttggaaggtgtcatgagagaattatcagatgccctctaaggcctgactggagcgtatctgccatgtcccagatctggcctggcttcttctcctgcaggtgctacttgttagtaactacagcgggtcgagtccatgggacctgcccagtcaaattttgaaatcactataataatcctttgagcgactgaagtttattttttctagttttgcaatggaatgttgttttaatttctaaacatttatattttggaaattaacaataatttatttaataatcttaaacatcttttgacatctctaatactgatgacattctcttaactatgattacagcaggattttcaagttgacacctcgatggttataaacaagtagttggatttaaaaggaacacctgtaaggaaattatccaaactcaacgctccgaagtattttcaggcctcttttgcattctcatgcagtgacagaagactgactgaggcattctgtgatagcaaaatcggaggaaaacgctttcatggaaaagtgcaaagcaaaagcacccacgctaagcgagaatttctaattagtatacttggtgctccagccaggaaggaacttatagccaaaccacaaccatttatcacattataaacaaacccacgcattttggtggaaaaaaatcacaaaactgtgcttaaaaagtaaccattaattggttattgtccatttctgggatagtgtaaaccttttcacatattctcttaaaaaacattttagttgagtggaggttggataagagaggagaaataacatctttgtttctagtgttacagcttgttcatgctataaaactagtagcgtgaaaaccttcatcatggataacattgaaaacggaacatgaaagcattgctctctctagtaagacagtctctccaaggacttaaaatcagtggcattttgtactccttacaaaaatttctttcaggaacaactattcatccttaaaattttatcaagctcattaatagagggtttctagtattagcaaaatttttaaacaccttcagaagcattactaattacaaacaaaaagtgtgctgtaaactctaaaagctgtataattattattgataccacccgtcacccccagcttcatgtttttctcactagacgtttggcacatagatttcatttctgctgaaggctgcacattcattttaatctggcccaggactgggggtgtgcgaaggtgtcagcaggagcaagtgcatactctctttggtttactttttaagaaatacctcttcagaagagtttttctttctttaaaggacttgttttttttttaagtttaattaattatttattttttatttagagtcagggtctcactctgttgcccaggttggagtgcagtggtgtgatcatggctcactgacctcgaacccttggactctagcaatcctcacacctcagcctcccgagtagctgggactataggcatgcgccaccacacctggctaaattttaaaaaaattttttagagatgcagtctttctttgttgctcaggctggtcttgaactctcctcaagagatcctcctgccttggcttctcaaaatgctgagattaagcatgagcccctgcacccagctaatttttaagattcagtttagttagatacatttccatttttgtttactctaaggttctacctttactggcaaatactgttggcggggaaaaccattttttgcagagtactctcagttgtgtgttaaaatgcagtcatttatttattctgccagctttctggaaaatatttaaactctctatctttaataaaccatccccacagtgtaggggcaggttcgacctatagacttgggtgatgcctgagggcacttactccaagcccagggcctgcccgaggtagggagtcttacaggagaccttcccacctgccgaggccctgctgtcagagggaggggaagcagaggtgactggccccctgaggccagcggccagatccatgcatttatcatggtgtggtccaggactggtggtacccttcactctgcaaagcccctgtaagggagacccaccgtcctggactgcagattcttcccacaaataacctttgaaggacaatgggcagcccacagttaaagataacaaggatagaaatggttaggcgaatattcatggagagacttgagtccgtttggcaaatcgggctgatttccagtgaatacctacagtgggcgtaggacaattaaacatgtcaaaaatgtagtctcccctgtaaacattagattctcctagtaattggccgggcacggtggctcatgcctgtaatcccagcactttgggaggccgaggtgggcggatcatgaggtcaggagatcgagaccatcctggctaacacggtgaaaccccgtctctactaaaaataccaaaaattagccgggcgtggtggcgggcgcctgtagtcccagctactcgggaggctgaggcaggagaatggcgtgaacccgggaggcagagcttgcagtgagccaagatcgtgccactgcactccagcctgggccacagagcgagactccgtctcaaaaaaaaaaaaaagaaattctcctagtaatcattttagactcttctacccactgccccatatctcagttggctcagtggattctgcaccccaaacgtctcatcatccatcccttcctccctggctcgggccctcatcagttctcatctaggctagggttgggtttggttttggcagcagacctaaagcagtcttcctaactctagtcttccatccgttcctttaaacaagcactcaagtactcacagcgtccattattacactgttttaggggttccagcgaaatgcgaggatgacatggtccttagccttaggaagcctaatttgtttctcaggagctaaacatccagtgttattttcacactcacttcatgacaacagtgataggttgttctaagaagtgtaaggaacaatggtagggtattgcagcactggggggcatgtatcagggcgggcttcctaagagaggcatccgtgagagcgtctttctagtctgctcactgcaggcgggtaggtgggagtggggagagccattcgggccagggaagcgtctaagaagccctgggtgggaaagaacctttagagaactgaaagaaggttgcctgtggtgaaagggaaaggagtagcgtggcttgcagtaggactgggagcgtgttttggggacatggtaaggagtttggtcttcttcctaggagcagtgggaatacaggggagaattttgaggcaagggagcgacttgttcacattttttgttttaaaagatcactctgcttccagggggagggcaggtgggaagggcagtccagggtggaggtaggagggtagaggtggggggccatggcagtaacccagggagaggcaatggtgattcaccctgggcggggtgttgggagcaagacgcaggagatacttagtgggtaacatcctgtatttacattaagagtggggagagggcagaatcaaggctgacgcccaggtctctgatgcctgcaactggagatggcaggacaggccagggggcctgtgcagagatggcagtccaggccacgggggaggtggtttgggcttgtggggtaggaggacatatgggatacaagctgaggtgctgagcaggctgtcggtgaaggtctggagcccgggagatggctgggctggacataacatttgcgagccatcagcatccagatagtaatgggatccatgggcaccgatgagctcacccaggggaaattagacatttcgaatgtgcctcctgcaagacagatccaggcaaaatggcctcctgtttaaaagctgacagcagccctccctcccactttagcacccagggccccacttatcttcatccctgagtgcccccaggtgcccttccttcgtcggtggctatgtggtatttagtataaacctctgtcatcatgattatcccagaggcctgtcacggaggtttattttcagtctcccattagatataagctcctctgggcagactttcctgggatcgtctctgtgtcttttgcacctcagcagtgcctggcacgtggtgagtttcctggtgaaaggtggttgaatagattcagggtccatcttatttatcttatagcacctcctcaaacacacgcaccaggcgccaccaggcaccatgccacacatgtgacaggtgcatgccaaataaagcacgcccaccgcttccctgtgtgcttgaaacaacgtgtatcaatgtgtatagtatataccacatgtgcatataactgtatgtatacctgcgtatctacgtgcattatacacacatgcacacatgtgacattgaactctacccttcagcaaagaactggtagacttagacattcagaagagaaggctttccagacgagggaccttattggtagaacccagaaacatatgaatgcaggcccaggagactggcttagtacagagacaaaacttgccaccacagttgctgctgaatgcctctcgctagacaccgcttcactggaatcaataagtagagacgtttgcaaaaagcatttggtggtttcactggcttaaaacaaattattttcagccaaagtaattgacacaatgaagtggtttttggcaactccagcatttttaacagtaaaaaggatttgacttaaatcgccccccaaaaagttatgtaacatgaattttaccattcttagaaaaatatgttccagttgagaaacgattgaatggaattaggactctcttatactgcagcattactgtgcactttagccccagctgtcttcatcacaaacacttgaaaatccttaggaatagaacttagtgatgatgctttatctactattgagtcgcttatgcttaccaatcctgtatgcaaaatgtggcagccgctcccaggggactgtatggagctataataaagataatgatctgttagctcggcttcaccgaattagtcctttagaaagtaattaagcaggattgcccacactccactgctcccaaagactgaaatctggcttggtgtgtcatttctttgccttccttgaaaatggccttttattgagttgatataatttaattatataaaaatacgtgttcagattgcatcttgtacttaattatatcttacgccacggagttatttcccagccagagcttgtgctgttagaaggtggggtccatgtctcattcatgcgtgtatgtgtgtgtttaggtgcaggagaggaggggagagaaatgctggctttaaagagtgctcaccaagcatcaggtgttgggctgagcatttttaatgtattcttttgtttaattctcacaacacccttttgaagtgggtcctattattgtctccattttgaccgacaaggaaacagaggcccaaaactttgagtaacttgttcaagattgcctggccagtgtgtttcagagctggggtttgaagccaagcattctggctccactgtccatggtatactaagtactcagttatgctcgatgagtgaatgatgggaaaaaagatgggacagctatagacctgaaagggacttaggagattgttctggtctgcccttgcctgtaggagaggccacacatggtttacaagtgcagagcaaaggcctttcccttggattattggaggagtctctgaacagatttccttgtcttcacctgtttttcttcaaatcctacttcttcagcacttttaaaaatggaaacctcatttatctctgaattgcccagcatcccccggaagttccccatgactcttggggttcagggccgattctgggaaccacttgccacctgcttccctgaccctttcctcccagggccctggatgcagccaccctggacttctggtagcttctgaaggtgccaggctgttgtgtacaggattccacatgctgagcgcccttgccttccctgcagcgtcccttcctaccccttcttcacggagccgctcccttgtccttcagaaccctgctcccatgccacgggaaacctcagggcaggtagatgtaggcgcagctcactgggtgccccttaggccccaggccacgtgtctcagggcatagccagctccacttaaccgaccagaccaggaggacctgtaggatgtcattctggctcatgtgactcagtgggctctcagtactagtttgttgaacaaaagagttcagagtggaaatattaaatggtactttgagtcgtgcctacttaggacattttaacttttctctgttagcagcccgcaccaactgctgtgacttagtgtttgtgaaactcttccgtctttctgttaacagttgtagttctttcagtgtttcatcagcagccatattctatttacttattctctttcttttcttcttcttcttttttaaatcttttgaggtagggctcagtctgttgcccaggctggagcgcagtgatatgagctgggctcactgcagcctcgacctccccagcccaagcagtcctctagcatcagcctcctaagtagctgggactataggcacatgccaccgtgcccagctaatttttttatttttttgtggaaatggggtctcgatttgttcctcaagctggttttgaactcctgggctgaagtgatcctcctgcctcaacttcccaaagtgttgggattacagccatgagccactacacccagccctagaaccctttttttttcaaaaaaaaatttaatcatggtaaaatacatataaaatttagcatcttacacatttttaagtgtacagttcatggcgctaagtacattcacattgttgtgcagccatcactgccatccatctgcagaacttttcatcttcccaaactgaaatctgtccccattacataattccccactctcccccgccagctcctggtccagcattcgactttcttgtctctgtgcatttgactactttagatatctcatgtaagtggaatcacacaatatttgtctttttaggagtggcttacttcagtttcagaatgtttttttgaaaacaatagtttcatgaagttacagaatcctaaactgaatgtttaactaaaaggttcaaagccctgggcaagaagtgggataattacctgcacatttgaggctgtcagaacgcctgaagatgtgtcaccggatcacacccacgtgcattacaagcagccctgctcagcctcctgtgtaaagttttggtatccgatctccagaatcttttttttttttttttttttttttgagacattcttgttgcccaggctggagtgcagtggcgttaatctcggctcaccgcaacctctgcctcccgggttcaagcgattctcctacttcagcctcccgagtagctgggattacaggcatgctccaccacacccagctaattttgtatttttagtagagatgaggtttctccatgttggtcaggctggtctcgaactcccaacctcaggtgatctgcccaccttggcctcccaaaatgctgggattataggcatgagccactgcgcctggccagtctctggaatctctaatggaaagtgtgctccttcccccaagcaagagccagtacaagaccactctcaagaagggtagtgccaagtatgaggagacagggcatggattcagagctgcccttcacacccaagcacagcaacactggctgctctgacaagccaagaagggtgacaagtgtctaagctcttttaggaatggagagctgggaaaaaatttagagctgtttagaaaaatgatgaggggcatatgtttgctaaagaaatttcatgacatatgccttctgatcgccaataacatgcattctctcccaattagctaagaatctaagaagagaaacagcagatgcaggacccgggatctaggaaggatctggactggagtcttggaatatctctgagtttttgtttttttttaaggattgcttttgtacgtttggcaccgtttgatgccgtgaacgcctgattggagcatctcatttgcaggactgtttaaagagacaagcaggcacaggctgcacacgtgcagacgaataatgaactcttgagaattagcacaaaagattacgtgcattctttcgtgatcctctgtaatctaccaccaaattactttcccagagttggagtgcataggctttggagacagacacatctgggttgcagccttgattctgctgttcaatgaaatgactgtgtgaacttggataattacttattctttcctggcctcagtttcctcagctctaacaaggagagctggctgcaaggcgattctagagagtcctggcaggaagcaatggtgccctcaatggccaatttaaggcgattgtgacaaagtcactgttgtgaaggttggtgcaaggtatagggagaccacaagggctggggtagtggccaggactggtacagcaggcacagtcccaccctaggcctgaaggggcagaggggcagttaccagacctgggttcagagagggctgggtggacagagccgccagacaggagctgtgacagcaaccctaccccaggaagaaaccctgacctcactcccctccctccttcccctccactgctcctacccaaggggaagcctgttgatgcagcccacgcaggggagagagggtggagacggggtctgcagggcaggcttgagagctccagcacagcgttgtctagaatcaagatgctaggacttagtagtaagtgtcaccttagtgttgtcttgatggttacagctgggttgacttatcctcattcctgatgcctagtaggtatctcataaatgttagatttgtggtcttaccacacccctctgcttactgtgtgccaagagtttccaggactctgtggtcatgctttatcagtcacgagcccctcctttttccgtatttaaatactgttcatgccttaagacccggcctacagactatccctggggtgaagtcttccctcatctgtcccggattacttggtctttcctctgcgtttctgaattatgatacatacccctctgatcactgctggtttccctctgccctgcaccgtggtcagctgtgagggcctttgttgccaccatcagctagtgagttccttgagggcaggggcgctgtgttgtctttttctttcgtttgcttctttcccctgctctgcacagtgcctcgcagggagtttgtctccagtacattcttgttgaatgaaaaatcagatgctgaaattatgcaaagagctgtgttatctttaaattattataagagacaaggagagaacttctggatcctgagaagcttttcagtaataccagaaacatttcttcattgtgtacggtaataaaataacacacagtcataggtggcaaagcctcctaattactgtaggttggagtcagagtgtaagaacttccagcattcatggatcacatatattatatacgtatttagtgaaaaacaatatatattatttaattttgtttatttttctatttttgttcaaaatggtctctaaatgcaggccaaccacggtgtgtatttaactccccaaacaggaatctattccagtcttggagggatttgctgagagatgatacagtttacacaaaaccacgtatgctccacactgtggactatctggggaatttttcaagagtaatttcaacacactctattttccatccaattcactgcccttagaacataaccccaatataaaatgatctcctttctaatattttacagtttttaaagcaccttcagatctgtttctcacttaattctcacaaccaaactctaaggtaagtaaaatactactttatcatatttatcttacatgtaatcagggaagctgatgggtgctgagtaacttagccaaggccaaatagttcagtgaggaccacatctcgatcctaggtctcccgaaaaaaaccccaggtttctttgaactataccaagtggctttctatttgttgtcttcatgttagcatccgtgttgacctggtaatctatacctttataaaaagagaaaatacgctatagataattgaatttttgcaaattttgttatttttttccctgcaccttgaaaattgttatgccctgctttaagaaaccccgacattctgtaacattttctgaacattttcaattcccctatctgcttaaatatcatatttatcaaactttgaccttgttcttcaggccacattgtaggtaaagtggcttgttttttattttatttatttatttatttaattcctcttctccctcaaagcacaatctgctgtatgttaaaggggcggggaagctgctgactttgcagtagcgcatacttactcacgcaattttccattctggctgaagtaagggatgagacagcatgcccagaagctgtgtccagcacttggacaggcgccctggtcggcaccctgggaacctcggccgtgcactgccagctttctgggtccatcccagccctgggtgtatggcagatgccttgagatttaacagcccttgagtcaggcctgcaacgtcttatctgcgatttcaacatccagaaagctgtgaaacccagatgttttttggtaacttgtttgctagttggatttggcctgatctgaaatcatttgatgggtggggagaactcctctgaattgaaacatgtggcttttaatcgtttgtgttcatttcttttagtgtgaaagttctgcttttctgtagaggtatttttgaatgtgactatgggtcttgtcctaggcccttctgggatattggctaatgtatggtgtatgccctggacttccgttttaaagtctgaatctgagttcaaaaacatttcaggccccagggatttgaggaagggtttccagaccagtataaccagacagccgagccggccctgtaccgcgtctggttcctgggtggttcctgctgcaatgcggcccagtcagggcactgctgctgacttgtatctgcggacactccccagtgtttgagtgatgtttacgtggaagcctggcgtgtaggaagctggcgcccctgggggaactgcaaggccattttacagcattcacctgtcaccgtgtccttcagaaccagccagatgctacagagccaggctgtaccagagtccaggcccatgaaaacaaagttcagggagactctgttgactttgctaaattcatgggttccttccttccttcatttctttgttcaacaggaatttatgtatctgccataagaagacctgtgcttggcttgtgaaaagtagcagtgacacttcacatgagtgtaacatctgcggtttatggttttgttgcagtgtttcatttcgtcctcgcaaccattcagtggaccagctggtgttggcccttttcatagatgaggaaactgagggctaaatagcttctccacatctgcagattccaatcctcgtggcttttcctgttctgcggctttcataggccctctgcattatttgttaagactcagctattttctaaccccaacccacttgaagcagtggctttttcagatacccgggacaaatcacgtgaccttgtggctcagttttctatgccataaagtgggattccttcctaatccttgcaactcttaagtgaaataatctatgtgactgctttgtgaattgtgaaactcaatctggtgactatagttaataataacatattacatgtttcaaaattgctaaaggagtggatcttaaatgttctcagcacaaaaaaatgatacatatgtgatgtgatgggtatgttaattagcttgatgtaatcatccacatacatatacatgtatcaaagcattgcattgtaccccctaaatatatacaattattgtcagttaaagaaaaaactctgatcacatggtaaagtatttctgattcttcttcctcttttcctacatccagatatgtctgtctgggatcccatatggtggttctccccgtctcttatgatgttcacctcatacacggttgacccttgaacaacgcaggggttagggggtgctgagccctagcacagttaaaaattcatgtataataggggttttttttttgtttttttgggtttttgttttttgaaacagggtctcgctctatcacccaggctagagtgcagtggttgatcacagctcactgcagccttgactcactgggctcaagtgatccacccacgtcggcctcccaaagttctgggattacaggttcgagccactgtgccttgtgttgagtgtaacatttgactcctcaaagtcttaactactaacagcttactattgaccggaaccttaccaataatacaagcagtcgattaacacatattttgtatgttatatgtattgtatactgtattcttacaatacagtgagctagggaaaggaaaatgttactaagaaaatcaagccgagttgggtggctcatgcctgtaatcccaacactttgggtggccaaggcgggaggatcacttgaccctaggagttttagatcagcctgggcaacacgataaaaccctgtctctaccaaaaaaaaaaaaaaaaaaaaattagccaggctttgtggcacgaacctatagtcccagctacttaagaggctggggtggaggattgcttgaaactggaaggttgaggctgcagtgagccaagatcacatccctgcactccagactaggcaacaggaatgagactatgtctcaaaaagagagagagagagagaaaggaaggaaagaaagaaaataaagaaaaatcataaggaagagaaaatacatgtactattcataagtggcagtggatcatcacaaaggtcttcaacctcattgtcttcacattgaataggctgaggaggaggaagggttggtcttgctgtctcagaggtggcacaggtggcagaaaattcctgtgtaagtggatctgcgcagttgaaacccacagtgttcaagagtcacccgtacttatttctctactctcctgtctgacatctcaagagctaagcccccttggtattcattcatctttgagaactctgcattgcctagtttaataggtgaacagtacgtgtgtgttggagtttgtacagtggggagatgtattgctggtaattcagggggttagggttgctgatgcagtcagggaggcctgactgtgcatgcccagccccttcatcaccaggcgccatgtgggtgcccaaccaaagacattcatgaggctgtctctctgtgataacgaaacagctggacatacactgagaaaggaagtcagccaaatgaatattttctaacctaactctaaaaaggtagatgccaggcagcatccaggtgacgatgcttttttgaggctgacatagtggtacacagcattgaggtgctgtcagatctcttccctgccgtccacctcccagtgaccattcctcggctgcacaatgcgcctccccacatgcattgtcccacggccctccctgtacaatcggctcttcactttgcctggctcagaggtgtcttccataccaaagaggctcagagtgtcaggatttaggggaggttggaagcaggtggggtagggaggggagtcagccttcctcctctgcagggttgcagaaagtttcaggggtcaaggaaataataaacacctttgaatagaggctcagaattgtttgtttggagttcccagtgactagtatctcagctgccaacagctttggtgcaatttacttttctttagctgaacattcttacgtggttttaaaagcaagtaaacagataaagtgtttctaagtgtaataattctctttcctgatgcatagctaacaagcagtgagcaggcagaggggccctaaaccaaaggctctctcatttactctgtaaaaaatctgttccacactgcgtaacctccacatccttctcctaaggctgaataaattgggtgccaccctttgaaatgtagtactctgtttggcccaggaaccgtagttagccgtctttcttgaggaaagctgattaatcttgttttgccaagcagaaggattatgggtatggctgaaccagttttgtacgctttgaaatatcagccctgtcaattttgtgtttctcagtgagggaggaacaggggacggtctcacgcaagagaaatcctggcttttgatttaaggaaaaaacccccagccacttagctttttttctttttaatcattatcttcaagacaaaaattcaaataccctaacatgtacaattatatagtgtttttgttgtagaaaatatcatttggtagattatcaagactgacaaaaataactatctttacctattaaaaacgattgagatggccaggtgtggtggctcacgcctgtaatcccagcactgtgggaggccgaggcagaaggattgcctgagcccaggagtttgagaccagcctaggtcgcatagtgagacccggtctctataaaaatttagccagttgtggtggcgtgtgcctgtagtcccagttacttgggaggctgaggtgggaggatcgcttgagcctgggaagatagttgctgcagtgagctacaatcatgccacagctctccagcctgggaggcagagcaagactctgtcttaaaaaaaaaatttttttttaactatagagatggaggaggactggctattttgcagatcattataccaatcctaatcaatagctagttatcaacaatttcatcaactcaattggaattgagacttgagtttagacaagctgaatatttatttttatgctccagaaaacctgacccaagaatcccttttacatctgccaggaggttgctggtgcctgggtcagctgcccggagcacactgtgcctgcgtggagacctttcttagcagacgaaggccagcagcatcagagcagtgcaaattgcaagcccaagatctaaaacagatgatgaagagctatgtatttgtcactgtatccttccacggtgttttatgctattgtaacttcaagagttgacacagttctttccccaacactaaaacatgaaagggtcaggtagagctgttgccattttcatggaaacctagagttgtaaaggacctcggaagattcaggactagatttcatcttaaaagagacattgaaaaccagtaactcaaaaggaaggtcaaaggaacttattttatttttatttaaatttttttagggaccagatctcgctttgtcactcaggctggagtgcagtttcttggcatgatcctggctcactataatctcgaactcctgggctcaagcaatcctcacaagtagctagactacaaatgtgccccaccaagtccagataattttttttctaaattttgtagtgctgggatcttgctgtgttgcccagaccagtctcaaactcctggtctcaagtgctcttcctgccttggcctgccgaagtgctgaggttacagacatgagccactgtgcctggctggaaagtattttattgtaaagcattttaaaattaataggtcatgaaactataaaacaaagaatagattgcataatggattgtgtgaaaatacaagttaaagctattttacagagcagttagaggcttgtctcatacctcatctgaggctccagtgaatcccaccccaaatggaccagttagcatgcagccaataagacatcttcctgggccacagacaggtcctcttgtgcaggacagctgtcatgcacatggggctcaatggatgttattcttacagcgacctcgtgccaagcactatgctagcatatatgctcttcatttattgcagtaatccttggagggtaggttggattaccttggatttacagatagaacagctgagctcagagagggaaatggaattactcagggtcacacagctagggaggggcagagccagtattcagcctggtttgtgtgattccagaaccttcctgtggagcccatactcgtggcttgagcattgcctagtcattttgatatctgcgagcttgagtttccccttatgctaaaactgggatctgtgaggcttggcttttttttttttttttttttgagacagagtctcgctctgtcgcccaggctggagtgcagtggcgcgatctcggctcactgcaagctccacctcccgggttcacacttttctcctgcctcagccttccaagtagctgggactacaggcacctgccaccactcccggctaattttttgtatttttaatagagacggggtttcactgtgttagccaggatggtctcgatctcctgaccttgtgatctgctcgcctcggcttcccaaagtgccaagattacaggtgtgagccactgcgccctgctgaggcttggcttctaagaactgcacaccttctaatagtataatgatatgcccccttgttgtgtcatgactaacattgatttattttagagaaaattgtaattgatctatttttcttctgcaaacaatggtttctttttgactttgttaaaatgaagatgaatagctttttattttagagagccaaattgtagcagctctttgtaaatactttctgcattctagaaaaacaactttgattggatggcagaactggagattagtagaattaggaaaatttctgagttactctttgttgggtttttgtgagctaaggggatttttagggtgtttgtgatgtttctttatgacttgaaaggtaaattgcgtcggtgacatcagccttgattctgtcgtagagatgcttacgagatgagcatcttgtgtcatgctcagaggtaaagggcggctcctggaagatagaaatctgacaggggtaagaatctgacaggggtaagaatgtggagattcttgtgaagcaagcacttcagttacggcagctgctgttgttcagagcacagatgtttgcacattgttttactttctagtcactggctttcatcaatggaatccttccttttggaggattattattgatgtcaaatgttgtcagatgaaactcaaggcatggcctggggtacctctgtggtcagagagatccgactagacgtactttcactcatatttgactttattattttttttagacggagtctcactctgtcgcccaggctgcagtgcagtgacatgatcttggctcactgcaacctccacctcctgggctcaagcgattctcctggctcagcctcctgagtagctgggactacaaacgcccactaccatgtccgactaattttgtatttttagtagagatggggtttcaccatgttggtaaggctggtcttgatctcctaacctcaggtgattggcctgccttggcctcccaaagttatgggattataggcgtgagccaccgcacccagcccatgtttgatttgattcccacaaccacagtctgtctgtaggcagataggcctcgtgctacagataaggacatcaggagcttagaggctggatggatgcttcactcagctcgcctggtgacagtgggattcctggtccataggtcttcttctgacccacattgcttcttagtttggtccaactttgaaagttgcatgtttcatttgaaatgaagaaggcctaagccagaatggtacagctgtcacatccaagtgtaagatccatttctaactgccagaggcatggcagatgcctcagagaagggaggagtccatttggatggagctgtgtgtggctgacatcttcctactccatgtccttcactttggcacgtaggttagcagttctcaagctttttggtctgtcttgcgtttaaatggctgttctcccaggcttgattttgtaacaccgtgctttgattccttgagaacattgattctctgagttatgcagaccttccaaatgtgacatatttcattatacaatatcaaaaaagcacatgggttaatatcaacccccaatgtcatcaaaacagcatgtaggtgttggggagctgtcaggcttacagaggctggtacaagttttccaaagttctttcttttttttctggaaagctcaaatttatccttggcagcaaatgctgttgtttttcctggagtgacgggcttactacattcatttttttgagaaaatgattatagaacactcaggtgtgaagaaccctggtttgtccatcagttgttctttcaagtgaaaatgatgttccctcagaagaagctcacagcttgactgcacagtgctcagtttggctggtgtgcagcaaaagtgcttcataaagagacctgtactcaagggttgagctttaataaaattaatattgtttacagcgtcatcaaaggcctttgtatatgaacttggcatctttcttgtaggtggcagtgaagaagagcacagcgacgtggtgcctgtcccggctggtgctgaggcagcccaggtgccgccaccatggctcccgcagcattagtgcaggtgtcacacaacgacaaaggaaattagagcttggcattgttaaggacgtaattctgacctcagggacttcctgaaggggtctcagggactcaggggtctgtggaccacacttttagaactgctgctgttgagtattggaaagttccccattcggcacattccttgagggccgactctgtgccaggtgttgtgctaggtgctggggatactcagatgaacggcacagtccctgactgcaaggagctcacggtctaatggagaagggggtcaagtaaacagatgcttgcaaaaccttctcgtaagtgccatgatcacagtaagcagaagggatgctctgctagagtgtaggtggagcccccagcccagcttggtattctggtggtggtgataaggggtgtttcctggaggaagtatcactgagctgagtttggaagggtagaagtagaagtaaagccagttaaagaagatgggggaggtgttccatgaagatagagtggctcgggaaaaggcttggaagcaggcgaaagtgtgcagtgttcaagaaaccacaaatagttcagtagggctgcagtacaagagttgggggtgggggctcagggataagagggggccaaagaagtatctggaggccagatcccaaagacaatggagatccactacaggagtttagcagggatgtgaggtgatcaaatctgcactttggaaggatcactcagacataaagaagaggaatgggatgcggagtgatgagagtgatggataaaccagttgaggttgttgccggagtccagaaaacaccacttaggcccaaaccaaggaggtgacaatggaggtgaatgtgtggatatttagaagatatttaatgtcctatatctgcagatattcgaataggcaggatttgatgattgattcaatgtagagggcaaaaaatatggaatcagtcaaagatacaccaagatttgtagattgatggctgcacggtggtgctttcatagaggtgaggggtgtgggaagaggattagaggcaagatgaccatgcgaacttcatgtatcatattcacacacacgtgtgcatcactctatcttcaggcagaagtgtccagaaggagtcagagctggagcttgagagggttctggccttgaggtgtcagctgaggagtcatcagtgtaggtcgtggttgagggcccccttgttgatgagatcacccagaaggagagtgtggacttgccgactatagtcacagggctcaagtcaggagagaagtcaaagcaagccacgggttttaggaggagggaaacctgaggcctggatcgtcctggtccttcacgtctgcagaggagagcagagaagaattttaaattattaactcctcaactaaactacatatcgtcagaacatgcttttcaaattaatttaattgttgattttatttagttttttagagacagggtctcgctctgtcacccacgcttcagtatagtggtgcaatcatagtttactgcagccttgagaaactcctgagctcaagtgatcctcagcctcctgagtggctgggactgtaggcatgcaccaccctgcttggctaagttttttaaaaagttgttttagagacagggtcttgctatgttgcccagattggtctttgaactcttggcctcaagtcatcctttcaccttggcctcccaaggtgtggggactacaggcatgagccactgcgcctggccagaacatgcttttaaatgtaacatactaaacatgatattttatgagaatacagcctatataatatacgattttgttcctgagctcacacagactttaggtctgtaaaggatggtaaaaataccaattacagtttatatttccttttcccaccagaacatttttattttaaaagtagggtggtttttccttcccatctatggtttcatagttctcggaaatgttaacccttctttctctatacgaataaggtgtcctggtaattttgcaagtgatgatttccattatggtgggtggccacgacggaaatgatgttagaagtgccagcgtgcacgtgaagtttagacaagatctgttccttggccctgcggtgacgggaagaggggagatggaggtgttcactctcgtcttagagcttggtgtcaggaagctctgtctggaggtttccctccgtggtgggaggggtgaagcagacatgggagggggaaaaggcgggtctgcaacaggagcccagcctctcgcaccgagcatccctcagtgaagcgcccaggcccacaccacgcagccagcctcactgggctgggggagggctcacgattactttctgtttctctgcgtttgaaaatcttgtgtaatgtgcttctgcacttttaaaatcaagaggaataaaataataaccaaataaaatgactcttagccctgagcttgtgacacacaggcaatttgcttatcacctaggccaccaattaatagtacttccctataactcagggcctggggggttccaatggaagagctgagcatgtctggaggatgttcctgtctgataccagccatcctaacttccagaatataggcaacttggcagcaagagttttaaggttattatcaacctggtatgtggttgtggaagttgatatatctttacatatttttacttaaagctttttagctctacctatacatgggagcaggggctaacacagtattttgttttattgatatatttttcgttttgtggttactgaaagtgaattgtatggcacgttgctctcacttgtaatcagtgacggtgtagcctaagaaacctggtcactcaactgcattgctcagcggagaggaagcttctgtacgtcttggaccttactattggtagcccgtgctcagcagctggcctcttgcaaagggaggactattgaggatgaagagaagaatcttgacatctcaacctcttctcaccctggtttctgcatcatagttttaccatttggttagaacaccagttcaatgcacagtcagatatacagtgcaggcaaaatacgaaaccaaagatacagagtaattacttttccattatcccaatgtactttttctgtgagcaaatgaattcctaaccacagcttgtataccggtgtcttaacgtcaggtaaaggatccaggggcaggttccaaattgaagctatattttgctttagttcacctccattaacacttaggtccaagtgtcgtctctagtcggttgctgtaaactgaactgaagtgcctccactacaaggagatgaggaaaagcatggaaggaggagccatgtggtgggaaggtgcacggaggcccggtggcagatttcagctgagatttttcaaaagcctacacactttctaacagtggaaccacttgccttagaaagtgcccgcccccaattgcatttgaaggttcaagcagaggctggatgatgcctaacatggttattgcagcaggacttcttacatttactttttttttttttttttttggagacagtgtcttgctctgcccaggctagagtgcagtgacacggtcatagctcactgcagactcaagcacctgggctcaagtgatcctactgcctgagccgcccaagtggctaggaccgtaggcatgtgccaccatgcctggctaattttgttgttgttgagacagggtctcacttggttgcccaagctggtcttgaacttagtcctcctgcctcaacatctcaaagtgttgcgattacaggcttgaggcaccacgcccagcctcttactttaacttttaaatttttcctgcttttatatagagctttttaaaatttgagcctctccaagccgggcaaagtggctcatgcctataatcccagctgttgagaggctgagacgggggaatcacttgaggccaaaagttcaagaccagcccgagcaacatagcaagaccgtctctccctcccttttgtctcttaaaacaaaaatgcctcccagtagccttgcaaaacaagaccattatccatatgatacaggtgaggaaattgggtctggctgagtgacttgttcaggataatttgactccacatcttttgacatccagggctctttccatttgtcacacctgctgccttctgctccaggagaagcagattgtgccactgcactccagcctgggcagaaggaaggggacaccggcccttttgactctagagtgtctgtgccatgtgacaacacatgatgaaatggaataggaatggatctaaaaatcattgagattaggatctacagatacatttctacgtgctaatatgtcggttttataatgtacttctgtggctaaccacagaccactggcagggaatgtatctgtggttagatagctagagtgtttgttcactccctatcaggagggcagtaaatcaagaaggcaggttgaagcacagcttcaaatgctgccacgtggctgtggaagactgtggaataagcagcagccagccagcctggtgtgtgagatgagggatccgatcggttgctcgtgttggaacaaaggcattttgcagccctccaggtggttgcagatgattgcaaggggaagctctgatgtcctaccagagggcaggttgcatgtatcttcaatatagttaggagtccttagtatcctaggacatatgtttttttttagttccaccttttgagaccatagctccatcgttaatggtgtttttgaataccaaatgcaggcactatatatgagaatacatgtgcatgtggctgtgtgtgtatgtgtgtgagagagagaggggaaaccctggtaactgatgaataatcatttaacaacactcagctgtttgaataacaatagtaataattctttgtatttgtaagctccattcacagatatgatttgaatggtaatataactagggttaaaaatcattattgttctcaccagtgctctgaggaagttgagcccccagctggaggatgagggcagggaaataaagatcttgtactgcaccttctctgtcttcctttgatttatctttttcatattcatttatattatttctccacaccccctccatctctctcattttctttcttagcccctcttgtaggtgatacctcttggactgggacttgcagagccagtgattgtgccaagaaatgccgtttcttttttctttattatccccatgccccacatgaaaggccattgaacttaaacttgcctgcagggggtggcagtagaggaagcccacttggaggggctttgccagccaaagccacactcctcctttcttcagttgcgtttcttatttccatttctttggttcccgctcaggctgctgaagcgtctctccagtcttttcctattttagcacgccttctttttggcctgctttgccccaccagacatgctgttgtcaccagtccaatccatctgtgttttctggatacacactgggtgtcaatgctttgacaagtgtgggttccagcaagcctaagcgccgggccctacagagccatctcctccgggaagaagacccagccccctgtgcccttctggtttgagatgcgtgatcctgccgtgccctccggttccagggtggggtgggacggccagcttatgatgtgtaactagctgcttgtcgtccagactcagttgcttttaataaaattgccacttaagagaccctgctgctggcagagtagcttcttttcttctgcttgtgctagttcccggctcacagcagcatctgccctgcacgtgggtggtgtcggccttgccctggccgcactgtggctgtgtccccacttagccatcagaaccaggcatttccagtggagtgcagtgttgcaggagggtcaccaggcttagtgtgatgaggcctggattacacttcgggtctggacgtcctctctgagcctgaatttctgtgatctataaaattggataaagtatcaaataataccgatcctaacagtcttgatcattgtagaaacaaatgaaccaatgtctggttagagcctggaccgtgaaagtgctagaacgtgttcattcttcctgcgtagattgagtgtctccagggtgccaagcccagttctaggctctgggaaagagcagtgaagacaacaaaccaacaaaacaagtcctcacattctagtgggagagggacagtgggcaagcaagcagataagtgaacaagagagttccctggagggttgagtatggtgaagaactaaaacagtgactgaagggacagagtgtgtagcctggctgtcacttggtatctctctacttaaactggagtcaggcgccatttcctccaggaagctttccctgattcttccaggctaaagtaaccacagctgtggtgcattgtgtagctactaggccccaaggactttcccatgcatcatctctctctcttttttttaagatggagtctcgctctgtcgccaggctggaatggagtgccgtggcgcgatctcggttcactgcaacctctgcctcccggattgaagggattctcctgccttagcctccctagtagctgggattacaggcacccgccaccatgcccagctaattttttgtatttttttagtagagatggggtttcactatgttggtctggctggtctcaaactcctgacctcaggcgatccacccgcctcagcctcccaaagtgctgggattacaggcgtgagccaccacgcccggctccatgcatcacctctaatcctcattctcctctatgtgctaagcgttattctcaccatgtttcctctgtgtcttatttatttattttttagatgcatcacgtttttattagggaaatgtaaatcaaaatcacaataatacagcatggatccctgcatacacatactatgtacacacatatgtatgtcagtaattggcctcggaaatgcaaatcaaaatcacaataatacagcatggatccctgcatacacatactgtgtacacacatatatatgtcagtaattggcctcaacacagtaagtagcttttcaggtcttatcagtgaaaatttcttttttttttcttcttgtaaaaatcgctttaggggtacagtgcaggtaggtttgttacatggacatattgcataatggtgaggtttgggcttctggtgaacctatcgctggaatggtgaacactgtaccctgaacagtggaccccatagtgagcacaataggcgattttcaatcctcccccctcctaccctccacccttttggagcctccagtgtctattattccactgtgtgtccatgtgaaccactgtttagctcccacttatgagtaaggacgtgcagtatagaattttctgtttctgagttactgcacttagaatagtggattccagttccatccatgttgctaaagaagacatgatttcattcttttttatggctgtgtaatattccagggtcatttttatttttttgagacaggatcttgttctgtctcccaggctggagtgcagtggcacagtctcagctcactgcaacctctgcctccagggttcaagtgatactcccacctcagcctgacaagtaactgggactacaggtgtgtgccactatgctcggctagtttttgtattgttttgtagagatgggggtcttgctatgttgcccaggccagtcttgaactcctgggctcaaatgatcctcccaccttggcctcccaaagtgctgggattacaagtatgagccctgtgcctggccaccacattttgtttatccagtccttcattgatggacacttagattgattccatgactttgctgttgtgaatagtgctgtgatgaacatgtgggtgctgatgtctgtttgatacaatgatttcacttcctttggatagatacccggtagtgggattgtgggtggaacgtacctcagagagatcaagctactgcccgagatcacatactatcaaggggcagaactgagtgtcctaactcgagactcagccctttctaccacatctccttgtcttctctgtcccaggccttatgttcacctctcttcaacctcaccacagtctggaaatttatgtttctgtgtttttcctgtcagcctctgaactcctgaagggctaggaactgttattgtcagcacctggagccacactaagcgcttactaggagtttattgcaagtttactgagttcataactagccccagccccttgccatgtatttccacttagatgccacagatttctccttcagagtgcttgtagactgcaaagggagcagtcgaggtgaatatgcttggagaggacataagggaaggttttttcatgtaaacgaactcattttagatgtaaggcatcacttttcagtgaagcagggactttttacaaagtcttgcctctgaactttacagtaagcaagccgagatccatgcttaccactgcaagaaaactttggtgggccgttgtacaacagtaggcaattgtgttggcttaatgtgagttcttgtgaggttgacctttgtatgttttgaaagtctttagcatttaaagtctgcttctgtgcattgatttttttttttttttttttttttttgagatggagtcttgctccgtcacccaggctggagtgcagtggcgtgatctcggctcactgcaacctcctcctcccaggttcaagcaattctcctgcctcagcctctcgagtaactgggattacaggcatgtgccaccacgccctgctaatttttgtatttttagtagacacagggttttgccatgttggccaggctggtttcgaacacctgacctcatgtgatccgcctccctcagcctcccacagtgctgggattacaggcgtgagccactgtgcccagccctatgcattgattttgagcaagaaagggataggactaaattatgtggatgcactgtacaattcccaagaagggttagaattctagtcttgccaactcactcctccaagggcccaagtttgatcaccggaggattattccttaagcagcacgccacagccttctgcagttccccatgggcctggtgagaatgagcccctgccccattgtgaatggacacttctttgttcattgactaacgccactgctgtgtaacaccgtggtagggtccaattttagtatcatcttgcttcttgggaaaaaaaaacaaaaaaaaacaaaaaaacaccttaggtcagaaaaagacgagactattgaagaattccatgcatgttataaatgtgattaagtccacactgctgccaaggagtggaaacaaatcaggcacagaactcatggtaggacttcatcaggactggaatattctacacaacaaaggacttcatcttgactagggacagagcaggatggagctcagcacatggagaagactatttgaggcagagagtgtcagtaaactcatccattaatttttttcattcattcagcgccagattttgtacacgtactaagtgctgaataaatacagcagtgctgcaggcagtcccagggagccagtcactgactgtaaatacgctggggggtatttacatgtagagggggatgaccacctgaagacatggggagaagacagccagtgagagaggcctcagaagaaactaaccctgggccctaatccagtctggctagtgtccttataagaagaggagattagtcacagacacgtagaggaggatgaccacctgaagacacagggagaagatggccagcgagagaggcctcagaagaaactagcgtaactggaccttgccggttttgagtatcgtgagtaccctggcagcatagctggtatgagtactcgaagtaccccggcagagtagcggcacctagtagccacaagtaaggtgcaaatacccttgcagcgtatccaggcccagtaggcacgagtactataaataccctctgttatgggcttacttgtgttaccccaaattcatgtgttgaatctctaaccctagtgcctcagagcatgactatacttggaaatagagtctttaaagaggtgattaagttaaacgtggccgttagagtgggccctactccagtctgactggtgtccttataagaagaggagataagacttagacacatagagggggcaaccacctgaaagggagaagacggccagcgagagaggcctcagaagaaacgaaccctgctgaccttgatctcaggaagctaaacttgatctcagatgtccagcctccaggattgtttaagccccccagtctgtagtactttgttatggcagccctagcaagctaacatgccgctgtagagtgtgcagacccgcaggcatgggtcccgtgagcacccagcagggtgtctgggtgcagtagatgcgatggttggtgtataatatgaacactgtctctgcaggattcttgcctgtgaatgaaatggagggaattgaagatttcggtgtgcttgcagtctaggtcttgatctcaggtcatttcatagatgtttgagagttagagttctttcttgttatgattctagtcatgtatgtgttacccaacaatatttcattttatattaaaattacagatgcttgttagctcttttgttttgaatatttctgttcgctattcttatacagcagtcttccgttattcagttttgctttctgcagtttcagttacccacagtcagctgcagtctgaggatattaaatggaaaatttcagaaataagcaatttctaagttttaaattgtatgccattctgagtggcaggatgaaaccttgtgccgtctgctttcatccctttgtcccatgcacccacactgtagacgcccctacccatgagtcacttaataggagtctccgttatcaaatgactatcatggtatcacagttcttgtattcaaggaacccttattttaccagtagtggcctcaaagctcaagagtagtgatgctggcatattgttataattgttctattttattattagttatttattattacttaatctcttacagtgtctaatttatgaattaaacatcatcataggtcaccataggtatatatatacacttgacccttgaacaatataggggttacgggtgctaatccccacacagttgaaaatctacttttgattccccagaagttaactacaaatagcctgctgttgaccagaagccttaccagtaacataaacagttgataaacacatattttgtatgttatatgtattatatgctgtattcttcaaataagctggagaaaagaaaatgttattaaggaaatcataaggaagagaaaatgtatttactattctgttagtggaagcgggtcatcataacggtcttcatcctcgtcgtcttcacgttgagtaggctgaggaggaggaggaagaggaaagcattggtcttgctgtctcaggagtgacaagcagaaaaaaatccacatagaagtggatccacgcaattcaaaccagtgttgttcaactgtctaggaaaaaacacagtgtatatagggttcagtgctgtccacagttccaggaatcccctgcgggtcttggaatgtatctcctgtggttaatgggggggccactgtacagactgggcccttctttgggcgcccctttttctctgtttgaccaactcctttttattctttaaaacccagccaccagtgtcacctggaccaagaatcctttcctgtgtcatccagggcccctctcagtgcctctggaggaggctctgcctttttctttgctgttgcactctcatgagtgacagcatctgtccctcaccccacaaagtctctggcccagaaggttctcttcattattgctttttgagtgaacacttgaatgaatatatcactttcttgaaagccagtctttcaaaatggttgaattattttgttatttttaaattgtggtaaaatatatgtaacaaaatttgtgattttaaccattttaaatgtataaattcagtgacattaattacattcacaatattgtgcaaccatcaccactctctacttcaaaaattttcatgaccccaaactgaaactcagtactcaatgaagcagcacctccccatccctcccgcctcccagcccgtggtaacccacagtctgctttctgtctctgaatttgcctactctgtgtatctcaccttactctgtagtagtgacttagatgaaatataatatttgtctcatacaatactagtctttttgtgactggtttatttcacttagcataatgttttcaagttccatctgcttaccagaactatattcctttatggccaaataatattcgattatatggataggtcccattttgcttatccgttcatccatccatggacatttgggttgtttctaccttctggctattgtgaataatgctgttttgaacatagctttgaaatacctgttcaagcctctgttttcagttctattgcgtgtctacctaggagtagaattgccggatcatatggtgatcctacgtttaactttttgaggatctgccaaaactgttttccacaatggctgtaccattttacattcctaccagcagtgcaagagggttctaatttcttcgcattcttgccaatgcttgttattttcattttttttatgatagccattctagtatgtgtgaaggagtagctcattatggctttaatttgcgtttctgtaatgactagtgatgttgagtgtcttttcatgtgcttattggccatttgtatatcttcttagagaaacatctatttaaggtctttgcccattttgaaattgggttgtttatctttttgttattgaacaaaatggttgaaatttaaaagaaaaaagggtgctacttgaaaggtggacccttcctaatacctggctttccaggaagcttattctctgatggtgctagattgacaatgttattttaatcatcgtttcctcttccctcctgctttcttggctttttttgcactttttggagcattcatgttttgcctttttgttttttttgttttttgagacagagtctagctcttgtcacccaggctggagtgcagtggtgcaatctcggctcactgcaacctccacctcccgggttcaagcaattctcctgcctcagcctcccaagtagctgggattacaggcacccaccaccgcccccagctaagttttgtatttttagtagagacggggtttcaccacgttggccaggctggtctcgaactcctgacctcaggtgatccgcccgcctcagcctcctaaagtgctgggattacaggtatgagccactgcgcccattttggattaaacttcaaatagtactcaaagaatcagactgccgataatgtaggacaactgtccagaccgggccctttgtcagatgtcccttttctctctttgaccaactccttttgattctttaaaactcagccaccagtgtcacctggatcaagaatactgtcctgtgtcatctaagggccctctcagtgcctctctaaattccaaattttcactctggaaaattcaacaactcaaatgtattttcaagtgtattttaaaaattagagaactagattgtcaattcacgttatgtgaatgctctttaaaaagtggtaatgttttataaacgtactctgagcagtgttttccagtatattttggtgtgggatttggagcagggctttgaagtggaaaggcaaatgttttcttgggtagatctgaatattccgcaaaatgattccattgatcatccggtcgtagtctcactctctgaactataatgaaaagagagccaggggagagtgcagctgctccagggacccgggacaggtaccctggaaaggcatgggtagaggttccccccatcgttgggcccactggcatcactcctgttgctcccatcggcagctgtgggccagggcctctcatcctgtgtggaatctggcatcaggaattttcagtgggattttgaaagctattctaagagagtaaaatggtgggaggcatacacttctgtgctggctgctgaaatatgtggtatactggcctggaatacaactattttctctttttttaaatgaacgagttcattaagaaaaaaaatctgctgcaacctatagatccaaacacagttcaatacatcttttttttctttgtccaaactgaatattttcttatttttaatatcctgcctcattccatgaaggatttatgatatcttccagcagttgagtaggtttgctgaaatcattaacaaatatacaatttttttcttttcattttttactgaatgatgggattttttttttttttgctgcttcctccccttaacaaaaaagctttcttgaggtatcaacctataataatctgagcatatttaaatgaacaatttgataagttttgacatctgtatatgttcatgagaccataaccacaatcaagataatgaagatgttcattgcccctaaagtttcttttgtgcccctttgtcagccctccctgcccccctccactccaactactgacctgtcactattgattagtttgcattttgtgtaatcttatgtaactggaaccatgcagaatgtactctattttctggctgctttcacccagcacaattttgatattcatccgtgctgttgcttgtatcaatgttaatatgtttttatcgctgggcgccattgtatggacctaccacagtttatttatccatttacttgttgatggacatttgggctgtttcccaaatgtcccagtagtttttggctattacaaataaagctgcttttaacatttgtgtccatgtctttgtatggatggaggctttcatttctcttggggaaatacttgggcatggaatggccggactcaatagtgggtgtgtgtttagctgtctgccaaagtggttgtaccacctgacatccccacagccatgtcagagatgcaattgctgattcacatgctcaccaaaacttggtgtggtcggtctttttattttcagaccttctaacgggcgtgaggtgataactcatttcggttttaatttgcatttccctaatgactaatgatgttgagcaccttttgatatgcttatttgccatctgtatatcttccttggccaagtctctgttagatcttttgcttcgttttaaaattgggttattcactttcttgttgagctttgagaatgcttcatatattctggatacaagttctttatcagatatgtgatttgtaaatattttctcttgttctgtggcttatcttttcactctcctaacagtgtcttttgaaaagcagaagttcttaaatctaatttaccatttttttcttttttaaaaaataatttcaacttttattttagattcaaggggtacatgtgtcggttcttacatgggtgtatttcatgatgctgaggtttggggtatgattgattctgacacccaggtagtgagcatagtactcaataagttttgttttgtttttatggattggggttttgctgtcatatctacaagatctttgcctaaccaaggttataaagatttcctcctcagttttcttctacaagttttatagttttatttcttacttttaggtttatgatccattttgaattaatttttgcatatggtgcaatgtatggattgaggttcttttgtgtgtgtgggtatggatatgcaattgttccagcctaatttgttgaaaagactgtcttttctctactgaattgcctttgtacttttgttaaaaatcagttgcccataaaggtatcggtctgtttcttaactctctattctattctgttgatctgtttacaccattaccatgttgtcttgatgactgtcacttaagttgggcagtgtaagtctttcagctttgctctttttcaaagttgtggctagtctaggttcttcacatttccatgtgcattttgggatctgctattgagtttctacaaaaatcctgctgggatttttattgattgcattgaatctatacattaaatttttctgtagggaaaattgttagcttaacagtaatgaacagcaatgagtcttccaacccacagacacggtatatctctctgtttatttaggtcttctttgctttctctcagcagtgttttctgagagtaaaagcagtgttactttttggtgtgcagatgttgaacatcttttgccatatttatccctaagcatttcatatttttgataatgtaaatagtcccaattgtttggtgcaagtatatagaaatacaattgatttttatgtcttgatcttctatcctgaaaccttgataaacttacttattagttccagtaacttctttgtgtattccttcgattttctagttggacagccatgtcatttgtgaacaaaggcagttttacttattcctttctaatctagagagcttatatttctttttatttttcactgactaaaacctccaagataatattgaaatgtgtgatatttgttgtaggtgttctatagacacccttcatcagattgaggaagtccttttctcttcctagttcactgagtgtttatcagaaatggatgttggattttgtcaaatgctttttctgcatttattgacctgattacctcatttttcttttttagtctgtaaatacggattacattgatatttgaatgttaaaccattcctagaataaacctattaataggtcatgatgtattcttttttatataagactttcatttcctaaaattttaagaatgtttcctttttttttttgagacaaagtcttgctctatcacccaggctggagtgcagtggtgcagtctcggctcactgcaagctccgcctcccagttcaagcaattcttctgtctcagcctcctgagtagctgggactacaggtgcacgccaccatgcccaggtgatttctgtattttaagtagagatgggatttcaccatattggttaggctggtctcaaacacctgacctcaggttatgcacccgtggcctcccaaagtgctgggattacaagtgtgaggtactgtgcccggcctgcatttattttcatgagggatattggtctgtagttttcttttgtaatgtgtttgtctgattttgatattagagtaatgctggcctaatagatgagttgagaaatatttcttccttatcagttatctgaaatagtttgtgtgaattaacattattttttcctgaaatatttggtagaattcaccagtgaggttatcagtgatttgtggaaagattttgtttttgtttttgttttgttttgagaaagggtgtgactctgtcgcctaggctggagtgcagtggagtgatcttggctcactgcaacctctatctcccggcttcaagcaatcctcccacctcagcctccctagtagctgggactagaggtgtgcaccaccatacccagctaatttttgtattttttttgtagagatggggttttcatttgttacccaggcaagtctcaaactcctgagctcaagcaatccacctgcctcagcctcccaaagtgctgggattacaggcgtgagccaccgtgcccagactgtggaaaggtttttaactacaaattctattctttaataggactctttagatctatttcttcttgcatgagctttgttacttttttttctttcaagaatgtgtatattttatctaagttactgaatttattggcataaagtttttaaaaatatttctttatccttttgatatctatcgatctgtagtaatgtcaattctcttatttctgatattgatattttatgtcctttctctttttttccttgatcaatttggctataggtttgcaaattttattttctcagtgaactagcttttcattccattgattttctccagtgtttttcctgtttcattgatttttgctctaatgtatattgcttcgtttttttctgcatactttgggttcctgaaggtttggttttcttaagtggatgctgagatcattccttccccatcccctacttccttctcctttcttcgtttctaatgtcgatgttgggtgacataaatttctttctaagcgacagctcacaaattttgatatgctgtgtttttatgttcattcagttagaaatactttctaattttcctttctgtctaatttgagttagtatttgtgaaagttttgtgtctagatgcattattttgcatgtggacattcaatatttccaacaccatttgctgaaaatactcttctttctctgtttaattgcctttgctcctttgtcaaagactagttgactgtatttgtgtgggtctatttctggactctctgttccattgatctatgtgtctgttctttcaccaattacatgacgtcttaattactatagctttataagtcttaaagtcaggtagtgtcagttctccagctttttactcttcttcagttttgtgttggctattctgggtcttttgcctttgcatataaactttaaattcactttgttgatatttacaaaatagcttgctggaattatgattgggaatgcattgaatctgtagatcaaattgagaagaattggcatcataacagtaatgagttttctaatccgtgaacatggaatatatctccgtttctttagaacttctttaatttcttttattatgttttagttttctgcatttaaatcctgtaaatattttggtagatgtatatgcacctatttcatttctggtactattataaatgccattgtgttttaaatttcaaattccaattgttcattgctggttcgtaggaaagtagttgacttttttgtgttaaccttgtatcatgtaacagtgttacgagagggtttttttggtcaattctttgggattttctacatagacatttatatcatctgcaaatagacagttttgtttcttccttcccagtctgtataccttttacttccttttcttgactttttgcactagctaggacttgcagtatgatgttgaatgtatatagtatagtcataataactatttaattgttcttgtctactaatcctattgtctgtgttatttctgggttagttttgcttggttgattcttttatttattttgggtcatatttttgtgcatctttgaatgtccagttgttttttcgtggaggtcagacgttgtgaattttgcctcgttgggtgctggatatttttgaattcctataaatatttcgagctttgtactgggggtagttacttggagacattttgatccttttgggtcttgctcttaagtttgttagggggaccagagtaggatttagtcttgggcaacatcctctgagtcctctccttccatgaggctgtggattatgaggttttccactctgcctgatggtgtcagggtatcaagaactattcccagctctaggtgagctctggtaattgttctaatttttttttttttttggatgatttttttttcagtcttgggtaatttcctcacatgtaaatgctgataagtactcaccagaagacttgagggcagggtgtgggagggtaatctttccagatctctgaagttttttctcttggcaatgctctcttccccattaccctctctgcgaaccccaatcgtcttggctgccctggacttacagccgtgtgtctcagcaacttagggagactcaggctttacctgggttccctccctgtctcacatcctggaaactctccagactatctgctgggctagtcctagggttcacctcttttgtttaccatctttcattgatcactcttcctcattgtctggtgtccaggtgtttgaaagctgatgtttaatatattttgtctgttcttttagctgtttaaggtaggaaggtaatctaatcactgttactccatcttggctggaagcagaagttgatggcactttttaaaaagtagctacagaatgtcaaaaaggattaaaaatttttttacagtaacaacgaatgtggatgggaggttagaactcaaactttcctttagattctaaccttaaaccgttgtagctccaccttttgataggaacctaaaagacaagttctaccataaaaacctaggtattttagtatcttccatagccgaacatatctattgttttgtcctgaaacagtaccaccagcctgttttagaaagttttttcttggaaaactaggtttctggctttggccccattggtgattttaaaccatttgaactgtgcttttctttttgttttgttgttttattgtttttgagagaggcttactctgtcccccaggctggagagcagtggtgcaatcacagctcactgcagcctcaaccttcccagctcaagcaatcctcctgcctcagcctaccaagtagctgggactacaggcatgaaccatcatgcctggctaattttttaaatcttttgtagagacggggtctcactatgttgccctggctggtcttgaactcctgggctcaaccactccccccacctcaaccttccaaagtgctgggattacaggcataagccaccatgcccggctacactgtgcttttctaaatttttatctcaattattaaaggacaggctcttatgcaggggaatattgtctgaaactaatcaaattattaagtcaggaagacaactaaatttttggatgatgtaaccatatagtactttaaatagaaaaaaattgtactaatagaagttagtagaaaaaatttagataataatagcttttattttattctttttgctgaaagactttgaaaccatggtgtaaaataaaaaatcattaaagctacctttttagatactttttgttaagtcagtttataaagtgaggatgtctatctggaatgtgtgacagatgtaacaagtgaaagttgcaatagtctccatgtaaaataaaatttggactgacagttttagatctttttcaagttttactctaatgctcattattttgtcttctcttcccttctccatctgcataattttaatctttcctttcatggttaagatttggcaacctcgtgtgccttgccaggatcattgttaaaaagctgtagtttttttttttctttctcccgtccaagctgtcccagagcctggtgagccacccttgcccttggtgtggtgtagctactgcgcctcatagcaaaaggccaggttttaaagcatagtgcttcacacgttatcaggaatttattttctgctcagctgcaggatctcttgtttgctttaaaactgtaaagtggagtgggggaaagctatcaacaatcttcaagtgcccaggtcttttagtttctgacagaaacaagagcatttctgcaaaggttggggagtgcgcgcgcgcgcgtgtgtgtgtgtgcgcgcgcgcgtgcatgtttgtagtatttagtaaacattccaaagatttcaaagtctccagggctccacaggatgtctttgttgacttcataactgtggttaggcaaaatgaaatgagagtccaggataggtcaagataaggtaattagcaaattcccttaaatactcaactagagaatttcaatggccagtctttttacagatgattgttcttatttttcctcttttgttttcaattacaattcattaattgaaacgtagtaacgggcctgaagttgtgttctgtactcacctgtgttttgatctttatctgtctagtcctcatattactttctggcaagcttgtgattctggcatataacagttggggcagggtgggggctattgatttgatccctcatctgtgttcctacatttctgttatggttatttgttggccagtctcttcttgctagactgagtgcccttggattgggaagatcgcattgcccggcactaggtctgccccagaaggatgctcaatatcattgtacagaattaaactgaaagtttgtttcctttaaactccatgtcatccaaggtaaacacagtcacatgttgcctcttagggtgatcttgagtattttttctcatctccatcaccaccattatccaacctaaggcttgtaaaagatctttataccatttctttccagattcaagaggctctgctgaagttcttttaatcaatattcgatgacaaatttttatatcaggcaaaggttgttgtagagctctttaagattcaattatgtgaacattagttcttgagcttcatttgaaacaggtttattttgaggtgggatcgattcttgtcattttctatgaagtgatgaacgtcagagccggagctcttgtggcaggtccagcttggaggtgagcaggacacagggttcctaactgacccagatgatccaaggagaactgggagtctgagaacagaaataaagctggagcccagccaggagtggtacgcagggctgcgaatctgacagcaaggccgaaatccaggcccgcaagtggcagagcaatgacagttaattgcttctctgtactgattgcttgtatgtttcttttgctattggatactaataggatgactccgaatatgacaatagagtataactattccgtgaacaacgtataatatggaaagtctgctttatgtgaaatgtttatctgcaaattattgagcaaagggttattatttgttactgcttaaatgattggttttaaactactaaatctggtaagttttttttctaaatagcatttgtgtaatattttggaaaaggcaaaatgatgtaaaaattctatgtgtattttacttagtaccacagaaatctcactggaattaatacctgtcatttggatggagaactcatatggtgaaaagagcctaggctcacagctcaccctcggctggccacattctagccgtgcaaccttaggcaaggtggaccagaaactcaggttctcctacttcatctgtggcatgagggtggcacctctgtgggagggcgctgtgtggcgtggggacactgggcatggggacactgcaccacaaagcttaggccctgacatacagcggctggtgaatcaagggtggctattattgttttggtgctatcattatcttaaataattaaagaaaataagaacatctcacgataaagggaacagattctaagttaaccttttaaaattactaggccactttaacctccgggaatagcactcagataacaatgtcttagtattactggaagatttacagagtcaagagcctgctcttatccctggatactgagataatcacatgaatggagaaaaaagcatgcttctctcaccttttaatagagtgaaacacatcatgttaccggaaacccttttgttctgttttttacagtaagagaaaaagtaattaaacttcaaagtcagatctgtaaatagctacatgaggacctatggtaaaagcagagctacaaggtcttctttttgcttctgaaactgcgggtgatgtaggggctgcccagacccatggcatcccttgaaactcagaaagaagccagtgcttggctgggttctcatgagagtcaagttggagctggaggctatgagaggtaacacttggcctgtccttttgccactggtcgtgtgctgccaagtgggagggctcgtgtggcatcaaaccatgccttatcttaaggctaacatcacatttcctcaacttggccagaggtgctgcagagagagacctgcacagtatttgcagaatttgttcaataattattgttaatcgttgatttcactgaagatcaatgtttgctttttgctcttataaacaaaacaggaatattcataacaatggattctagtaaggctcaagtaccatttgtgttgagtgtctgtatgccgtcatagtattagaagtttcatacacgctaacattcatcttcacaggaacgtcagaaggcaggtggtattaggtcacatagctaataggggacagattaggaattggctactgctcagtttgaatcccaaatcagtgctctctctcttgtgcctctaaagccccaggacccagacagggcagtataggtaacccttagcagactactctcaacagtgtttggcccttgacaaaatgccacaaagttggaacgtgtagccctgagaagggttgttggcagaggctgcagagtggctttcagagtggttggccagctaagacatctgcatcaatgcctcgcaccactgggtgttcagttttccctctgattaaatcttgtctaccctgtgcccatagagtcagcatgtgctgcgagatcacaacgtgggagatcgttccccaatactgagatagagacaccgccccatagacgcagttacacactgccatgtgtaaacagatcaggaaaggagcaggtgcccagcccaaccggagctccagttcacacaaaagttttagaaaacccaagaggtaaaagtttagagaatattgtcttcttcaaacctccctctaacactgtaaagtgataatagacaagaatgtaaaaacttgggggaaaaaaagctaaagctcaattattgacactgttttaatgacctccacagatagatttgagaggtataggagcaaaaatgactttaaaataaataagttgttaaagttttattggtgctgcattcccaacctgaggttttctttgatgaaattcagatgaagtttcacatcttgtgctgtggaatcctatgaaatgcttagagattcaaatggtttgtgttggttaaagcaagctttaggctttgttcttcattatgctaatcagtttttcccccagcttaattgaagtgtaaagtcatttgaacaacactggtcttttctgtacacaagaaggttaagaacctcagacagctcatgctgctgccaagaagtctcccagtcgtattcttcagattaattacctgcagaaacagaagtaagaaaatccattacaggttaaagcaatgattttggcaggatctgaaaagcactaggattatgtcatggggaaaacttcagcaaatctcacaaatgggggctctcctaagcagatctgacatttcagtttttaaccatttgtatttgaaggcaaatattgaggtggtgggggtttttattaaaatattaaaatcaaactttttcctatataaattcagcaatataatttaaatattctgatttgtgcagttttattaaagccactgagaccacagtgatgctaaagtttttgaatgcagggagcaggccagtcttgccttactctgtatgttgttttataatattgatttgaaaatgcaaggttatactacagagaccaactttttcctcctcaatcctgtgctggcagccacaataaatgtgcttgagtcccagcagtgagcgtgtgtgccttctctagaagctgctgtctgcacgaacaacccaaaaatgtcatagaaatgcacagttctaggctgggtgtggtggctcatgcctgtgtaatcccagcactttgagacgctgaggcaggataatcgcttgaggctaggagttcaagaccagcctgtgcaacataatgagaccccatctctataaaaagtttaaaaattacctagatgtggtggtgtgcatctgtacttccaactactcgggaggctgagataggaggattgtttgagcccaggtcaaggctccagtgagctgtaatcgcaccactgcactccagcctgggcaacagagtgagacactattgctaaagaaaaaaaataaatgcatgagtctatgctacagattctttcatgatttaaaaagcaaatattattaattatgcactaatttctaattattcagtgctaatttgcataaccgttgagacagcacataggaattttgttaaacttggatttgttttggtaatttttattggaaacaacaatagtaacaataacttaattacagcttatatttatttatacatgcactatatgcaaaaagtattctaagtactctaaatgtgtcaactcatttaatattataacaaccctatgaaatactcttgttgcacctgttttatacatagaggcagatagagattaagtagtttgtcctaggtcatgtagctagtaagtggcagagctgggatttgaacccaggtagcttgactccatagtccgtgctcttaaagactgaagtctatgcctcttctgccagtgctgtcaacactgacttagctctagaatgtcttctcctaccttagtagaactctccctgccttccgcctgaggccagagaccttcccaggtaggtgtgtgttgacccagcgtcctacacaatggttgttacaccaacctgactctgccttcttttattcacacattagaagatttcactgaactgtttaattactcctcagagggaagacagatataaaataccttcttatcttccccacttctctctcccagtggcatgacattttgaagtgagattttctttccctcctatccaaagtcaaaggagaaatggagaaattccacagaactactgtccattcacaagaagttacatagcacttaaggacagtctctttcccttgagcaataagtacttagttttcattgaaatatttctctgctgagctctcatagtataatagcaaccaatcccaacaagcaaaaataacttgtaaatttgcaaaaccaggccaggcgcagtggctcacacctgtaatcccagcactttgggaggccgaggcgggcggatcacaaggtcaggggttcaagaccaacctggcccacatagcgaaaccccgtctctactgaaaatacaaaaattagccgagcatggtggtgtgtgcctgtagtcccagctactggggaggctgaggcaagagaatcacctgaatctgggaggtggaggttgcagtgagctgagatcataccaccgcactccagcttgggcaacagagtgagactttgtcaaaaaaaaaaaaaaaaaattggcaaaaccaatgagtggaccttatcttacttaaatgctcataaaattactttattttatatgttaacattcaataaaaactgtcatttttgagataattctatgtgttttaacaaagtatggtttaatgtaacaaccaccactaaggatatagaacattccaattaccttcaaaattcccttgtgcagtgtccccaacccagcatttggcaaccactgatccattctccttcattacagttttgtctttggagaatgtcatataaatggaatagtacaggatgtaaccttttgagatgggctttcttcattcagtataatgcctttgagacccatgcaagttgttttgtgtatcagtcattcatcccattttattactgagtatattccattgtatgagtgcaccacagtttatccattcaccagttgaagggcctttgagttgtttccagtttctatcaagtctgaacagagccaccagaaacattggcgtatcggtttttgtatgaatattgttcatttttctagagcaaatacttaagaattgctaggtcatattggaaatatgtgtttataagaaaatggtaaactgttttccagggtggtcgtgtcattttgtgtgcccaccagcagtgggggagagtgtgtttcatttgctccatattctcactgcacttgcttttgtcagcatttttacttttaaccatcctaatagatgtgtaataatatctcattgtagttttaatttgcatttccataatgactaatgatgttgaacatcttttcctgtgcctgcttgttacctgaataacctctttggtggtctatttaagtcttttgcccatttttccccttgcctatttttaaaattggattgttttctcactgttgagtttgtaaagttctttatatttctcattcaatagagagaaacagaaaaaagaggacgtgcacacatccccatcagtactcctaataaacagtatggattctacattgggagcataaagaatggtatatttagttctaggagaggaggagcatgagaaaaggatatttgcaagttgttcttgctttatagttttacttctttaaagagatatgcttaagacatagttttaaaaagacttacacaatattttttttgtaagagcttagcggctctcttggttaatagatatgttattctctctcagaagtgccatagacacacttgaaaattatttctatgtgtgaaacaattatctgttacttagaaaattgacagagcctggctgggcgctgaggctcacgcctgtaatcccagcactttgggaagccgaggtggttggatcacctgaggtcaggagttcaagaccagcctggccaatgtggtgaaaccccatcctactaaaaatacaaaaattagccggcgttggtggcaggtgcctgtaatcccagctactcaggaggctgaggcaggagaattgcttgaacccaggaggcggcggttgcagtgagctgagatcacgccactgcactccagcctgggcaatagagcaagactctgtctcaaaaaaaaaaaaaaaagaaaagaaaaagaaaaaagaaaattgacagagcctgaatttaagggcaagacagaattatttatccaggaagcagaagttacaaggtggcagatttcaatgtcagaggccacttattattatctaaatattccatatgttttcatgtttctgcgtttttgtttaaattgcttgtttcctttgcttggaatgccattcttatttttccagctggtgatttttttttttttttttttgagacagagtcttgctctgtcacccaggctggagtgcagtggcgcaatctcggcttactgcaaccttcacctcccaggttcaagcgattctcctgcctcagcctcccgagtagctgggactacaggtgtgtaccaccatgcccagctaatttttgtatttttagtagagatggggttttgccatgttggccagactggtctcaaactcctgacctcaggtgatccacccaccttggcatcccaaagtgctgagattacaggcatgagccaccacccccagccctggtgaatatttttattcttcaaggccaacccctgcttgatcccatttttccaaatacagctaatattttctttgttcacttatcactttatatgtttatataacttatcaaattattttagaaatttgtaggcaggtgtcttctccactaggcagagagcttcttaaggatagctgtgtgagtgaatcatcttttatccctaacaactaatttaatgcatgcttcaaaagagatactcatttacccatttattcattaatttaccaaatatttattgagttctcactgtatgttaggttgaggggcagagtagtgaaccaacagaaaagattcctgctttatggagcttacattttgttgaccttttcagataaccagattctccttttctaaaacagtggttttaaagctattagttttcctcaaagccctgctttagctgcatcccatgtattttgctatgttgtattttcattatcatttgattattctaatttctcctgatatcttctttgatccaatgattatttagaaatgtattgcttcatttccaaatatttgtagttgatttctaacaatatcattgtggtcagagaacatactcttcccatctttaaatttatttcaatctgtttaatgacccagaatatgatgtgtcctgaaaatgtaccgtatgcactgctattgttagctaccgttttctctacgtatcagttaagtcaacacggtttatagtgttgttcaaatattctatgtctgtactggttttttgtttgtttgttttaagatagaatttcattctgttttcgaggctggagtgcagtggcgtgatcatagttcactgtagacctgatctcctgggctccatgattctcccacctaagcctcccaagtagctaggactacaggcatatgccaccatgcctggctaatttttaaattttttatagagatgagatcttgctataccacccaagcttttatttatttttttattagttgttctatcagttgctgagagagggacattaaaatcttcaggaaaaattatagaattgtctgtttctaactttaattctgtcagttttgcttcatgtattttaaagctctattaggcacatatgattgcagtgtttttctgataattgacccttttttcattatgaaatggccctttttatttctggtaatacattttgacatctattttatctgatattaatattgccatccagcctttttatacttattatttccatggtatatattttttccattcatatactttcaatctatctgtgtctttgtatttaaagtgtatctcttgtagacagcatatagttgggttttgcttttttaaaaaaaaaattattctgccatcctctgccttttaattggtgtgtttaatgaaattattgctttaatgtaacatgtaatagaattattgctatattgggtttgagtttagcattttattttttgttttttacttgtcttttttgtacctctgttactcttttctttccttcttttgaattatttgaatatagaatttcattttaaattttctgttggctttttagctacactcctttgcattattctttagtcatttatgagggatcacaatatacatctgtgacttttccactacagttaatactaaccccttacagttaataataactgcttacatgagatctattgtacaacattgtgactaacatatgtataattaataacatgtatgtatccttgagaaccactaagagagtagattttaagtgttcttaccacaaaaataagtatgtgaggtaatgcatgtgtgtgttagctcaatttagccattccacaatgtatatatatatattttaaaacatgttgtatacaatatatacaatttttgccaattaaaataaatgaaagccacttataattaatgacatatacttcatataaaatactgaaatcttgcaacttgtagatccatatttaccccatcttttatgttatggtacttgtatttattacataaaaatacattataaatcctgtaagacaatattttaatttctgtctttaaaagtttgaaggttcaaggctgggcacagtggctaacacctgtaatcccagcactttgggagggtgaagcaggatcacttgaggccatggattcaagaccagcctgggcaacacagtgagaccctgcctctataaaaaatttaaaaattagccaagcgtggtggggtgcgcctgtagtcccagatcctcagaaggctgaggtgggaggatcacttgagcctagggagtgaaggctgcagtgagctgtgatcacaccactgtactgcagcctgggcaacggagtaagaccctgtcaaaaaaaaaaaaaataataaaacttaaggtttcataataacataaaaggaaaaaggaaaaaaatgagtctttgaactgatgcaggtatttatcatttccagtgctcttcatttttttctgagggtctgagtttgatcttatataatttttctttagcctgaagaactttcattagcatttcttgcagtgcaggtcttttgatgattaattctttctggttttgttactctgaaaatgtctttattttgcttgctttcttggaagatattttgctggatgtaaaattctgaatttagttttttctcacgtggtactttaaagatgtagttccgctctcttctggtctccttagttcatgataagtcagctgttaatcagactgcaggtcttttgtatttaatatgtcatttttctcttgctgcttttggtatttgttctttatctttggttttcaacagtttgactataatgtaccttgaggtgggctgttttgcatttattttgcttagtctttgattagtatctcataattgtgtgtgtgtatttgtgtgtgtgtgtgtgtgtgtgtgtatatatatttatttatttatttatttgtttattttgagacagagtattgctctgttgcccaggctggagtgcagtggtgcaatcttggctcactgcaacttctgcctcctgggttcaagtgatgctcccacctgagcctcccaagtagctgggactatagacgcgcaccaccacacccagctaatttttgaatttttagtagagatggggtttcaccctattggccaggctggtctcgaacacctgaccttaggtgatccgtttgccttggcctcccagagtgatgggattacagacatgagccacggcacctggcctgtaattgtgtatttgtgttcattaaatttgtgctatttcagccatttatttgtttgttttgtttttgcgccactgcgctccagcctgggcgaccctgtcacccggggtcttgctctgtcacccaggctggagtgcagtggtgcaatctcagctcactgcagccttgacctctcgggccccaagaaactgccccacctcagcctcctgagtagctggtactacaggcacataccaccacacctggctaatttttttttttttttggtattttgtagaggcagagttttgtcatgttgcctaggctgatatcaaactcctgcgctcaagcagtctgcctacctcagcctcccaaagtgttctctgtgttctctggttggagcacagtaagtgaagggaagaatgatgtacaatgagattggagaggcgaagaagatcacggagaggtttatagaccctgataaggagttggaaattatgattctgagtaagaaaatatgattaccataattgtaagggtagcttgccaaactcatattgctttatccttcagagtcttgaccgatggatagggtggccttgtgattgtatgacctacctgtcagttaacataattggaacagaagctagaagaccatgcagactgggtttctgcagtgtgtgggaagttgaagtggacgtattctaacatcccttccactgctaaggttctccggtatcgctgaaaacaagttggcctccatgtagaaaagtataatgtcaattaaaaccacagtttataatgaagagtgcaaatgtagagaatgaaaagaccattgtagaatgaagagttgtagttacacacagctaaagatttcatgtgatttctgcttaagagcagtatctgtagtccgtaagtgttactatgttaaaacaatgggcttaaaacagcatgctagatagagtatgtttatagatctgatttccggggaacacttaaagctcacttgatcctttctttggtttagatgacagcgcttctgctgcaagtagcatggaggtgacagaccgcattgcttcactggagcagagagtccagatgcaagaagacgacatccagctgctcaaatcagctctagctgatgtggttcggcggctgaacattactgaggaacagcaggccgtgcttaacaggaaaggacctaccaaaggtgggcgtttgagtgacacaggaacttcagtagaattggtctcgtggcagaatcttgctctagcaaacacattgtgctctttaatattgacagagaatcgaaacttagaataacaataaaacagtcttagcactgtcaacataatcacacgacgtatgatagtattttggggcttgatgttggtgaattgtacagcccagtgatgtacatttgtaggtgatcattaaatgcttgttgagtcaaggaaggaacaatccaaatggaccactgagaacagttcttttttttttgagacagagtctcgctctgtcgcccaggctagagtgcagtggcgcgatctgggctcactgccagctctgcctcctgggttcacgccattctcctgcctcagccccacgagtagctgggactacaggcgcccgccaccacgcccggcttattttttgtatttttagtggagacagagtttcaccgtgttagccaggatggtctcgatctcctgacctcgtgatccgcccgcctcggcctcccaaagtgctgggattacaggcgtgagccactgcgcccggccgagaacagttctttatcaggattctctgggatggagagagcttgcagaaagaaccatgatcctttgggccacttttggaggttgttctacctagcttttttttgaaaactgttatctctttatatgcacttagcttatactgtcattcagttcagcatagcaacactcgatcatatgccacattcaaagctctgagccaagcactgggggtgcagaggtggcgggcctccctctgaggagctcagagtcctatgttatcattagctcttcccctcttctagctgcaaagcaagccactctcatgcaaagcccagtgttccttttgaatctcctctgctgtccacaaggacatcacctgctacagagctctgtccctggtagatttctagcaaatttaagtcatcatttcatgtccctgtggctcttgggaatgagatattaaaaagcaatatttgtattaaataatgttgtcattatcttcttagaagataatggaattagacaattagacaatgttggaaataaaacgcctcctaacaatttctgtccagctagctggcgccctcatgtctacatgaacttgcaaatggctcgtctttagccagaatcactcttcctcgtgactaactgtagaaaagagaattcgtcttggctgtaagatgcctttggctaaaacgttttttgagattacaacatttagatgttcctttaaaaatacctttcattggctgggcacagtggcacacgcctgtaatcccagcactttggaaggctgaggcggtcagatcacctgagcccaggagttcaagacccatctaggcaacatagtgagacctcatccctacaaaaaatttaaaaattagctggatgtggtagcaagtgcccgtggtcccagctactcaggaggctgaggtaggaggattgcttgagcctaggaggccaaggctgcagagagcaccactgcactccagccgggtgacagagcaagaccccatctcaaaacaaaaacaaacaaaaggaatacctttcattgttatttcaatttaacaaattatttcacagttaatgtgtattttccttagagttgggagggaggactgtctaaggttgcgtctttgagtttttttttctcaagtacttggctgcatttccacacatctgtgggaagaaatcaatttctttgtcatcccagatgttatcaccagcttcgtgtgagatggctggctacacctgttgggctgatgtctgcattttgaataatcattttaagtaatcttttttcctcctgagttacaaagtgattcaggtattttaaatagaaaccgcattattttaagtattcttgacctaccagctttccaaaaataaatctgatgactgctgtgtctgaaagggtacatttgaaggagctgttttatataaatcttcagacctctaaaacttccttatttttagaaaactacaggaagaaaataacagggtgtgcccaagagttttgttttcttgattaagaatgatttgaatttcataactgcacagaaaaataaatgttttcatagtcatctgatatttctttataaacattctttttctaactgtaagcaaatcaaagcttagttgccagaaggtcacaccaagaagtaaaaaaaagattcacaagaaagcaggtgaatgggctgcatcccctgagtggagggaccttgggctctctactttctgtgcagctaattagagcacagtggaaacaggggcaggaggggcgtgcccgtgggaggggcatgcccacgggaggggtgtgcccgtgggaggggtgtgcctgcagcagctgccctggctgtgctcatctttgaggcagctgccacgtgggcacttgggaactggtgcccacacctctgtctgtctttagagctggctctctgtggtcatggttggggtggggagtcttttaggcaagatggattttaggcaaatctcctttggttttaagtggccacacaattatcacttcataatattttggcctgccatgctcatatagacttgaagtagcctggacacatgacattcttatttttatttctgagacagattcttgctgtgtcacccaagctggagtgcagtggcgtgatcttggttctctgcaacctccgcctcccgggttcaagcgattctccagcctcagcttcccgagttgctgggactacaggcacacgccaccacacctgctaatttttttgtatttttagtagagacggggtttcaccatgttggccaggccggttttgaactcctgaccttaggtgatccgcctgcctcggcctcccaaagtgctgggattacaggcatgagccaccgcatctgacctgcattcttatttttaaatatcaaatgattttttcccccacagttagttttttaatgcttaggtctcactcagtatgttgaggtttgggtgtacagcttttgctgtctgcccaatgctgggcgtggctgtgccaccaagaagcaggcaggtactcactgggggtcctgctcaaagccagtgcgggaagagcgcgtgtctttctgctgccgtagccgctagctagtttttagactgcagtcaacactcactggcctcagcagtacctgtggagccatagataatcattctgattcctttccacaataatactccacttatttgaagaatgttatcatgacctctaagctttggctgactatcattcttcatatgccttgactagtataacgatgagaactgcaggttcatggaaataattcactgacagctaaggtcaaggcttcctgaaatgggatgagattgtggcccactgtaatgtgctgggcctgtggataggtattctgtagagagggagctgtcacttgttcccctgtccctgcggttggcctgcttgcaccagttacccaggtcttctttcccttgaggatactgctctgggtcttaggatttcctcagtctctgtgagctccccagactctgctttctccttttcctttgatattttttaaaataggaagaaccggctaccatatcacacaccttcactgtggtgaacctcagcccataaagctggcttggttcatgttggatttactcttggatagaatgacttggaatgtttccactttgctgagcttggattaccatgtagtggagaaaagagaatcaaatcgttcacgaagggctgtattaaaattcttgctaatacggaagtgtttcagagttgtggttggagtggggcaatactctggtagcagaatacagtgaacagaccccttagatattgctgttgtgaccgtaaatacagacaaatgatggatgagtaagggaattcattgcagcactgtgcgcaacggagaaaaactggataggaaacaataagggagcagcaagcagtaggggcatggccaggagatgatggtgcctccatatgattaaatgctgtgtggtctttaaaaatgtttgtgttactggtacaagagggaaaatgcttacgcattacattgagtcaaatgcaggctataaaactgtatatactgtatcatttcaactaaatagacaaaatttatgcaaagaagactggaatgaagtactgtatagcaaaagtaattcacgggttttttcctgagtaataggattatgaatttttaaatacttttagttagtttctaaatgttctgtggtgtgtatttcttaataagcagaagaaatttgtgttctaaaaaatcacttctttctttgcattgaatctgaggtcaacagcagggctcatggcaaatgtcaggaggccaggggtttactcacatgtgttttcaagaagacagggagtagtttggagttcaatcaatccattgtatacacacacagctgattttcattttagtgcagggatttttaaaatgtaaaatgtagatgaaaatatagtcattgtgccatgtatctgggattgtctattttgttatgcattaaccagtgagtagctcatatttcccatttgaaattttgcttgtttgttcagactagttaggcagcttcccttttaaagtactttaatatgaaatactttaatatgcctttgcaacttttacaatcagttataccaactagtggatctatgaattagaatatcaaagaattataataattattggcttcattaattaatggatcagagaattactaaatataaccagaaggcttctgttggggaggttaataagcaagtcagtcctgtcattccaagacatcaaaaccctctagcctcagtacatagcctctgcaaccactgtcaaaagccaactacagatttttagctgtgagaagcctgtgctacactggcacttaacactgatattcagaatactactcataggtaccatgtattgattgactaagggctggactttgcagcagacattttggatgtattcactcatttcacccctccacgtttctgtgaggcaactatcattgtgcccattttatagatgagaatgaaacctctgggaggtttagtgatttgcccaggctacacaagggctaaatctgggactggaccccagggcccggctggcatgttctttctgccatctgcattgcctcactgtgcatgcctctagcagtattccataagttagcattattcacattaaaccaaatatttaaaacatgaatataatttgaaaatcttttttcaaggtttaatttgatttgcaaagtgtgccaaatacactagatcatattcagcacatcattgtgtgaaatactatgttacggtctcttcacaagttttattaggtaggtgcaactgacaaattaaaatttttaagctcttggcagtcaatgacattaatgaataattaacttagttctttatcctggttaaccaaaattaaggagcaagtggcttttgctttttctcttgtctactgcaccttctccttacaaattggcaaattacagaaaaaaatcttttctcttttgctcttttagatagaacatactatagtttcttttgtttctctcattagctgccctctccagtttagatagatattctgtagtgatttatagaaaagggtttagtagatgtttgtagtttttcagagattaaaaaagacgtttcaaattttgtattatgaaaatgttctcaaatgtgtacaaaagtagaaagaagagtaccttttacctgccattctcatttatcaatatgtggtcagttttcattatgaccctctcccactacccctcaccccatattggattattttaaagcaaatctaagacgctatatcattttatctgtaaatatgtcagtatgtatttctaagatatagactcttttttaaagtccataatggctgggcatggtggctcatgcctgtaatcccagcactttgggaggctgaggcaggtggatcacttgagcccacgagttagagactggcctgggcaacatggtgaaaccccacctctacaaaaaataccgaaattagccttgtgtgatggcgtgaacctgtagccccagctatgctggtggccaaggcaggaggatcacttgagcccaggaggtcgaggctgcagtgagccgaggtcacacactgcacttcagcctgggcaacagggcaagactctgtctcaaaaaaaaaataaataaataaagcaaaaataaaaataaagtctataataccattattacacttaaaaattaataatttcttaatatcatttaatagcaagtcagcattcagatttccctaattgtccaatgaatgactttttaatagcagttttattgaaatataattcacataccataaaactgacccttttaaaatgtacgattcattgattattagtataagttgtaaaaccatcaccactatctaattttagaaaatttgtatcacccggaaagaaactcctcacccatgagcggtcatttccagttgctccctcctcccagtccctggcaactgctagtctacatcatgtctccatagatttgccaccttggatgttttctggaaatgaattcatacaatatgtggtcttttgccactgtcttctcccacttagcatacttgttttcagggttcacccatgttggatcacacatcattccttttcattgtcaagtaatattccactggatgcaacattttgtttatccatttatcaggcaatgggcatttcagttgttaataaattactttatgaaatcagttcattaatgtctttttccccatttatatttctattatattgaatttttaatgttacaggattcttgcactcctagacccatgcctaagaattcaaatgaaaacgcatggtacaatggacagccccatctacatgtaccttttgataatttcgaaacctttttaaagtgatgcagtaagagacagtgttttaactctgctgcagggtttcaggtttctggacagtagatacaaagtagcatgctctcttgttctgaaccttgctctttttacttagcagtgtggcctacaaggcattcctttgcagtgtctagagctcctcctcattccttttttttttttttttaggcagagtttttgctcttgttgcccaggctggagtacaatggtgcgatctcagctcaccacaacctctgcctcccagattcaagcgattctcctgcctcagcctcccgagtagctgggattacaggcatgcacctccacgcccagctaatttttgtatttttagtagagacgggttttctccatgttggtcaggctggtcgtgaactcccagcctcaggtgattcacccacctcggcctcccaaagtgctaggattacaggcgtgagccaccgcacccagcctcctcattccttttacagctgcacagtgctcccttgctaggagatgccacagtgtattcaaccagtccctgcaacaggctttggttttgcaaattgtgctgcagtgattggccgtatgcgtagggcattttgtatttttgccagtctctttaggacaggtgcctagaagtaggggtgctgggtcagaggatacgtgcacctgtgattttgctggatgatggtgatggtgatgataggaatctcctccagcactcagctaatcatctactttgtcttataacttagcaaaagcaggttgccttttccagttctaaatacagacatcttttaaattttgaaatggataattaggaattctagcttcatagtggttagatatgttaaaagtaaactttggatttcctcatataatcatatatgtaatcatgtttttaagcctaatgggagttttatatatcaaatagtgcacattgcattattgatgtgatgtaagttaaaagcatttcttgatcattagattataacttaatatcaaaaaaatgcattagtagatttggctagctttactagaacttctagatttattcatatcaactgtagttttgaaaatatattatcatggatagtgctttttgaagtctggttattctaattcaaccatttagaatgatgaaaaaaatttatttcaggcttaattatgaatgtgtttggacctgagatttttaataccttagttagattttcagttaccaaactatggagtcatattgcagggaatctaactcaaggtggtttaaatagtatgaaatataacaggaaactgctgagcataaataccgcacctgttactggaaaccagtcttcagcttggttgcccttctcccttcacttccagcgggttggtagggtctgttctcagagaggccaactcattgggaaactcaaatgttgctttacagaacacgcttctcacatgaatgaaagacaacagatttcagagtgggaagataccttaaggaacatttttgagcaaaggctttcctttatgggtaaggaaaattggacccagaggaccttgcctgtggacacctggctaggtggggacacagcagggactggcgccccggcccctgaatcccaggcctgagttccttcccctcctctccactacctcccccactctgccttggtgtaagcacaggaagtaagtggctggttttgggggagaatgtgcctagggttctactccaaatctgtgtacaggatatgcagcccatgggttctcactggctctgattctgcctctggtaccacttgaccatagcattttattctcttcacattatattcacgatacaaaattgcacccattgtccacaacagagcattttattgtcgggatgtagccaggggataatggctaccacttctagggtgtctactatgtgccgggcactgtactagaaacttcgcattgctcattcctagtcctcacagcagccctgcaaggtgggtgggcactctgaccttattttagaaagaatccaaggcgtgtgctgtgtcttccagctcagctgaggatgagtccagtcctgtctgccttgaggacccttgccctccttcacctgggcacctcttacccccagagacaggattccagccatcctgcaatccttccaccggatgcgttccaaacacagcgtttctcaggctcctttcatctgagaaattctccttttggtgctgtgtttgttgtcgtgttttgcctctaggaaaaagttaattttttttttaaaacaaccctttcatgaaccaaaagaatctctcatatcttagtgtcatctggaagctagggatccatttaccttagcacatgacgagcagaaaattgtgtttgaaacttccctgctgctatgtcacttctgcatttttaaagagcacttatctgaaaatgattcattacagctgctcctctttcctgtcatcttcaagatccaggctggcacctgttcagactcaacactaggaggtatttttccttccaccaggttttcttaccgcagcgagctttcttccttgagtggctaataatttttatacatggtaatgtgaaagaaacctggcgtgatggcatgtgcaaaataggtacttagtaagcgtgctggtggtgggggttacgatgctatttaatcagtcagtggttacaaaaacccaaggatgttatcaagacagggatgagcagcaattggatcttgccgaagttgggatctatccaacttctcagtcattccaagagtagtcagtgtgtgtccccctcccccttcccatccctctcctcttcctcctcttcccaccctctatttttctttcatgatctctcatcacaactttaatattctacttgcttctgatgctactctatgatattttaagatataaaatatacactctgggaatgcctcctgcattgcatctgattttcttttcatgggcttttaaaatcctattttctatttcttcttttgagaaaaggacaacaatagattattatgagattgaattttgaaattatcactcaagaaagaatgaacaacttagtagtaactccaaaatggcaacataatgtctgctcttagaagcaaggctttcgttactgaaattaaaccaagttacatttccagtgtatgttcactcccttctgtgtgtaggcctgggagcaggtactagcttcaaggatcctgcagtcagtggagtagacagactattggatttagcgttccaagtgtgatgacggtggccagggcaaggcgctgtgggagcatggaggaggccccactttcttttacattaaagagagaaggaagattggccctcagctttagggactggaaagttccagcaagttaaaaatttggcataatacacagttttgttgttggtaatattttaagagcctaaatggaggcagatttaattctatgatgaacaaaatctgctagcttttttgtttgattggagatggagtatcactctgttgcccaggctggagtgcagtgacaggatctcagctcactgcaacctctgcctcccgggttcaagcaattctcctgcctcagcatccttagtagctgggatgacaggcgcatgtcaccacgcctggctaatttttctgtttttagtagagacgaggtttcaccatgttggccaggctggtctcaaactcctgtcctcaggttatccacctgcctcagcctcccaaagtgctgagattacaggagtgagccaccatgcctggcctctgctagcatttttaaatgaactttttattttaggatagttttagatttctagaaaagttgtaagcacagaaggttcccatagacccagtacccagtttcccctgttattaccgtcttacattagtatggtacatttgtcacaactaatggatcaatattaatacattattattaattaatgaccatgctctattgggatttccttagtttgtcccttaagcccttttggttccaggttcccatgcaggataacacattatctttagttaccctggctcctcagcctcctccaggctgacagtcttccttgtttttgatgatcttgacagttttgaggaatacctgttagagggttcattgactatccttcaccttggcttcgcctgatgtttttctcatggatagactcagcttatgggctttagggaggaaggcacagaggtaaagtgccattctcatcttatcagcacatcccgtccaagggtgcatgctatcaacatggctcatcactgtggttgttgaccttggccatctggctgagggggtgttggtcaggtctctccactggaaagtaacttctcccccaacttcgtcatgtggctgttagaaggaagtcagtatgtgccagctacatttaaggagtggcagattatattttaccttcttgagggtggggtagccacataaattattcagaatacagctgtatggggatttgtccgttctcttcatttatgtatttacccaatcatttatttatatatactgtagcataaacttacagatactcgttgtgtactttgggttataatcgaatactatgttatttgttttgtggctcaaattgttccagctttggcctttgggagctctttcagttaggttttgtgtccgtttgacttgcccccaccaaaatagtgtcttttggttttgttgttgttgtctgagcacttctttactttctggcaccacagaagactccagattcatgtgctccctgccccagccgtacgtgctgctgcttcccctgaaggcatgctttcttctgctgtagaatggccttggaaaccaaggtttgggcattaggtgtcattgctttaggccctgtcagcagacagagctcagaaacatgtgtttatactaacctgtgtgtgtgggtgtctatgtatgtatttatacttacatgtctgcatctgtgttaagggaaacctgagtccacactgatgtctctactctagtggcacatggttcattcccgccatctgcccttgcttatccatcacctccctctccaacagtgagagacctgccgctgccatcctccatccttttatgtaattgttccatcctgatgttcctgtgtagtggtttcagaattgttagcctccacctttgtgggaagcacccttactaactagaatacagtgctgatgcgcagttcctgttatctttagttttacagtctctactcatttccaaaatgacttaggtcagcatcttcctgccccccactaccttcagtgaggttgtcatatgtttgtcatacaatcttcattccatcatggggtttccctgtctcctagatggttttacttgcatacttcaaggttcactcttggtgctgtaagggtctctgggctttgacaaggcatcatgtcacatatgccccatgatggtatcttacagaatagttttatcaccctagaagacttcctgtatgtcacctattcagcccctgccctgcaacctctgacagccacaaatcgattttctgtctttagtttacctttactcaaatgtcatataaatgcaatcatacaacatggagcctctcagacttgctgctttcccttagcaatgtggatttcagatgtggtttgcttcattccttttatcaccaactcatattccattgtatggatgggtcagtttgtttatctgttcacctatcagaggacatcttggtcgcttcccgtttttgacgattgtaaataaagcagctctaaatatttacatgcgggtttgtgtagacataagttttcagatcaattgggtaaatacctagtgtcagtacaattactggatcatatggtgaaactatatttagctttataagaaactgccagactgtcttccacagtggctgtactatttttcattcccaccagcaaggaatgagagttcctgttgatcggcatcccggccatcaattggtattttgtctgtctttttggatttcagccattctaataggtgtatagaagtatcgcattattgttttaatttgcatttccctaatgacaaatgacgttgagcatcttttcatatgcttatttgccatctgtatatgtcttctttggtgaagtgtcttttcagatcttttgcccatttttttaattgggctgtttgttttcttaccattgaatttgaagagttccttttatgttccttatacaagtcttttatcagatacgtgatgtgcaaatattttctcccaatctatgccttgtattttaatcctcttaagttcttttgcaaatttttaaaaatgttaatgaagtccaaactatcaatttttttctttcatggattgtgcttttggtattatatctaaaaactcatcaccaaaccactttcttctagaagttttatagttttgcattttaaatttaggtttatgggctgttttaatttttgtgtagggtgtgaggttagtgtctaggttgcctttgttgaaaagatgatcttggctgggcatggtggctctcacctgtaatcccaacactgggaggccgaggcaggcggatcacctgaggtcaggagttcgagaccagcctggccaacatggcgaaaccccatctctactaaatatacaaaaattagctgggcatggtagccagcacctgtaatcccagctactcaggaggctgaggtaggagaatcgcttgaacccaggagaccgagttggctgagattgtgccactgcactccagcctgagcaacaagagtgaaactctgtctcaaaaaaaaaaaaaaaaaaagaaaagatgatcctttctccaaggaattgccttcatacctttgtcagtgctgctggtgtttcaaaattcatgtccttttcctttctacttagcttatgttctgtaaaacagtggtctccagcctttttggcaccaaggaaattgtggaagatgatttttccacagaagtggggcgggtggtggggatggttttggggctattcaagcatggtacatttattgtgtaccttctttcttattatttattgtgtaccttctttcttactattacattttaatatataatgaaataattatacagctcaccataacgtagaatcagtggcagtcctgagcttgttttcctgcaaccagatagtcccatctagggttgatgggagacagcgacagatcatcaggcattagattctcataaggaatgctcaacctagatccctcgcatgcacagttcacaagagtttgcactcctatgagaatctaatctgatctgacaggaggcagagctcaggtggtaacatgagtgatgggtagcaaccgtaaatagagatgaagagttgctcactcgctcactgctcacctcctcctgctgtgtggcctcatcttcctaacaggcagttgaggacccctgctgtaaaatgttacctttgcaaaggggaactttctgatattattttctgcttgtcttacagcaagaccactgatgcagaccctgcctttaagaaccacggtcaacaatggcactgtgttaccaaagaaacctactggctctctaccatccccctccggggtcaggaaagaaactgctgtgccagcaaccaaaaggtgagccagaagcagggccttaaatgaactctcaaagcagttctctcttagattccaacatgagtattactttttaaaatgacattgtacaatttcttctgtgagttaaagcttataaaagtccaacattttatatggtgccataacaagaactagttaagtttattattattcttgttttagatttacttgtgttgcctttgaaacctcactggctaaaaccacagtgtggtgttttgtatttttacttaaagttctcttttgaaaaaacaaatgttagtataacctgggtaaaaataaatagctgttcccaagtccatactgggaacatggcaaaattcagattgccatagcaaccttagatttttctctatgcaatttggataagctcatactttcaaaatgtacccaacaatggagtctaaatattgatgttatctgtcacaaagagcacagtttgctcttaactttgctattattttgtaattatcatttaaagatttttatattttagggccaggtgcagtggcttacacctataatcccagcactttgggaggccaaggtgggcggatcacttgagctcaggagtgtgagaccagcccaccttaaccatttttaagtgtagagttcagtagtgctggccgggcttggtggctcatgcctgtaattccagcactttgggaggccaaggcgggcagatcatctgtggtcaggagttcgagaccagcctgaccaacaggcgaagccctatctctactaaaaatacaaaaattatctgagcgtggtggcacatgcctgtgatcccagctacttgggaggctgaggcaggagaatcgcttgaacctggaaggccaaggttgcagtgagtcaagattgcaccattgcaccccagcctgggtgacaagagcaaaactccatctcaaaaaaaaaaaaaaaaaaaaaaaaaagagttcagtagtgttaagtatattcacgcatctattgttgtgcaacagatctctagaactttttcatcaggcaaaatagaaactctagacccattaaatagtaactcccctctactctccccactgcccttggcaaccacctctctactttttgttgctatgattctgactacattaggtatttcctaggagtgggatcatctaagtagtgcttgttcttttgtgactggcttactttgtttagcatgatgtcctcgacatgcatccatattgtagcatgtgactgattttaaggctggataatattgcattgtgtgtatatatcatattttgctttttatcttaattttaggttcagggggtatgtgtgcaggtttgttacaagggtatatttgtgatactgaggtttgggcttctgttgatcctgttacccagatagtgaagatagtaccaaataggaagtttttcaacccttacccacctctctcccaccctccttttggagtccccagtgtctcttatccccatctttatcatattttgtctatacattcatccatcagtggctattctgtaccatttatctgcacatctgtccttatggccaataccctaccatcttgattactattgctttttagtatgttttaaaatcaggaaatgggaggcccccaactgtattcttctttttcatgattgttttggctatttagggtcccttgatattccatatgaattttaggatagtttttttctatttctgcaaaaaaatgcctttgggattttgatagagattgcattaaatctgcatatcactttgagtagcatggagattttagcaatattaagtcttccaatccataaacataggatgtctttctctttttttgtattttcttttagcaaagttttgtagttctcagtgtatgagtcttctaactccttggttaaagttattcctaagtattttatcctttttgatgcttcagtaaatagaattaatttcttaacttccttttcagcttggtcattgttattatatagaaatgcatctgatttttgtgtgttggttttgtacctgaaactttgttgaaattatgtattagtcctcacagttttcttctggaatctttagggttttctaaatataagattctgtcatctgtagaccgatagttttactttggatcctttcctatttggatgcctttcatttctttctcttgtctgattgctctgggtaggactttgagtactatgttgaataatagtggcaagagtgggtatcttgccttcttcctaattttagaggaaaagctttcagtcttttaccattgagtattatttgagctgtggccactcaaatatggcgtttattacattgaggtagtttccttctattcctagtttgttgtgtttttttatcatgaaaaggagttgaattttgtcaaatgctttttctgcatcagttgaaatgatcatgtggtttttgtcctttattctgtgaatattgtatcacattgattgatttttatgtgttgaatcattcttgcattccaaatataaatcctaatttgtcatggtatataatccatttaatgtgctgttgttttcagtttactagtattttgttgaggattttttcatcagcattcatcagggatattggtctatagttttcttttcttgtgtctttgtctggttttggtattagaataatgctggcctcatgcaatgatttggaagtgttccctcctcctcaattctttggaagagtttaaggagcattggaatttatccttttttaaatgtttgatagaattctccgctgcagccattgggtcctggacttttctttgttgggaggtttttgattactgcttcagtctccttactagttctaggtctgttcatattttttgcttctttatgattcagtcctggtgggctttgtgtttctaggacttatccatttgctctaggtcacccaatttgctggcatatgcttgttcacagtggtctcttatagtccttctcgtttttgttatatccgttgtaatgtcctttcatttctaattttagttatttaaattttctgtctttctttgttagtctagctaagggtttttcaattttgttgatcttttttaaaaaaaacaattcttggttttgttgatttttttcctattgtttttctattctccacttcatttatctctgctctaatctttattatttccttcgctctgccaacttttggttttatcttcttcttctagttccttgaagtataaagttaggaggctgatgtgagatctgtcttctttttatgaaaactttgatcactatagacttccctcttagtacccctttcactgcctcctgtaaagttttggtatgttgtgttttcatatgtctccggatatttttaaaatttctttgtgatttcttctttgaccattgattgtttaagagtgagttgtttaatttaaagattgactttttattgtagcaaatacatgcatgcctcattttattgtgtctggctttattgtgctttagagataccacattttttttacaaattggtggtggtggcaaccctgtgttgagtaaatctatcagcatcgtttttccaacatgtacccacttcatgtcacattttggtaattcttgcaacattacaacttttttgttatcattatgtctggtatggtgatcagtgatctttggtgttaatactgtaattgttttggggcaccaaaaacagcacccatagaaggtggcaaacttaatccataaatgtggtttgtgtcctgactcctctgcccattgtttccccatctctttccctctccattggcctcccttttccctgagacacaacaatattgaaataaggccatttagtaaccctataatggcctctaagtgttcaagtgaaggaagagtcatacatttttcactttaaatcaaaagctagacatgattcggcttaatgaggaagacatgtcaaaagccaggatagaccatcatgtggtttagatgtttgtctcctccaaatttcatgttgaagtgtgatccccactgttggagatgggcctgggaggaggtgtttggttcatcagggtagatccctcatgaacgtattggtgctgtcttcacaataagtgagttcttgctctgagttcactcaaggtctggttgtttaaaagagcgtggcacctcctccccacttgctccctctcttgccaaaggacgtgcctgctcctgtcttgtcttctgccatgattgaaaactccctgaggccgcaccagaagctgagcaaatgccggtgccatgcttcctggacagcctgcagaactgtgaggcaattaaacctcttttctttataaattacccagccttgggcattcctttatagctgcacaaaacggactcatgcaggcctgttgttccaaacagttagccaagttatagatgcaaagaaaaagttcttgaaggaaattcgaagtgctactccagtgaacacgtgaatgataaaagaaaaaaataaaaagcaacatccttattcctgatagggagaaagtttgagtggtcagaatcaaagatcatacgaggcacaacattcccttaagccaaagcctaatacagagcaaggccttaactctcttcaattttatgaaatctgagagaggtgaggaagctgtagaagaaaagattgaagccagcagaggttggctcatgaggtttaagggaagatgccctctccataacataaaagtgcaaggtaaagcagcaagtgctattgtagaagctgctacaggttatgcagaagacctagctagctaagataactggtgaaagcagctacactaaacaacacattttcaatgtagatgaaacagcgttacattggaggaaggtgccatctagggcttttatatgagaagtcaatacctgacttcaaagcttcaaaggacagactgactcttgttagggcctgatgtggctggtgactttaaattggagctagtgttcatttatcattccaaaaatcctagggcccttaagaatgatgctaaatctctgcctgtgctctataaatggaagaaaacctagatgacagcacatctgttgtagcaatatgatgtactgaatattcttagcccattgttgaggcctactgctcggaagaaaaagcttcctttccaaatattaccattcatttacagtgtacctagtcatccaggagctctgatggagcggaaattaatgtttttatgctggctcacacaacacgcattctgcagcccttggatcaaggagtaatttcaactgtcaagttttattatttaggaaataacattttttttttttgagacagtcttgctctgtcacccaggctggagtgcagtggcgcgattttggctcactgcaacctccgcctcccgggttcaagtgattctcctgcctcagcctcccaagtagctgggattacaggcgcacaccaccatatccagctaatttttttgtatttttagtagagacagggttttgccatgttggctaagatgatctcgatctcttgacctcatgatctgccctcctcggcctctcaaagtgctgggattacaggcgtgagccaccgcacctggcaaggcatttgctgccattgatagtgattcctctaatagatctgggcaatgtcaactgaaaaccttctagaaaggattcaacattttaaaagtctttaagaacatttgtggggccaagcacagtggctcacacctgtaatcccagcactttgggaagtcgaggcaggaggatcacttgaggccaggagtttgagactgcagtgagccatgattgtgctactgcactccagcctggtcaacagagcgagaccctgtctcaaaggaaaaaaaaaaaaaagaacatttatgattcatgggaggaggccaaaatctcaacatgaacagggaagtttggaagaagatgatttcagccctcatggatgactctgaggcaattcaagacttcactggagaaagtcactgcaaatgtggtagaaatagcaagagaactagaattcgaaatgcagcctgaggataggactgagttgctacgatctcctgataaaactttaatgggcgaggaattactgccaaaatagtagtttcttgcgataggatctactccgagagaagatgctgtgaacactgttcacatttcatgacaataaagggtttagagtagcacacaaaccctgatgaagcagtggcagggtcgtgtggctggagcgtggggaacgtggcccgggctgtctggctccaaagcctgtgcgccttccattgtgctcggctgcttcccgcacagatttccaggtcagccctgacatctgctcaggaaaaacgcttgatataatgactgcttgcaaatcatccttcttttatgccccatcctgtctgtgtactatttgtgggagcaggagcagcagtcaggagtgagggtgactctcagcaaagatttctcagattgcaggtctgatgttgttaaggggatgtcggggccaaacaccaagtaaggaaacaagtcctggctatgaacagaggcctgggtcttacacccccacatttcagccacatatgaaagggctcctaggtggcaattactctcagcaattttatcttagggaagaagggagggaggaagggagcaagacaggaaggagtgaacgaacacgtgaaaaattatgcttagtagccatcgtgttatatctaagtgtgtacgtgtgtgtgctagcacttaaatggtaaccctcctcccagaaacattctaaggcctctgtagacttttccttataatttacagaatatccgtttgattactctaataagctattgtcagcatatagctgccaactagaaatacatatttttctagactgagtgtccaagactctgggttttgagtgaaagtgtagtgattcatgtattttggttcgtttctggcatttatgggcttcggtggatgggacttcccttccatttggaagctagaaataagaacagtagcatctaattgctactctgtggtaaagttcctatagatctctcattaggagagaattttgaaaacagaaagaagcaggctgggcattctgaatattaggattaaaataacttccaagtcatttcaaatatgtttacaatcaggtaggaatttttctgtaatcagagttccaaattaaatgagttggggcatctgtggtgtgtggatgggtatatgtttgttttcttttctccgggggtttttcagcctggtgcttaagaacaaaatcccctttggaaatagtccagttcccagcggttgtgctttgtgttgccaattaagacttcgattgagggcttgatttggaatccttgggaaaagctttgtttccattaggcaaaggaaaaaaggcagaaaatccagggaagacattgtaggtcataccttgctcagtggggatgcggaggctgacaatggagtaacatttctactggttcaagaaagagacaatcactgttctctgggctcataagtagagcatgacaataggccaagctatgtgaacagagatcaaaagaacaaaactggtacaaaaagcgttatttaaaaaatgctctgtgacaaatgtgagatagactggtaaatatctcttgcttccaaacaaacagccaatagtcctttggaaaaatagttccacttgttagaagtacagcatttgtaattgcactgaagccagtgctgggtacatagcgtgatttgaagaatagaaagccaaaatctggcttcagttgatttttaagaattatttctaatatatttctctattattccgatccattgaaacgtaggtgataaatccatgtttgagtctgttctcagtagcaaaatagaggtggaagtattgtcctgttgaacaaaggaagacctgcgggacctgtccccttatcagaagtgatatggttctccccactagctcgagtagttgactttgtattgtagaaagaaagacttatgtatatagaattctctaagattctcccagaccactagccttcctgaaaaatgacttggattttgccgaagatcagtttttagacagtgaaagatatgagcatttgttaatttaattactgaagtgcgttatctcagtctgtcagaattatctcctaatttgagggacaaaagccaggtgggtcctggtcccttgtggaccctccagcactcagcatagcgcacagtggatggttgatgcctagtaagtgtctgttgagcagatcactgcttttatccagtgttagtcgccccagctgtcaggacaaatgaaatcatcagaaaatctctggtcacacataagagctgtctgtcagatttctgttttggttgtaaaagtttgggatacttttgcaaaattttggaaaatcaatttttgattcccaatcacatgatgaaagaaaacctaattgtagcttcttatgcttagaattcttattaaccataagaagaaagacatctgtttttcttatggtcaccagtctccctgcagaaattttattatgtctaaagtgttaagtggcacaaattgttgaatgcatatgcaatgtaatataaagaaccatttattttcataacttacaaggttgcaggtttgggtgtgcggacagagagcagaagggaaaacaaaataagtggtgatgtctatgcatttctatacaaaaaatacttgccttaagcactaaaaaatatactgcattattgcacagtctctcacaagccagtacttctaccactttcaaaataaagagcattatttttcactcgccgtccagagagaacatagcttctttgatattccctgctggttatttgaggaggcttcctgcagtgagtgtacggtattgctctctctggctgcccttgttactgcaaatgtcttgtctttaagctttattttctgtccttcactttgagtcctagtaaatcctctttaattcataagagcccttggttctcaaaaggaaatgtcttgttttttattctacgtctgggacaacagtaagatttttttaaaaagtttaacattttaatgcaaatatgggaatgacaaatatcttggaagagttgtgaaggattatatccacgtctatatttgcgaaccaaaatgtctttcgattttgatgtgtgcgtcctgcaatttactgaagcttatcaaaatacttttccacgcttttattaattgcactcacatttattctgctttatttctgtgcctcttatatgtagattaaacagatctgtgagtcttctcaatgcttgcaaactgaatagatcgacaccaaggtgaggggaacttagatttactttgtcaccatagctgttccttccattgtttccatctctgttttaacgtagtagcttcaaggtcttgtccagtgcctaccattcatcaagtcatcaatcatgtaactatattaatcattgacatttattgtttttttagatgctcaactggtcctccaaaacagtatactttggcggttcataaattgcagatggtgttaattaggggcctaatagagagaacacagggttgaagtcaccagccccaccacttgctgtaaccccaaacaagttgcttcacactcctgaattcggttcttcatctgtaaaatgaggataatgatattgctgcaggggatttgtgaggtttgaattaagtaatacagtatatgtaaaagtccagagtatgccttaaacgttaactgtggctgctgctgctgcagttttcatcactggcacccccgtgaactcttccagccaccaggttgagtgttaattattagaaaatcagttagtgtttgctgtaattgatgaacagttgtggtttttcagctctttaagggtgttttatacagttctttaagttgctatgaacttgccatgaactcccacaaggacgccccagaagctgtgctctgggctcttcttgcggctgcaaaatctcccagggccccggcagctggttgggcaaagtgtgcatcagagccttgtactaaagactgggcggagaataatcctgctaagtcaaattagcttggtgtttgtcgtcatgggaacatcttgaacttgaagcacaaaggctcctataatttttagactttaatcccaaatttcagaaatgtaatgctctcttaaaatctgtaatttccttgtccccaaattgagcattctaaaaacacacattttgaccttaaggcacaccctgcagattgcagttgtaagattctggcactgtccactcaggggttccccagttaacaaaaagactatgtggaaagtgtattcagataatcaccctgagagtgatttcaaagccagcataccatgagggtttttaaaaacctgcttggagattactaactgagccactggaagttgcaaaggaaggaagagtgaaagttgagctaaggagggtgtatagacagaggagacagagaggggaaggaaggaagagaggagagagtcactggctaccaagaaggagagtggccagccccaggcaggagctgcctggatgggaggcttgtcatttacttatgaggagggaggacgttgagcttcagtgcaggcgcaggggtcttgctgtgttaagttcctcagctcctgcgtgctccttgttgagatctggtccccgtgcacccttcactgaagctgtgcccactggcgccgcctgagactccccacttcccagggctcaccccctcctctgtgcagcaccagcacatttacctaatcctgcgctagcctttgcgcaccactccttctctcctggtgtcgctgctacctctgactcctgtggtagcttctcagcccacgtctttaaacattagtttccccagggctcttctgtccttggtcacctcctccctcggtgatttcctctgcatccgtggctcagcacccgccagatggatagagtctgtcctgagctgtctcgcgtgttgcaggcttgtattctcacccacccacacctccagctccaagtgtcaagactagagccacccaagtctgtgtgtgttcccagagccctggccctagaacagccccctgcctgcccctcccctcctccttttttgcttacagagcaggtgctgcattaaagcagtttgtgtctcttctggtgacagggtcagtgtgtgatacttccatttatttcatcctttcatttaataaatgtgtaccaaacttttgtatagggctctgcaaagctacgaaaatgataaatgagataagatctcaagaaatgcgtggactaatgatgtagatttttaagtatgtacagagatacctatactagagttatgtgctctgtcttagtgagtttgggttgctgtaacaaagtccatagactgggaagcttataaacagcagaaatatatgtctcaccatcctggaggctgggagtccgagaccaggggggccagcatggtcaggttctgatgagggctgtcttccaggttgcaggcggccatcttctcacatggtggaaaagggtaagagagctctctgggcctcttccataagggcactaattccactcatgagggcttcaccctgctgacctcatcacctcccaaaggccccaccccctaacaccatcacattgagggttagggtttccacacatgaatttggggaatacaaacagtccatagtgtgctctaagaggggaacaatcagcctccactccatacctgggctctggtttacccctcatgcctacgaatcccctgtgtataggggatcccttctcctagagcaggctctttccatctgtgtcataacaacacattcaagccattcatttgatctttcccggaatttcgcagtctttgggaagacttccccaggctgccttcccaggcctctgagcactctagtccctcttgtcctatgaatgaagttggccgcttaacatggacaccacctccaaacaaaggcattgtacacagggtggaacgtttctgtcgttactcgtgacgtcctgttagcatttgtcccacgcctgcctttaggccagatttcttcaacctcagcactatcgacgtctggggccaggtgctactttgtggagtgagccatcccgggccatgcaggatttctagccgcaccccgggtctccacccactacatggcagtagcagtccctccccagctgtggcaacagaaggatgtcgccagacattgccagatgtcttgggggcaccatccccccgggttgcacaccaccatctggaccaaggttgtccaacccatgggcccatgggccttgtgtggctcaggacagctttgaatgtggcccaacacagatttgtcaactttcttaatactctattttctttgcaattttttttttgtttaattcgtcggctatcgttagcattagtatattttatatgtggcccaagacaattcttcttccaatgtggcccagggaaaccaaaagattggacatccctggaaagtgaagcctactcaagggcaggattgcttccctggaagcccctggagtgctctcacacggtactgttgaagtcttaatgcctcagtttctccatgactgtgaactgtgctagtggcctcagttaaaaaggcagagagagagcagagatgttattctatgtgacactctgaaaagctttttgatctccgttgctaggcctgtcttttgaatatccatgtggaagtatgacgttctatgtatatatttgtatgcttagcaataaaataaagtcacgatattaaggagttcactgtcacttccattccacccttagtaacatcaagaggaccagctcttctgaacgagtgtctcctgggggtcgaagggaaagcaatggggattccagaggaaaccggaatcgcacaggctccaccagcagctcttccagtggcaaaaagaacagtgaaaggtaaggacgtcttatctctcagttcctgctgttcagatatgttagtacggcttgtccccagagaggagtcagaagatcccctcatattccaacaagctgggagtactcttggagaagaagaccttctcctcaggtatttataggactaatcaaacagccatttgagggcagctgccaggcacagttcacacaaactaccgtccaggtggaaaaactgtcactcagattcccagcactctcatgtagacataagtagttcctgagaatttcttagtaccaagtacctagaactggggaagccattctgaatttctacctgagcaccttcgatttctagtacactctcctgacctttttaagttcattttaatggactgctttaagtttgtcagcagtattttctgagacacagtggctgaaaagttgtaattttatgatttatcagaggctatgtttcatattgatgctaacaccagaaatgtgaaccatttttctttatggtttcatgaaatacgtggactccaaatttttgagtttttctatgaggttagtttgtaatggattatgataagtatcagtgaaactaatagtaacattttgttcctgaatgctgctttttggcattttagcagcttgttttgtgtctatataatatatttatatctatataatgtactttgtaaagaaaatccagtttctctatgtatttttacctaacattgtactttgttctcactttttaaacattgtactttaattttattctctctgtttagtaaagctgaggaaggaatttcagcttcagaggctaagcatgtgttttttttcccaaatgttcatgtaaggagaaggcttagtcataaagcaatcgactccaacccacaggctataaaacttccaagtttgtaaatccatggtgattcagtcctataaaggaagcttaaactctttttcagttttattcctaaaagatgtctgttgtagaaaacatagagacacttctcacatctataacaggtcaggtccacggtctattaacaatttaaaaaaccattaacatgggttctgtcttcttctcatttagactattagtacttcttatcagaagattatgctaatggggtgataataccttggaaatgaggccaagtggttacagtggcaacagagtgtgaattagtgggaggtgcaacgtagcccaaagcttctttgaattcagggtaagcttggaagttgacctgaaatgtctagatcttggcagttcttagagacttggctcctcctctgcacatctgatttttattaagaatttccaaaaagaatctgcattgtgtaaactccagatccattttatctttaaaatcctatggctttggtaaatgtgctgggtaaatatttccatagaagatatttacaaagagatttttgagaaatgccacagtaggaaattttgatttggaaatgagggactgggaaaatttactaatcatgttcccaaactaattcaggcaactaaacatgtccatttaaaaataaattctttgtcttgttagaacccaggcgtggttgaggcgagcatagcacagagctggctgagtttcatgcatcatgcactgaaggggtttcagagacagttactgtctcctcttaggcaattgctggtcttgacagggacccataggagtaagagctgcagtaactcaaaagaagcagctaagactcggtagaagtgaaggttaagctggtaattcagtggctgcctgaccccttcccgcctttcttcctctgtattcccacgtgcgcagccccatgctcaggctgccttgaccccagcaccaaagcagatctggagtcttgctgagaaatgccaccctcgaggatgggacacagggaaggaaaggagtagggaggtggcccccatgtaatttctgtttttaaacattactgcgttcagtggactcaagatggcatgcctcgtccccatcgctcactcgacatgtccattgttcctgcaggctgtcctgtgatttaaaaaattgcccttgttgggttcctgtaggcagcaagacatggtggaaagggcagaggctctgcagtaaaagaaagatctgggtgtgtatccagttctgccttaatgtctccaagcctcagttttttcctctacaaattagagattttatacctaatgcccttgaatcttataaatgagctaacttgtaggaaattatccagcgtagggcttggcactcagtaaatgatcgtcatccctgtgatagttcttataaagacaggcttgtgtggagcagaggaaagtaatcagtgagattttctacaattcctcactttttattttcctcatttgtaagatgaaagtgttagattttgtcacaatccgcgttgcacttgtgtctaacgtagttgggggaaataaagtattataaatccttgtgaagctcacagttcttaaataaggcatcgggcgggagctggtctgtgggctgcttgcgatcccagcctgcccgctgttccagagccccattctcttccactcaggaaggctagttagggtgcatgtgagtgagagtgctgacgtcatagggatggcttccaccctgtgctgctttgtagaagaagcaaatcattcacacaggcagtgctttaacttgcagccacaacagattattagccataaagctcacagcttctcacacgccatgtgcaaagctgtcgttagcacatatggcacttaggcgcaaattagaaaaaggctccctttacttcagaaaaacagttccatctcagcactatttctcaataataatacttacagcagatagaaaaccattctgtataaattatacaaatcttactattgaacacaaaataatagtgtttgtggagtcctaaatattaaccttttctgagatactttattttaaagtaattacatgttttgctttcataaaactatattctttttctttttccttttttttttttgagatggagtctcgctctgtcaccaggctggagtgcagtggcacaatctcgggtcactgcagcctctgcctcttgggttcaagagattctcctgcctcagcctcccgagaagctgggactacaggtgcgtgccaccatgcccagctaagttttatatttttagtagagacggggtttcaccacattggccaggatggtctcgatctcttgaccttgtgatccgcccacctcggcctcccaaagtgctgggattacaggcgtgagccaccgcacctggccaaaactgtattctttatgatagtttcagtcttcttgctcccatgtctcattttctttacaaatggtcactggatttgagtctttcttgtgatatggaagacctttatcttagaatgtttaattttttcaaatactttgtaacaagccacaaaattttaacagcatttaatctttgcaccaacaaaacctctattaaaaacaaaagcaatatatggtagtattttactttatgtattattgatgataaatgaacgttaataattacatagtgattcatgtcatcatgaaatactacatttaaatagagaattggcaataacatcgtgatggaaggcttgtaaaatgtagccagtgaactaatctgatggagatatttttcaattaaaaaagtattttatacctgatagaaaattggctgcttatttagaagcacggttcatgttagatgttgctagattgataaagcatttcaattatcaaactggttccccttttgtaagtcttaagggaatgagctatgtcagctctataagcaagacactgtttcagctttactgaaagttgttgaaatgagttgattttgttagaataaggatgtttcagtcatgtgctagaaactttgttgtcacatatgtataaatcaggggtgtccctggacttcggcctccctggacttttggcttccccagattaaaagaattgtcttgggccacacacaaaatacacgaacaataatgatagctgatgagctaaaaaaaaaaaaaaaaaaaaaaaaaagaaaattgccaaaaaaatctcatgtttaagaaagtttacaaatttgtgttgggccacattcaaagtcgtcctgggccgcatgtggcctgtgggctgtgggttggacaagtttgatataaactgcccatctttggagtcaacaaacatgaaaaaaaaaaaacccacctcaaaatagtgaagacgttggcatgttaggtgtggtgcccttttgtgttgtgccccctcaaccccgggatcagacagccccgtagtacagctgtcaggtcgagaaccactgggctggacaccttgagcgcctgtcctttctaaagctctagcatttggtgactatttcatctcagggctcttcagggcgcaaagttgtttttcctttacgatagcatcactgctgccgtcggctcaacagtactccttggctggggctctgggcccttcatccaccagctcctcattcccttttgtgccctgacacgcatgcctctccaacacattgcgcacttttccccagcacaacttttttccttttttgaggccatttatttattatacaagtaacttgttttagaaaatctaggccgggcgtggtggcccactcctgtaatcctagcacttcagcaggccgaagcgggtggatcacttgagcccaggaattcaagaccagcctggacaacatggcaagaccccatctctacaaaaaatacaaaaattagctgagcgtgttggcacatacctgtagtcccacctacttgagaggctgatgtgggaggattgctcgagcctgggaggctgagactacagtgagctgcgatcataccactgtactccggactgagcaatgggaatgagacccttcctcaaaaaaaaaaaaaaaaaaatctagatgcactaaaaagaagaaacaacaatcacctgcagtctcaccactcagcgaactcacagccaacagtcattacatttccacgtggacttttatttgcagggtgctgtatgagtgtagtgtataattttgacataaatgccattcttgtgcatattttgtgatcccttcttcatttgctaaatgagcatgtctttgtgtgaataaatgcactcttgcaatgttattttagatgtggttcatcatgtttccagcccgaagtacttcagttggacgtttaagtaccaaacaagtttcactaatccactcagaccaggccaccatctagaacaatgcccagcacacagtaggtgctcaacaagcattagtcgaatgaatctttttgccctgatcactataacaaaagaaggttaaaatgatgggcctttattgccacagccaagtgttaatcccagctctgctgctttgctttgtcattgtgaacaagtgacttaatctctttggggttttcctcagtagcagtaaaagtggtacctgcctcacagggtgcctaagatcccatgcataggagcctcagtgcagagctggtctgcggtcggctcgccacagtggcagctgtgagtgtcatgtctgcatcccagactgttggagttgaggcctgcacacttgtgtccctcccactcccctgcttgcagggctttttttcttggggatgtcttggaattccccagcgcctgtttctgtctttatcccagcctgaaaagcgaggaatcagaaattctgaaaattgttctcaccttgctctttcagtttcactgctgtgctggacttatggagcacctgctgtgtacagaacgtagtccaaggcatggcagggagtgggaaggagcagcacagaaagactcattctcctaacaaatgtcagtggcacaatgcctgcagggctgctttgcttaattcccaaaggactcacaaatgggagaacaagataatccacggaatagaaaaatggtaaagggtctgcacaggcgctcactgagaaggaaataccagtggcccttaactcatgaataggcaatcaagcccagacctaattaaagacatgccgatctaagtaagaagataacatatttagaaaattctttttactttactataaaataaagcacagatgcagaaaaccacacaagcaaattcgtagcttaatgaattgttctaaggcaaacaccttctagcacctaggaggaggaggggttttcccctctcccaagtgacaggtggatgtatctggaactgggggtgggggcagggaaggtgactgtttttgatgaactccagctcatccttcgagacccaactcaggatcccctttttctgggagcctcccctggctctctagtctgagagcagtgcttttcagatggtgtcgtaactgcctgttaactttatctgtgactctgtagctctcctcccttcaccatgctgcacacaccgcttgccctcccttaggctctggaggcccaggccgtgccattcttattctttgtatctctagtactttacacagcacttggtgaacatgagtgctcaataactatttgttgaatggatggaaggatattgtatacgatcaggcatcacttaatgacaggcacattctgagaaatgcattgttaggtgttttctcattgtgtgaacatcatggagtgtgtgtttacagaaaccttcatggtccagcctgatggtctagcctgctgctcctgggctacagacctgtacagcacatgactatagggaatactgcaggcagtggtaacacagtgttaaatattggtgtatctaaacatagaaaagataccataaaaatacagtattataattttgtgggaccacagacatctatgtggtccatcattgacagaaacacccgtgtctagcccatgactgcatttcatttgaaagccacagccattcaagaactatgtaaacagcaccacctatgggtagacaattttaacaccacattttacactggaagatgagacttacgcattttttactgaaaaaaatgtttcactcttcaagccatggggtcatttatgttttaataaatttcaaaatgataagtgctaatattcttcatattgttttagttttgagactgttagctgaggagtctggaaatacaaaggtttttgcagtgaaaggaggaggaagagggaagccatattaattaataacatgttggacgcattgtaacatatcttatttaatcgtgccaataacctgttcctcacagtggttgtattcccatttttagattaaggaggttaagctggtggaggtgaagcccctcacccaagccctagaacacggatccagctggcctcaaaatctgtgctccttccaccatgttaagctgggaagtattggttggaaatgtctatgaagcagtcgcttttgtcccaaataaagtctccagcaacttctaaacattttgaatagatggttcttaaatgaccctatttctaataaaaagctgcttaaggacaatttttgtagagtcattatttccatggtggagtattctgacttccagcaggaactttatttcatcacgtgaagtcatttttaaaagcagtcatgtggctgagcccagtggctcacacctggaatcccagcactttgggaggccaagacaggcagatcatttgaggccaggagtttgacaccagcctggacaacatggcggaaccctgtctctacaaaaaatctaaacattagccgagtttggtggcatatgcctgtagtcccagatacttgggaggctgaggtgagaggatggcttgagccaggaggtggaggttgccgtgagccgagatcacaccactgcacttcagcctgcgcgacagagccagaccctgtctcaaacaaaaagaagtcatgttattccaagagccaaagttgttctggattaataaattgtagggaaatcacatgtttaactttggaatggactcctcctctatcaagccttattaatcactttcaaaagcaagtatctctgctcaaacagcacgtggctcctattagttccactctgatcctagttgcccaggacttcttacacatgtcaccacgtgtcgaagacctgcaagatctggccccagagccccctttcaggaacatggggttaggttagttaatgtagatgaaagagataagagcagatccccgctctgaggcacagtgaatatctgttgagttgcagcctggacacgtcgtccactggactctcctccttataaatgccagtctatggtgcagcaaataggagctttatcagatgagtaaaaaccaaccactcttagaccatccctgtgcccaaagtccacagtgaacacattcagggatttggacttagacatacgtgttcacagctgcctctgcggtgttgaccgcactggtgtctgttggtgtgagcctcccagctcagactgcactgctgtctgttggttgactgcactgctgtctgttggtgtgagtttttccttggggcagatgtctagtgttctcctgccatctccccatacagctgctggtctggtgaagattcaaatgtacctcatcctccgttgagtctccacgactgcttatatcttatatcagctctcgaaccattcagctcaagggagcatacagccgagctctttcagcaaatctccttcttataagcaataagaactgtgctggagttcgtcttggagatattggccacaacttaacaccagaatagccaagcgctgagagtttgttcaccgggggggcaaatcctttctctcctccaggcttagttctgtcatgggcttcaggggcaggtgcaggacatcttgattgactccacactgggcaagggatgaatggagcctcattctgcagctggtgctccttcacccttcctaggacaggactgggcattctcccccgcaccccgccaccgccatggagccacaccccagctgctgaggggatgttaagtcacccacttaattttttccaccgagctcacatcaagaaatggggaatcagagatgaattacgtaacaccttgagaagcgatcatctcccactccaagtgaattcaccgcccaagcatgtttcaaaatagtgctgggtctgaaggacccactctcaatttgagtggctgtgcgttctggagagatgcactttctgcatacagctcccgtcaacagactttgttgagaggccacggtggcttcaatgttctcttctggttatcactgcacatctgtgtgtttgcctttctatcagttgttcagaagatttgtcatcattttgtgggcttatatgccaagatttgcatgcaagagtgaaattacctcctcccaggcttgccttttagaaaaggtggtggtgcattggcaggagtaatgggttctaaacaaataagctgggtttttttcaataaaaactcaactttctaaaataataaaatgtagcagtagtatattttctaaatacagcataccacaaagtgatacattgtttagagcatgatttaaagaaatgtaagcattttagtaccacctgatacctcctctctcaatgaccttagttgttaacattcctgctacctaatctgttaatagaaatctttcattcttcctcttacagttcttcagtgtcgaaggtccacgagcttccctgtatgaagcgttcagattcccttgcggattttctctttgcaggaagaacatagttcataattgcttttttctgtctctagggcaagttctgaatttctcatttctgtgttcatagcttttgcatcattctacttttgtgatcaaagtcatgataaaaaaatagttttcttatcttttgattccatacctggcttccctttgattatgtttctgtaattagatttgcctcgtagtcttttgtcagctttccttctgtcctcacctccttctgcctgtaaatttaatcatatatgtgaaatttggagttaagatttcttctgcttctgcttagcacacagaaaatgacaagaatgtcacttccaccctaaaaatgagaacaattcaggtatctacagtatcatagctattttaaggccaccatggagctgaggacagaaagtagtataatgaactgaagtgttactgaaaagtggcaagcccatctgaggagggacaggccccacggctgcttttgtctctggcagagtggcggggagaaaaggggagccctcttagatgggagtaggaaatcacctggaggtgtagaattgggaaaggctgagtgtggactggcaggagagttcagagtcctcaggggctctgggcacacgagaaccctccccccgctcagacgcactccgcttttccccagacttccgtgagtgtgcatggtggattgggagccggacaggcggctgagagagacccacggaggcagaggcatgccaggaggaaagccgagagacgttctccacgctcagggcctggaactaagtgccaggcagcagctggccacccccgaaggaaggatgaggaaagctgagagagagccctttgaggggtgggtgtgtagtgaggtctggggacctggaggatggagagaaactccatctgcacaccaagccccacaccaggttcttggcagcagctgtgtgtgccccggggagaggcaggattgctgagagccgaccccaccaccacccaccaggcacagatccttggggcctgctgaaggctgaagacggagaaccaagaggaattccacaggagctccaggcctcacaccagggcagccgctgtctattgtccaaggccctgggaatatagccatgaacagaaagatccctgcccctgtggaattgcctcctggtgggagaaacaaaatgaaggcagggggcaaataagtgctatagagaaaaataaagcaggaggggcgggggctgtggcgagcagggcgtgaggagggtttcagtatggagcagcgaacatgaatccgtacgcacggctacagcagtggcctgagagtggctgacttcggggaggatggtccaggagggcccatgagccaacgcctgacacggagcctgctgggccaggttcccagaacagcagggaatatagtgaagggagatgagctctgaagaatacaggggtcaggtgcagattggatagggccttgtaggccaatgtaagacccaggctttcaggttcaaaggctgtgccatggctttttagtagtattttcaatgaccatagtttagagtttaggaaactaagcctatagcttacaaaactacttaaaacacatttgaacagagtaaaacacttttaaagcatcaggaaagtagtaggctctaccaccccaccccatgtgctgcaggaaattatctggaaatcaagaatattaatatagaatattacttactacatcttgggattaaggatagtttttattcctggtgtttttcattgtgtttcaagtcaaaaattgaggaataatattaggaatatatctgctcaagtttttgttttaaatacacacacacacaaaatgcatatgtaatcctagcagcatttaaggcactatggtgccttatgggttcactatggtgaacccagtgcaccccttgactcccgtttatttcctgtgtcgtcttttgtatcttaaagcaggcagaagtcagggaagctaagcagtgcaaagcatgaactttggagtcaaagttgaggtcaaggggtcacccccctccctgagctcccttggtctccctgtccctgtctggaatggagacggtgccatctccccaaaggtggtgtcatgggaggggtgcccctggcagaaagtagtgggtctgcagtggcggccgcctctccttctgcccccagggtcccctcgtggaagtttctcctgtgaggtgcttgctcctagggatgtccagtctgcctgcggctgtctgtccttaaatgcttcctgggtttggtttcccaagtgctgtcatggggtggtctcacctgctcatggtgggtgcccagggtgactgaagtcagcaggggtgtccctacctctcccaagagatggctgagctggagggtaccacaccctggtgttccccgcttctctttctattttatgttcacccacttgtcttccgagaacagccatctgcttaggaggtgagctctaaaaggcctcaccaaaagatcttttgtcaggaatttgctagttttaaataagttctttaaataatctgtcagaagagtgtagggaataaaaacaaccgtttttacacatttagacagggtcattcccttcttgattaatcacattttttcctccccgaaacacttacttgcagtcataaaaagcacaactttggtgataaagtgaggattgcaatctcttgcacctatgagattgtttatgattgtttatgtgtgttcctttttgcagtgaaattggtggtgtttttcttattaacgtgtataacttatgcagcatttgtgtggcagactactgcagccgtggctttggggtctgaagtgaatgagatgaaacacccacagcaccctttaaaaactgtttttcgtttattttcacagcaaacccaaggagcctgtattcagtgcaggtaagtctgatttaatttatgtatgggaacccctcactcactctctcagaactcaagggacagaaaagaagtagccagcttcaggggccagccttggacacacaggagctttggtttgtgcaggcccagatggagctttgtacctggaggttgaatggctcagatagtgacagcgagactgcctttaaacagtcataaagagcaaacccttcacctaccctctccaaaaccaacgtaagacatgccagtaaggaggagagtggaatgccaccacctatgccatgatggaatttctagattaaaaggtgtctgttgccttggttattccttccttactaactggattctgttatcaacatttgcatttctcttaggggaaagtttcttatgcatcaagttatataactgtctaaaagtagcttttctttttctgcctatgatctcctaaactgcaaactaatagttcatgtatatctttccatatatcttttttaacaccttttgtaataaggtagatgctgttgtctagcatcttaaccttatttagaaatgcatttaaaatgcaaaaaatggacaagtatgtaattgatgaaatacattcatttaattttaattgttctagttttttcttaagttcagaattaaaacataaaagtcaaagttgtgtatttatcagcatgtgctttagtgttcatttcattttcaggaagcatgaaattactcactgaaaatgtacttgctgtaagctcgcagggccacattgtgagcgcacttgtcaggatccctgaaccgtgtccagattttaagactggggggcaggtcaggtgttggcctgcgggctagtgagggctccgggctccggggcaggcaggccagccacacttgcagtactccaccgtctctttatctagcccttctgtctctgtctccgaaatcacaagggaaacgccgggtgacacactgcaaaggtaggcagcatttctgaaacctcatagctctctgagcaaagctgttacccaggctacagaaacctttttcatacaggcaaacagatgctctccttgtatgaaaatgtttttgtgttgcaaaccacttcgattcattttaagttaaacgcatccctgagcatttactcggatgggctttaataagtggctgtaatttggatcccaattggtattggctgactgcaggaatttttttttcatctatgtaaaccttaagagagctatagggccacccctggatgtcccactgtttgacttggtatcatgcactgctgctggcctcttcccactagcgcctttgggtttggtggcgtgtgtgctgttatcctaacctgcctggaacaaacactgctttccctggctgcattttgattttagatgtagcctgtctgaatcaccagtacaaaacagtgccaaggctgacttcagtgctttttttgcctagttcagtaagttaaaattctgcagtaagtaagctcagtcctaaggtttcttaatcatcacatacctgtgatagactcatgtggatatttcatagacattggttatatacatccacactctgcattttttatgtgttgtggaaatagcattatattgtctttattcctaacctacattctgcgagctttctggcaggactgattctcttacaaagagagttgctagaatcccttttcatttagctgtcaactccagtctcctgcccctcttttcaagaatgtcaatcgtttgggtgcttttagattctttggttgtggtagccacacagcccctgatgagcttatatttgggtgaggtttaaggaagggaagaagcttcagaagagaacagcatgagcggtggcacagacaggacagggtgtagaggggggcaaagagacacgcctggccccagaggagaatccctgtgggtggctgtggcagatgaggtcctgtgcggtgagagcctggcagggcatttagacctgctggatccagcaaggaagagagcaggtgaagaagtttacatggaggaagggctccgtaaacctggtttgggccttggtgggtttggcagcagtgtgtaaactgacccaggagagccataagacagcctgtggtgatggggccccagtgcacctggggaagttggcaccagtgtgggagacattgtaaggggaggatccatgggacgcagtggctggcacacataggcagggatgatcgcgttcatgactctcactcaacgtcagccttaatacgcagtgtgaagagtgtgtcacgtgcatgcatttaagacctgaagcgcatacacacaataacatgaaactggggtgccctcttgatttttaagtaatactgcatgtggcattgtttgaaaatccttaagaataagacttataaaactaacttgtactataattatttcctaactgttcctcgccaatttcctccctgcggatgctttttctgttgagttgtgtacaggtatccctggttccaactgcccagtttaaataccattaaaaccaggtcctttgatctgcagtgaaatttcagaattcagcgagttctgaatctgaacagaattcaccaggagcggagctcacaagacattttctttgcccttatcatatcctgagaactccagtcagaacaccccaagatgttctttttgaggtctaggagttaccccgtgttgatacgttgttgatatttacttttgtccctatgatttattgaaatattaaaagttattttattatagaaatgttcgttctgaagagttttgcatcctgatttctctctctaatgggtcttttgttcttttgttttccatttctagattttctttgagcattttcctttctgcattgcatcctagcatgcacttctgctgattttgtgttctttacacttgaaagaattgttcagttaaaagatacataaagatatatttttacattgcaatataacaaatccatttaaatattgaaaaatatttgtgaatttggatattgagattgtgtatacattgaactcaaaaactttaagtggatttcttgtgttagttgaattttgggggtggtattttttcccctcctgatgataaaagaaagtaaacagtaaaatctcatggaaaatcattgttggaatcaagttccttcctgccttttacaatttcgtaggtatctcatgtacttaagtaaacagaatatcaaaagcaaacaagatgcaaacttttgtttcaaactgtttatttttatgttacttttttccctaggatatcaattagaatgacagaagggtaaaagtttctcttttatactgaaaggctagagaggataaagcatttgttttcaggtacgctgggcactgaggtatcttactgaaatctttgttctttttgtagaagaaggctatgtaaaaatgtttcttcgtggacgccctgttaccatgtacatgcccaaagatcaagtggattcttacagcttggaagcaaaagtagaacttccaaccaagagactcaagctggaatgggtgtatcctttattcattgattaggtctcacatgaagttatcagtcaatcaatgcttgatgttaactgtagaaattcataaaacttaagtcctcttaagcttttaaaaaacaaaatgttttactgttacttttgaaaacttaatgtaacaaaattgactatatgttagagacctacagagttctaacaaagtaggagcttcataagagcggcttattatcaggagaaccaacttatcattcctgaacgaaatagctgtggttctggctcaaatacatgttcattattttgctgaaaagaaaatatgaagatgttatatgattgtatgagtgatttttttctttgtcaggagaaaatgaatcactagtttctggtccgaattttattctttccaaaagaatgacaatagtagttagaaatatataaagaagtgaacagtgaaaataatcaagaatgggtagaattttagattctaatgagaactgatttttttttaagagatagtctctccctatgttgccccagctgttcttgagctcctggactcaagcaatctgctcgtctcagcttcccaaagtgctgggattataggcatgagccaccatgcccagccaaaagccaattatttttaacaggagctatcatatacttagtcaactcttcagggacagatggaaaactaggcactctctatatttataaggaaacaacagtgacaatgcaagaaaatattgtccttatgattgaggaaatgggagtatccaaaattgaaactaaaccacattggcaaaaaagtttttaaacccaaagaaagaggggtactctgaaaggaggactagcattctccccttaaaccaagtatggacttggccagccttaggagccaaacttcaagtgtgaccttgactgaagggatgatagaaaaatatgaataccaaagtactgaatgaagggagtcaagtgaatgacgtaaatgaaattgacatatcacgtagatatcatcctactttaaaaaaaaaaaaactagctacagggatgcatccctgtagtcccagctgttcaagaggcttagatggaaggatccaggagttcaagtccagcctgggtaacttggcaagtccctgtctcaaaaatacatatattcatatcaatcaaaaaggctccccaaaaatctaggccacaaaaatctgaatcaaccatataactaacgttcttgaaacagaggtgctggtagcttcatggcatgaggtttggaaaagtgagcttccaggggaaaaaacaactgaaagataagaaaatagaaactgtgaaaaaggtgaattaattgttgattatttttccattttcttattactttagaggaatcctgcagagaccacctttcagtctatgcagattttaagggaaaaaaaaaattttttttcaccttcaaatatttgagtacctgtttaatgccaagcctggaacacaaattataagatgttggtttaaatttaagctattgtgacttcatttagaataattactatttgagattatggaatcatattccttagaaattttttaaaattaccacctgtacctaaatttctcccccaaaatactttttttttttccagattcaaatgtcataggcatttacctgcacctgttttggaatctatcttgatacatgaaattgaagtgcttcagctcgtctttaagtcagtagtggtttattaaacggttatatcacatctggaaaacattattcaaaacatttattcagcctacttcctgttcatattttagaagatgtaaagcaatgaaatttgctctaaataaatggcatttttttggccattatttggcatcttgccgggttactttttacatccaagttgaagtgatattttgttctcaaaataaaataattttcaaggtttggaaatataatgcaaaaattttaacagggattcttatcccaaaggatctgaggggcctgatttttttttttttaccttttatgtatgtttgtgtgcatgtgtgtgtgtcatttgtaccctttgtaagtacttttaccatgtttaaaaaaggaattttttagtaaaaatttagctcgtagattacagtaaaaaaattaataattgactcaatagctttctaaaaataaaaccaaatcattgtgaaaatatgtattcacattacatcaatgactgtttcaactttactgcatgccttttgggggtcacatgtatttgtcatggaatatttgcaatttaatgttgtttaaattagtgatgctgatggtaatagttatatggtattttattgcctgtgcctgttgaataaagctgatgttttgtcagctcttaaagggaaaaaaaattttatcttgacatccacaaagctatgggtacaggggtcgagactgccgtaacaacctgtacttgcttccgacgggagagaccgtctacttcatcgcatccgtggtggtgttatacaacgtggaggagcaactgcagaggcattacgctggccacaacgatgacgtgaagtggtaagtcctgaaacaggtcattcctgcgactcagaaggcgaaggtaggaggatcgcttgaggccaggagttccagaccatcctgggcaacagtgaaaccctgtctctaaaataaataaataaataaatgtgattcctgttgcacaggtggaaatagcattagcagaacacggtcagtattgggacataactaaagagaaggaagagggtctgaggaaatgaggtctttgggagagctcttctgtgtggtctccttgtggtccgctcactactgcgctccgtgagacccctctcatgtttaattttccagcctcaccaacgcatgagcttcacggaccacattgtctcaacaaacagcgccacctctttggaggccttcttaacacatcatgtattaaaggcttctaatttgggtctttattttttgataaacataaaaatgtgttgcctcatgtttgtggctgagtcggctcttcccataattcatttatagcttttggtaggcatattacatatcttggaaggatggatgcgtgaagagatggatttatatatttgtatttgtcctggttccttggtcaatgataaaaatcctgttcacgaaagatggtatctttcctatttatgtactcaacatgactttttaataaagattgtagactaatgtagtggttctgagattgaaatggtattttcccagcagaggatgctttttccttcagtttgaaaattcttaagaagaaataagggaattaagatgaaatgaattaggtactagttgtctaacgtcgtggtgctcagagaatttgtcatgagtctgtaagaagttaggcattatatatttcttatatttaaatttttgactagattatatttgagcaagggaaaagtaaaacttacctgcaacatgtagatgttttgtaaatatccttttcttagcctagcagttcatcctgatcggatcacgatagcaacaggacaagttgcgggcacatcgaaggatggaaaagtgagttacgttaccttttcattgtttcataatgaactggtaacacaaagtaatttttagaaaacattgtgctgctgagtaaggctgcttagatataattatggtatctgaaaacttctgaacccctcactagaattttttattgtaaattagaagacttattgtgtggcagggtgcggtggctcacgcctgtaatcccagcactttgggatgccaaggcaggctggatctcttgaggtcagaagtttgagaccagcctagccaacatagtgaaacccgtctctaccaaaaatacaaaaattagccaggcgtggtgtcacatgaccgtagtcccagctactctggaggctgaagcaggagaatcacttgaacccgggaggcggaggttgcagtgagccaagatcatgccactgcactccatcctgggtgacagagagagactaagtctcaaaaaaaaaaaaaaaaaatactgactgtgaccttaaaaatccctggagctcatcttaatttcatcagatttttaaatagcattgttctgaacaaagaattcgctaattcttaaaatgtttatttatatgataagtattaaaaatatgaaggtaaacatttaataaagttaaaattataataataatttgaatgtacaacattttgccaaatttcagccaccctctgccctgtcctgtgaatgtcgtttaacagtcgtgactttaacccgtgaagtttgtgtctgtgtgcagtcacaaaagctactaggaggtttttagcacagattttgcaagcacttcagcaagactttaatttgcattttaaggcgttagagagggagcttgtagcttttttgatatctacttttatatagcttgttattgcataatattttatctgaaactaatttaagtacatacattttatcaacatgttttcatccagaaaaaatgaatactaccatatttcagaaaatattttagtaacattggattttaaatattaatcttatgctattttccattaatttttttttttttcttgagacagggtctcactctgtcacccaggctggaatgcagtggcacaatcacgggtcattgccacctctgcccccacaggctcaagtgatcctcccacctcagcctcctgagtagctgggagtacaggcacacgccacctcgcccggttaatttttgtatttttggtagagacagcgtttcaccacatcgcccaggctggtctcaaacttctgggctcaagcgatctgcccacctcagcctcccaaagtactgggattactggcgtgaaccactgcgcctgacctgcattaatattttatacttgaaaagagttaacagaaataatggaaatcagaccactattatgtaaataaatttacttaaattgaatgggtctttcaatttttttttttttaatgttaaatggctttgaaaaattctttgaaattagtggtaagctatttgttcctccctctagtggcttaaaagtatatttcagtttctggcattgaaattgaatcggtactttagaactagagaaaaatattatagttatctttcagtttacccatagagaaatccagagaggcctagtgaatgcccgcggacacccagctgcttagagattagactgaactagaacttggttcacctaacgcctgcctagtgtttctactaggtccaaggccagcaccttttcttactgataaatctactgattgctctatgatgttttcttctattaaggaagagaaaaattagcgtaaataacctaggaacacagttgagaggattttaaaccaattataacaattctaaatcttatttgtacataattgatgcctgttttgcccaagaatattaagctcttttttttttttttttttttttttgagacagagttttgctcttgttgcccaggctggagtgcagtagtgcaatcttggctcactgcaacctccacctcccgggttcaagcgatttcctgcctcagcctcccaagtagctgggattacaggcatgcactaccacgcccggctaattttttgtattttgtagagacagggtttcaccatgttggtcaggctggtctcgaactcctgacctcaggcgatccacctgcctcagcctcccaaagtgctgggattacaggcgtgagccaccacacctggtctgttaagctcttaatattatttggtggtgaccatcttatgaatttaggcatggtgacaccttagcaacaaaacagactttaaaagaataacccatatgtgagattccattttacttgtcatttttcatttctaaaattcagacacatttagatgcacaaattaaagtgtcagttcccatggtactattgtcaaaaattggccattcaaattctaaaacttggtagacctctccttactgttaaattatcaacaaggccctccacctcctgaagtcatcgggaatgttttatttacataaaaaggcagactcctgaaatgcagaaaaagatcttttgttttgacaaagtccgagttactgcccaagtaatcttgtagcttcaaggtaaagacacatgtgtatcaccatcacaattgatggctctgtgtttcttttctgaacagcaattgcccccacatgtgcgcatctgggattctgtgacattgaatactctccacgtcattggaataggtttttttgaccgagcagtcacctgtattgcattctcaaaatctgtaagtatgtgccctgtggatattgctgtcttcttccacaggaagtagagaatcaactcagggttgaagagggggagttgacacactcgatacctgcctgggtgtatgtacagatttggactctgaaacattcctgcttcccagaacccctcagtcagaggtcatatgcatgtctcatcagggacacacacttccttccaatcagacatctccagccacatgggtttggtgatgaaaacaggcccccagagatatcgtcctcactttccttaaggcagtttatgtgctctggccttgaatttcacctgcttctttcaagggtggctccagcgtgtctgtctctgccatcctgctactggaaaggggtcccgatccagaccccaagggagagttcttggatctcttgtaagaattcaaggcaagtccatagagtaaagtgaaagcaagtttattaggaaagtaaaacactaaaagaatgtctactctatagagcagccctgaggtctgctggttgcccatttttatgactatttcttgatgatatgctaaacaaggggtggattattcatgcctcccctttttagaccatatagggtaacttcctgatgctgccatggcatttgtaaactgtcatggtgctggtgggagtgtagcagtgaggacaaccagaggtcactcttgtcgccatcttggttttggcgggatttagccggcttctttactgcaagcggttatatcagcaaggtttttatgacctgtaccttgtgccaacctccatctcattctgtgacctagaatgcctaaccacctgggaatgcagcccagtaggtctcagcctcattttccccagcccctattcaagttgctctggttcaaatgcctctgacatttctcccctcccttttataagagaatccttaatcctaagggttgtaaagggacaaagatccatcttctgtaacttcttcgggctgaatagggatgatgatattcctgcctaactattagggtctcttgtatttggggtagagaagagctcagtcagaagacgtcagtatggcaaggtgatatctggaagattattaagtgttcaacttaagaaaacattgagtaagcttatcctgcattcctacacaaagagtgcaacagcaatatattccacaacagtaaaacaaaataaacaaaattatcccaagtaaactaagtaagaaggctttttattaactgggcaactattggaaccaagctgatatggggtcgctagctgattccagtgtgtccagaattggaatactgatccagatatttacattacccattgcttttatttcttctgagccgcagtcagagatcactggttggttcacaggaataagcagggttagtttaaatagcagaaaaaacttaaaaacgactgatgaaactagaatctaatgacaaatgtaccatagttcttgaaacataatttctgtctccagtctcccatttttactaaagacaaaccataacaggactgattagtttggaaaaataagccttagtcttgtatacttggcttgattatttgtataaagtgcagcaagaataattatttttcacataggctttttaaattggctttgatggaactctgttccataaggaatctcagataagaccttttttaaagccaagcccagccataggtttatattctcaaatacctatgggttgggtaaattcctctcctcttggggggtcccaagataacttggggctcctgggcctgtgagaaagtgacattctttacttaccacagatcaggaaccctgtacagggactgtggagacaaggtacaaggccagtttcccccaaggggcttctattgactctacaattcaatttgattccttaaaggaaagcatgccattcctgtgaaaaaaataaccagtttctccagttgtgtcctgttacaaacaaaaacaaattctttacaattatgcaattaactatattgccataaattaagaatactcacaaatagtttctaaattctggagagatcaggttgagagaaacaaatatgcttcaaattttgttcatagcagtatactttacttaattgttaaaagctctaaatagctcaaaagaaaagttttcttgtctttgaaaaaagcaaaggatcagcaacattttaagcaaagtcaaaaaagatgatttcaatcttctattagtttggttcatgcagttaactcctgttctgcttgatattcaggaacatttcagctccccatgagagtcctgaaagttttttcctctattctcatgttacaactttgaaagtaatcagaaacttgcattcaagagcacctgttaaaggcctatatctgattataagccaccttttaaataggaccaaaacaagacaagaattgtctgtggatgacagaaagtcttaggacagccacaattaaagccacaattgacaaggaaatttggttactcctggagcatacaataatttaacataacaagtacaactattaataacatacactaagtcatatcagaattataggagtttcacctaattttggaacacatgccagtaacatatttatacaaatacagcccaaagaaagccaatttcctatttgacaatgcttcctgtatgacttttataccaaataagccaaatttcacctttacattagtgtactattgatgttaaatattcttaacaaaatctcatagataaatctattcattttttttttttttttgagacagagtctcactctgtcacccaggctagagggcagtggcatgatttcagctcactgcaacctccacctcccgggttcaagcaattctcccacctcacctccctagaagctaggattacaggtgcacaccaccatgcccagccatttttttgtatttttagtagagacgggtttcactgtgttggccatgctgatctcgaactcctgacctcaagtgatccacccgcctcggcctcccaaagtgctggggttacaggtgtgagccatcgtgcctggccaatgtattcaattttaatcactgtgaccataaggtaagatttttataaaccttttattaatcctttacaatttgtgttgaaaagcagatcattgctcagagaaaaacctgttgtgcttttattccaatgtttaatttacagaaaaactgattaatacccctttaactttagccaatatgttcacacagaatttctttacaagattaatttctctcaaactttcgacaacttgcttaaactttgagctttattctatctaatttaaaacaataatttaaccttttaatctaggcaaaaaaaaatccacatttccatgccttcttataatctattaccaaaagacatttcactttctttatacaccttacatataaaacagtttttatttcccaaaaattacttaattcatgtgaactgaaaggcattacactttttacttttcttacaaaatatttgatttaagcttattattattattacaccaattaatcaaagctctttcatatataaacatcacacacataatacatgtaaatacacagacagaaaataaaggactcattccctaagccaggaattgaaccctgatcccaggctgccactgtgatggcagagaccaagataaagtactgccacgtgttacaaggtcaagctcccaagcacacgaaacaagataagagagaaactttatccagttttttttcaggaacctgccacaaaatttataactgaccagtttgctgtgctactttgaacagtgggcttatagggtcctaggcccacattctatcctatggtacccctctttatgacagaatgatatagaagacaaatttataacacaaagcacaacagattttctacagcttaagattaccctcacaaatccttttttcccattaatcaaaactttacaggagataaatagtgatttttaccattcattcagccagtttgcagagagagagagagagaaaggccagaagtctgactggtaagaaattcttaccattttgctggcatgccaggcttctgggttccctttccctgaggcggccctagtgatccagctggctgcaccacagccctaggggccaagccacatcataaaggaaaattatctttttctgtcctggccagagcaaaatatgtgtgacaaaacatagatattagccattcagctcagcacccagcacccaaaatcaaactggcagggctcagacatgcccctggtcggccccatcgttgttaatccagcctccaaccaggagcttcaacttacggtctctgggcaagatggtggccctgagtaatagaaaacataagaaagggaaaaaggagagagagaaaagcattccctgtggcagggcggggaaggtgaagagctcagggaggccagagaaagacctgcccactgcagtgacactgaaaagttcaggtggctgcctgttgataacgaagggatctttcccagcagtcccgtcagctcttaaatttccccttttggggaggaaaaagttccccatgtcccatgatcttgtacatgcctaattctgtcacccttagccatcagcaaagagtgcaaggcagataaacccaaagatgataatagcagttaacgtcccatagtgccaagcctgttcttagctgaaaaggactttactgagagggacctctaaccccctaaatcttaggaaggactctaaccttcctaagttgggcctggaacccaaggtctgtctagcgtccttgccttttattaagaggggcctttaacccactctgtcttaggagagactcctaagttaggcctctaacccaatcccatcctttgcccaggtgtgtgccccccccttacccaaaatcagccattcggtgtgtacagatgatttttctttgcatcaggggtctccagtatcatccctttggggttcaccagaaagatgttaccagaccccaccacttactaaagttagcctttggattggaggtttcctcagtattgtcccttctgtggtctccagaaagatgtcactggaccccaccacttacccaaagtcagcgtttgggttgggggtttcctcagtgtcatcgcttcatggtcaccagaaagatgtgatcataaaggggtcccaatccagaccccaaaagagggttcttggatctcacgcaagaaagaattctaggcgattccataaagtgaaagcaagttttttaggaaagtaaaggaatagaagaatggctactccatagacagagcagccccgagggctgctggttgcctatttccatggttatttcttgatgatatactaagtgagggatggattattgatgcctcccctttttagagcatatagggtaacttcctgacgttgccatgacatgtataaactgtcatggtgctggtgggagtgtagcagtgaggacaaccagaggtcactcttgttgccatcttggttttggtgggatttagccagcttctttactgcaagctgttttatcagcaagatctttataacctgtgtcttgtgccaacctcctatctcattctgtgacctagaatgcctaaccatctgggaatgcagcccagtaggtctcagccttattttacccatcccccattcaagatggagttgctctgattcaaatgcctctgacaatcccaacgtggctggcgggcagcctggctgcaagcaggggtcggacagggccttgtcatcttccaggcttcctcaggacgtgctggttcagcagacccaccctacactctttcaaaccatttcaaccacttcagaaacccatattcacacacatgtgcacgtgttcacatgaaaagacccccttgcactcaggcccccagagccgaggcattgtgcagccccacagcagccaccttcacagctgctaacagcccctgtgccatgcctgctgcaggcactgtctgctctaggaggggctcttgttttcatggaacccagtggtgaagagacaccccactggcccttctcttccccaattcctgtttcttcattccccatcatttacctgctctttctgtctggtcaagaaagcatgtctcagccaggcccagtggctcagccaggcacagtggctcacaccttctaaccagcactttaggagtctgaagtaggaggattgcttgagcccaggagtttgtgaccagcctgggcaacatagggagatcccatctctacaaataataataataaagagtagctgggagtggtggtacacacccgcggtcccagctacatgggaggctggggtaggaggattgcttgagcctgggaggtcaagggtgcagagagcaatgattgcaccactgcactgtgacctggatgacagagcaaaaccctgtctccagaaaaagaaagaaagaaagaaagcaggtctcaaaagcaatggatgagtattctttaactacaatgtagcagactctttattaaaaatgaaatttgatgtttatttttaatcatgttcaacccactttattctcagatatagtcttcctgtgaataactttcttttcagaatggaggaaccaatctctgtgctgtggatgactccaacgaccatgtgctctctgtatgggactggcagaaagaagaaaaactagcagatgtgaaggtcatgctccaagccttttttgggctgcattaacattttcccattcagagccgccctggcatagtggtagccccctttcagcgggctcattcccaccccagcccttgtgtatgacgccttcaccttagaatcgtttggccccgatccctgtcccatcatgggactttgaccccaggtcctgttagggttttttctcttttcgccatgtctgtaagattgttttcttcctcatttcatagccactacccttttaattcatccagtcatgtatttgctggctgttcctttcatttgcttggcacaccccgagtgcctgccacgtgctcgcacggcacgtggaggcccggaaatgtgctcaggcgtgaggtgggcttgctgcctgagcccctgcagccgcaggaagggcaggtatgggcaggggccgccagcacgggggctcctccaaagtggcacagactcaggaaagaccagcgggagccccgagctaaaccccaaatccttcccaacaggattcctcctgcgaggggccccttgggacttctttgaccgcctctaatccgttttgcacaatatgtcaaattcccttgccttgactgacctttttctatttctattttctattggaagcctatttttatagactcgaattcagatttctcatctttgcatctattaaccttagataaccttagtcacctaactttctctgctgcatgtctgcgaggcagaccttgtattctaaccaggtctgttccctgacacctgtgttcattccctagccccaccttctgatattctgggcaggtgtttaagttcttcttgctacgttgctaggttagaaggcatcagaggcaggttattatccaggctcaagaatgtgtaactgcattattaaatagaagcagtgatcagagcccaatccagtaggccagggtgcgggtcttggaggttagggtgtgggctgaaggtggcggaggtggcacctgaagtgctagatctactccatgggaccccaggccggttcactgagccacaggcagagtcccaggagtcaatcgcaggaggaactccctggggaaacgggcagccagagtcagccacgaacaatggacctttgtaaaatccattccagggccctccctggagatgacatttaccagatagggggtgaggcctagagatctgcattttaccatttctggtgattccatttgttcggccagactgggaacccatgactagcagatgagagcaaatgcttgcagttctgaagtccctctggtcccaactccctcctcagcaaagcatgctgcatgcccaccccatgcctggccctgggagaggccctggcatagacagaggactcctgggtgctccctgtcctcaagggctcattgtccagtgggggagacagacaaggaggaggtattaaggcccacaccagcatatgcttgatgtttttagcaagatggattcaatgggggaaataataggcattgtgcttgccttgaatttcttatttatttgtggctcacattttacttgttttcctacatgtctcttacgcgtcttaagagatgtgaggcatccgagtccctgtttttcctatagtgctctaatgaagctgtgtttgctgcggatttccaccccacggacaccaacatcatagttacttgtggaaaatcacatctctacttttggacactagaaggaagctcccttaataagaagcaaggattattcgaggtaaagttaaattatgatttttgctttatttttctctcgtatatgtgattggctagatgcatctctctgggggctctggtgatcaacacaatcccttgggatccctcacatagttgggaagcgtgtcacacctggtagataacgctggtaatgaagtgaagaaaaggacagagcaagcctgggtggagggcagggaaaggacctggacccagggagcaccaagcctcccacagtggcactggctgcagagagtatcagaagatgaagtcatcgggaggcaggcaacctgcctttgcaaaagacattagagactccctgtgccttttgtctggacgttgtggggctgcgagagcaccaggggacagcaccttttcccgggggtccatctgccaccacctccctgaggcttgtttcgaggacccctttattctggtgctcggaccctgccctttaggctgacagcatagccccacccttctccccggtcagtaccctcctccgcttgctgtctgcagctttatgattccccagccacttggggttgctagaaatcgctttgtcttagagcagttaatctcacagcagaagttatgtaatagtagacagaaatgcaaggtgtgcagggtggtcacagaagctgacactatccagcttgggaccactgcgaatctagatgttattagtacaaatgaaaggttgtctggaatatatatatgttgtatggattaaatatatatataatttttttactacattctacagaaacaagaaaagccaaagtttgtcctctgtgtgactttctctgaaaacggtgacaccattactggagattcaagtggcaacatcttagtatggggaaaaggtaataagtgattgttcccaaaaccaatggtttttggtaatgttgtaagagatcaaacatgagtgctttaagaattgtctattaatacaacgtacaggagtaggatgaaatttcaagttacagagacacacacatacatgtgtgcatgtgtaacttgaaaccacaaaactagaacagaggaaaagcggagaatagtaagagttactgaccttacagcattctgaaaggctctttaagcccaagctattatgatggaattaaatagctttattaggaaatcccctgacagattatgatgaaattaatgactacttataggtctgtaaaatatttaagttactatcctgatttatctagcatgtggcagacatttattgaaagctaattatgtgctagacactgtgaacatacaactgagtcagacccaaatcccctgctgtctgtgagcaaacagtttgctaagggagatgatgcatcactcagaaagcatgcgtccagttaagtccagtgagcatttatgagcacttaccccgtgacaagaaaaaagggaaaatccaccatcccttttctcaaggatcttagagtttgaattggggctgaaggtggagacggacttgtaaatgcaatttcagaagcattggtgacatttccagtatccctgctgctcttggctctaggtgtcttattcactgctcacttaatccttagaacaatcctgcagggtaagcagcagccccattccaccaagggggaactgagggtagagtaactaagcaatttgtccagagaaacagctcactagagagctgggatctaaactcagagcccacgttctcagccgcgtggtgcttcaaccatgcggcttcaacaatgcatattttccttcattctaaggtaacccatttcatgcttgtctggtgctctgcgaacgtctagaaattggatccttcatagattcatattgcaatgatgtgctcacggacaatattgcgttttaaaacctaagtcagatgagattagaaaatgggcagaggcaaccttttgacaatgtgctaatgatggttttcttggtgtgtttaggtacaaatcgaataagctatgcagttcagggggcccatgagggtggcatttttgcactttgtatgttaagagatggcacactggtgtcgggaggtgggaaagaccgaaagctcatttcttggagcggaaactatcaaaaacttcgtaaaacggaggtaagtcatcaaggctactgctaaaatttgtttttaaccttaaactgttatcctttttttattagtttgaaatctgtatcttacagttttgaaaattgtttaggtgaaatcacattatatgggagcaatgtattttattaaaatcctgaggcaggttaaatataactaataaaatagaattaggtttataaaacttgaggttgtaacacacttcatatttagaatatttttattctcaattttccaagggactgttacccacattttgatttattataaaaatctgtcttctcttttaactttttctttttctttttttctttctttctttttttttttagagcagggtctggctctcacccaggctggagtgcagtggtgtgatcacagtttactgcaacctccccctcctgggctcaagtgatcctcccacctcagcctcccaagtagctgcgactttagacacacaccaccacacctggctaatttttgtaattttgtagagatgttgcccaggctggtttggaactcctgagctcaagcgatcctcccacctcagcctcccaaagtgctggattacaagcatgagccaccacgcccagcctcttttaatttttaatttctagcatgttattttggagacattattgcattgagtgaactagtatttgttgagtatctacttcgtacatggccctcagctaagtgccaatgtgctccctagggctgtgactccttttgatacccggtgtacctccccattatctacttggcagccctgcattccggtaggcaccagaggcaagatatttaatattccttctgcccactcagtgaattttctcccccaggttccaggaaatcgtgagcagacactgcaaaattggcctcattctgaagggtgatgcttttcatccctagcttagaatggacagactttaggactttgaacccagatacacacaaaacacttatattttacatcagagagcaacatggcaccaccctctggcagtgtgaaaatttggttctgttgattatttcccttaataaaggaagatcttcatctgagctttggaaatcacttccccttgcctggagattctgttgtgagaacatttttaataataagatttgaccagcatttggttgaacatattgtgaattgctagagtcatagacatgcccaagtcatattataactgtaaagaaagctccaaagccccatctaatttcataaaagctattcactgtttgttagtatctgattcttcctcattagcatgggtcatcatcaacttgactcaaatctgtgctaacatgccacactggagaatgtgtgaggggaggctgcttctttcctggaacgggagagcctaacagcaaccgccagggtcaagctgcagcatttgttctttttatagtacaagaactttgtttcttcatcatagcaaattgttcttaatgggtgtattttgcaattctttctcttaacatttagattattccatatgtttatgtcgatttttaaactgaacagaatgacattgccaaagaacttaccattttaagttgtattatggcagtgttattattattattattattaattattattattttcagacagggtctggctctgtcacccaggctggagtgcagtggcgtgatcttcagcctctgcctcccaggctcaagtaattctcccacctcagcctcttgagtagctttccagctactacacgcaccaccatacccagctaattttttttgtatttttggtagaaatggagtcttgctatattgcccaggctggtctagaactcctgggctcaagcaatccacctacctcggccccccaaagtgctgggattacagatgtgagctaccacacctggcctatattctttactttctgaattgtatctactgttgctatcagaaattgtaaaaagtaaagagaaaactaaccagtagcattccttatttttaaattttgttgaggaaaatgctttttcttaacctcattcttgctgatgcttctaagatatataaaatgtttgtagtttaaaaataaggcttagggttttgatcactcactcaacagttggctgtggtatctgtttttttgagatggagtttcactcttgtcacccaggctggagtgtagtggcgtgatctcggctcactgcagcctccacctcctgggttcaagtgattctcctgcctcagcctcccaagtagctgggattacagccacccaccaccatgcccagctaatttttgtatttttagtagagacggggtttcatcatgttgcccaggctggtctccaactcctgacctcaggtgatccacctgcttcagcctcccaacgtgctgggattacaggcatgagccaccaagcctggccagctgtggtatctatgtgaaactctccatatatatgtatatacaacatatatatttgaacgtacattatatacatatgtgtatataaaactgttatagggactatcattatgataagtgttttgaatgactgagctaacaactgaatgaaattgtacatcttttcttttcatatgacttttcaatgcagattccagaacagtttggtccaatacggacagtggccgaggggaaaggcgatgtgatcttgattggcacaactcgaaactttgtcctgcagggcactctgtcaggggacttcacacccattactcaggtacgatcccactcagcaggcccggcaaacactctcattttgcattatatcagaccctaatcaagcattacaatcaggtgctttatactacgataaccttcctccaccccagagtgtctgtggctgctgaaagatgggaggagagaaactgttgagagcagttatgaagtcagcatgaagcctcggttcgtcatcccttacggctcctgagtgcgaactgtagtatctcagagcgcttctgtttgtcttggttatttgtagggtcacactgatgagctctggggactggccatccatgcctcaaaatctcagttcttgacctgtgggcatgacaagcatgccactctctgggacgctgtgggtcaccgtcccgtctgggacaaaataatagaggtaaacatgcacattacatttccatttttcttacagaaattcatctggaacatgtttatttattttttgcatgaaatcaacagtgatacaaagttgtcccaaagcaaatgttatttatctatttagagttgccttaacattgcaattgcatttaacagtgttacttttaacattgcctcgtggcctcagccatgtaattttgaagtttactgttgaaattttctgacaagaagttgttctttctgagttcattgtcagattttctgagtacagtctctcaaccatcctaagagctgaaaaatacttgttatgagcctgcattctatttacagtgtaccctttgaatgggaatttacaagctgtactaaacacacgattgaatatatctctacattttgagtttgatggtaaagtgaactttcgtttgaaagtcagctgggcacggtggctcatgcctgtaatcccagcactttgggaggccaaggcaggcagatcacctgaggttgggagctcgagaccagcctgaccaacatggagaaaccccgtctctactaaaaacacaaaattagccgggcatggtggtgcatgcctatactcccagctccttggaaggctgaggcaggagaattgcttgaacccggaaggtggaggttgcagtgagccaagatcacgccattgcactccagcctgggcaacaagagcaaaattctgtctcaaaaaaaaaaaaaaaaaaaaaagtcaacatctctgtgaattttgcaaaagaaactctgatgacctgtcagagtgttgaaatgccctttccccacgtgtattacttgagcactgactgtttgcatgccaagcactgtgcgtgtattatccttaatccctgtagcagctctgcaggttgaagaggttttttttttaactctgattttattgaataggaaattgaggtgtagagaagttaaataacttgccaaggtcactaagttagtgagtgacctagctagtgttagaacccagctcagtctgactcctaaactctggttctttccactgcattgcactgcagcgaatcggaagctcattctctgttgccggtgccctaatgatctgtgcaatcccattgcacagaggaaatagcccttctgtaaaccaacacatcatcctttcatcccccatagagttactggcatgtcccaggtgctaggttcaagttttggctcccttcccttcattttcacggaaggggtgctggtcactggtggccagctgagccgtgaggtggaagggcccaaggggcaggcactgccactcagagagcaggtgtggcccgtgatggcaggaaagggctaaagggaacagtgttatatgttctacctatgccctggtggtccaggagggctgaaggcaatgacagctcctttaccaggctgttaatcatttagcctaacataagggttggagctctaagctggaagccagggaactgcaatgaagttctagctcctctgcctactggccttgtgaccttggacatctgtaactcagtgtccacttctcaaaattgttacgaggcttagatgaatgacacagacagaagtgctttgtaaatggtaaagcttcaagtgaacacgatttctgtttgtgtattagtggcagctctgagcttaattacagctcccactgtagaaagaaagcattgaaataatgtaatcatatatcaagtttctttctcttggttttttagattatccagtggatctcagggcctcctattttcattcccattgctacttttcttcctgatcttccttaatctcttctctcttcatcctaaacactcctgcaaagtgccctttatctaaaacacatgttcaatcatgtcactctttttattgaaaggacaagaccattcaaagtgttcttatttcctagtgatcaaagtccttaccatggcagtgacatcactaatgtgatatactctgtgctgtaagcccattgacctatctgccactcctcaaatatgcccacagctgtgttgcttccatcacttttactatattactgcccccttcaccatggtccaaaaaacgactggagtggccacatctcaccttcaccagtgataattcttcctctcctgggaggcccaagtccagtcgtctgtaccgcgaagccttggcccagcttcccagtgtcacctcatccctccctcccctgtgtatctctttcatggatctctttcatggatcattccatcttgtatccgagttagtgatgactgtgtgtgtgttccactggatcaaaacctagaacatgccttgctcatctcatgatccttccaggcctccatagtgttttgcacccagtgggcactcacccagtctccgtgtcatggagttgggtgccgtggttgtctttctggagcaatcaagcacactattcagtgagcttaccactcagcacggggagtcaactgaaggggctgggttctataagctgtgactttgtagaagggcatttacctgtctttcatcagattactgtagaaatgagaggatgtaagacaaaaagggaaaaatcctaaaaggacagaaatttaagtcaggctcaatggcttacacctataatcccagcactttgggaggcagagacaggaggatcacttgagcccaggaattcgagaccagcctgggcagcatagggagactccatctctacaaaattaaaaattaaaaaattagccaggtgtggtgacacacacctgtagtcccagctgcttcagaggctgagccaggagtgtcacttgtgctgcaataagtcatgatcatgccattgtactccagcctgtgcaatagagtgagatcctgcctcaaaaaagggtgggggtaggtagaaatttagcattattgaaacgcagcattcattcaagcaggaaaacatttttctctagaaaagagacttttcaaatagagccatatagccctaaggaattagaagtgtgagcgtttgtgtgtgcacgcactcacgtgtgtgtgttttatgctatagtgttctatctgttcatcaatttacacttcctttaaaatattttaggatccagctcagtcttctggttttcatccttcagggtctgtggttgcagtcggaacactcactgggaggtaagtccatgccaacagcgcttgtgcttgcaaagcttatggaaaagaggcctgttgtttctatttccccaggaacaggcccccgttcagctcttggctacatgttcgaagcttctaatgacttaccaagaattaagttaaaagcgaaacttgaaacagtggcccattacattttgagccttggggaatctgaggaaagccatagaccctctctcctggaaaaggaccctctacctccactagacacacacacactttttttgtttgttttttgagacaggtctctccttgtcacccagactgaagtgcagtggcacaatcacagcttactgcagcctccagggcttaagtgatcctcccacctcagcctcccaagtagctgggactacaggcatgcactgccatgctcaactaatattttatcttttgtagagacgcaggtctcactgtgttgcccaggctggtcttgagctctagctcaagcagtcctcccacctcggtctcccaaagtgctgagatcacaggcatgaggcaccacacccagccacacacacattttgcctacaatctcgaggatttgtggagcttctcaagccctgatcttgaggctgtgggagaagccttgattttggaatgaagcaagaaaacatttcaaagtgctgagcatttaaaaatgctttttctactcctggtcacagtggctcacacttgtaatcccaaccctttgagaggcctaggcaggaagatcgtttgaggctaggagttcgagaccagcctgggcaacacagcaagaccctatctctataaaaaatttaaaattgagctggatatggtggtccacatctgtattagctactcaggaggctaaggcagggggatctcttaagatcaggagttcgaggctgcatcgcactatgattgcaccactgtaccctcgcctaagccacacagcgagaccccatctctaaaaaaaattaaaaatagaaaataaatgctttttctagctgccctttcaaaatttcaggaactgcccagaccctgagcctcatattccaattgagttaatacctattcacctggcacctcctacacaccggatggtgggtctgcgtttgcagctcagctttgccacttagcagcagtgtctttgagccggttacataagctctctgaatttgtttctttttctgtaaattgtgatattccctgcctggctgtgttgcactgaggatcgaaggagacagtgcacacagcacctgccagggctgcccatcaggcactgcaggggttattattatcattgctttccaggttttgattgaacatttatgctgctcattgtactgtatacatttactgtggtttcagtcaaatatttttcctcccacccttcctctctaaaaaagcgtagcacttaaattctgttgctatgactgcagagcctatatggataaagaaagtgtagccctttgcaggtcataggtagcaatatcttaagtattgggctccatgtagccaacagaattcttcatgaaaacgtttgtatagccacacacacacatacgcatgcacacagacacacacacacacacacacacacacacacacacacactccacctcccatttgactctctttgagacaggtaaaccttctaactcatcaggctcccaccttctgatgactggcctcccaataggctgacggatgccagcatgcctactgtgtgtgtaggacacggtgacagtgctcagaatcacagtgtcccatggtggaggagatggatcgggtcacctaatccagcccctcatctgtacctcttgccattcaggtcctaggttaggcttagctcccgatgctgttgatttaacaggtcacttcaaagccatgttctaatcagccccagcctttattaaggttaaatagcacattaaaggtaaatggttgttgaagatgcaagaaattggcactgaaaagcaaaatccacatttctggggggcaggacatctgacagtgcctggctaggggggctcctgtggaagacaagggacactcactctgcgtcagtggacatgctgatgggatgtcctcaggcaggttagaaactgcagcaacagtttatccatttatccttatccatttatccatttatcctgaaaacaccaggggctcaccaccaccccttgagaatataacaggcaggagagttcagtcattctgatgttaacactcatttagtgggtactgtgtgcttatcagaggatacaaagcacttccatgtccattatcattcgactttaatattgagcctgcagagtagacctgggctcttctccccatctcaccactgaggaaatggcccagcgaggtgaaattagaagaccagtcctccactccaatttctcccatttgctctgtgctttccctcgccctgttggttgcaggctagcatccccataaggcctgtactcttggcctgctctgtctgcagcaccattgggaacaccaccaccccggagttgtcccagccccatcctcctgcatggtcctgcttcgccctggaaacctgggtgagctcttgcaggtggtccttcactgcttcctctcaccatatgccctggcactaggtattggcatcttccctgcccagagctttctctccatgtgtaaatgacaaagcacaaacacagagaaaccatgtcatagtgttgataatggcatagttttgaatgctagccaatatgctgttcctttcattagaaaatgcttatatataggaaattttctttgaatgaaagctgggaacaagctttcttattaagcaaattctgagtatttattaagcttttatgattaacaatttttattcatcccactattatataatcttcattttcttattaaacaacttactgtgctttttctcatgttgataacaggtggtttgtgtttgacacagaaacaaaagacttggtcaccgttcacacagatggaaacgaacagctctctgtaatgcgatactcaccaggttagactccaaaccattcactactttatttttttaatcaacttttattttaagttctggagtccatgtgcaggatgtgtcggtttgttacataggtaaacgtgtgccatggtggtttaacgcacagatcaacccatcacccacgtattaagcccagcacccattagctgttgttcctgatgctctccctccccctcgcccccctccaacaggccccagtgtgtcttgttccccgcccagtgtgtccatgtgttctcatcattcagctcccacttataagtgagcccatgcggtatttggttttctgttcctacattggtatgctgaggataacagcttccagctccatccatatccccacaaaggacatggtcttgttcctttttatggctgcatattattccatggtgtatatataccacattttcttcatccagtctactattgatgggcatttgggttgattctgtgtctttgctattgtattcactactttaaaatcccaacagaattgagattctgtgtcagtgtctttaaagaaaaaatttcacaagcctcctcagagtaaaatttaaattagacatgcacataattatggcatttagggttcttttccctcctttgggtcactgtgcttgtgttatggaaaatttcaaacatagacaaaattaaacagaatggaataatgaaccccatgtactcatccgccagcttcaatgatgatcagctctcagccagtttcctgcgtctggagccccacccaccacccgcctcccatattctgaagcagttcccagacatctcatcatttcatctgttaataattgtatatatcccaaaaagatgaggactctttttaacagctttattgaggagtaatttacatacaataatgaaccattataaatgtacagctcatcgattctttataagcttgtggagctatgcaacaaccatcactacagtccagttttttaaccttttcatcatccaaaaagtttcctccatgcccattagcagttcacttccaccctcacccccagtccgaggaaactactgatctgttttctgtttccaaaaattgctttttctggacatatcgtgtaaatggattcctacaatatgtagttggttgcatctgacttcattcacgtagaatgatgtttttgagattaatccatgttactgtgcacagagcagtactatattccttctaattgctgggtagttttccattttatggatatataccacatcttgtttatccatgcatcagttaatgatggattttttttttttgagacagagcctcactgcaacctctgcctcccaggttcaagcgattcttctgcctcagcctcccgagtagctgggattacaggtgcatgccaccacacctggctaatttttgtatttttagtagtgatgggatttcgccatattggccaggctggtctcaaactcctgacctcaggtgatccacccacctcggcctcccaaagtgctgggtttacaggcgtgagccaccgcaccctggccttatggatttagattgtttctggttttttattattattaataatgctatgaacattcatgtatatgcctttttgtgtttgttttcatttctcgggtaaattcttaggagtgaaattgacggattgtatggtaaacttatgtttaacattttatgaaactgccagactgcctgtcctattttacattctcgtcagccatgtgctagggttctagtatcatcacatcctcccaatacttgttattgtccttttgattatagtcattctaaagagggtgtaatggcatctcattgtggttttaattggtgtttccctaatgactattgatattgagcattttttaatgtgcatattagtcattccaatatcttctttggtgaaatatctattcagatattttgccaatttttaattgggctgtttgtcttactgttgagtagtaagtcctctttatatattccgtatatacagtctttatcagatagatgatttgcaaatattttttctgaatgtatggcttatctttttttctgtttgtttgtttttgagacagcatctcactctgtcacccaggctggagtgcactggcatgatcatggctcattgcagccttgacctcaggtccaagcaatcctctcacctcagcctcccaagtagctgggaacacaggcacacaccaccacgtctggctaatttttgtatttttgttagagacagggtttcgccatgttgcccaggctggtcttgaactcctgggcccaagtgatctgcctgcctcggcctcccaaaactgctgggattataggtgtgagccaccatgcccagccttcattttcttaatggggttttttaaagcacaaaagctttcaattctgatgaagttcagtttatcaatttttccttttgtggatcatgcctttggggtcgtatccaagatcatgaatatttccttgtatgctttcttttagaagagttgttttagcccttgcattcgagtctatgatccatttgagttaattacacaagagttacaagagtacactagacttgtttcttgtggatggtgagaaggaagagcctgtttgctctgcatagaggtatctagttgtcccaagcactttttgttgaaaacacagtctttccctgttgaattatcaatgacacttttgtcaaaaatcaatcgatcagaaatgtaaaggtttatttccggatactcagttctgcccccttcacctgtgtttatccccgattactgtgaccttagaggaaattttcaaattgagtagtgtcactgctgcaaatttgttgtttttttcaaaatagtgttggctattttaggttcctactatatgtaaaattgtatataaattttaggatcagcttgtctttttttattattttgttttttgaaatttttttgtagacacagggtcttactttgtggcccaggccggtctcaaacgcctggtctccagagatcgtctcacttcggcctcccaaagtgttgggattacaggtgtgaggcaccacactaggccagctcgtcaatttctaactttgaaaagcctgttaggattgtaagagggattatgtttaatttacagatcaatatgggggaaattgccacctggacaatagtggctcttatcatgagcaaagactgtctctccatttatttaggtctttactttttctcagcaatgctttatagttgtaggtgtacaagtcttgcacttcctttgttaaatttattccaaaataagtgttttttttatgccattgtgaatggaattgttttctgaattttgttttcagttggttggctgctagtatgtaaaaataggattgaattttgcacgtagatcttatatcctatgacctttctaaacttctttgattagttttagtataatagtccctcccaatccacaggggctaccttccaagaccccacacaggtgcctgaaactatggataacaacaaatgctaagtgtactatgtttcttcctatatatacttgcctatggcaaagttaaatgtataaatcaggtacagtaagagattaatgacaataataataaagtagaacaatataacaatatattgtaataagagttatgtgaatatggtttctctttcagaatactgtattatacgtaatatttgcagaccacaattgaccacaggttactgaaaccacagaaagttgtttcagtcttattatattatattaatatcactacattttattaagtttcttctgtttttctgaggagaaaaagcattcagtctttcatcatgagggataaagatgccctttatcatagtgagaaagttcccttctatttctaatttgtttggaggttttagcatgaatggggttggagtttatcagatgctttttctgcatctgttgggattattatgtgggtttcatccttcatcttattttattaatatcactacattttattaattttcagatgttgaaccaacttcacattcctgtggtaaattccccttaatcatggtgtataatcccttttacatgtgtttgctaggattctattaaggatttttgcctccatgtttctaacagatattggtgtatagttttcttttcttgtggcatctttgtctgtctcagttatgagagtactaccggccttacagagcaaattaggaagtgttctctcctctgttttctgaaagagtttgtgaaaagttggtgttatattaaatatttgacagaatgtatgtgaatttggtgaaactacctgggcctttctttgtgggaaggtttttaattactaattcaatttctttacttcttacaagtctattcagatttcttttttcttttttttttttttttgctctgtcacctgggctggtgtacactagcacaaacacggcacactgcagccctgacctcctgggttcaagtgattctgccacctcagcctccaagtagctgggactgcaggcaggcaccaccacacccagctaattttttttagagacagggtattcctatgtctctaaactgaaactcctgggctcaagcagtcttcctgcctcagcctcccaaagtgggattacaggcaggagccaccaaatttctcttttcaactctatttttgcttcatgtagtttgaatgaatgattgggcagaggttatgcacaaataacttaagccagtaaggctccgtcctctgccagtggctctgtgggcaggttgaagggcatgttcaaagttcaggccgtttccatgtcggcctggcttttactttccactcacccttttacatctcctctatgcacatgtacagattcagattggccggaagggtgtctgaataggcaggatcctttcctgcctccactgtgcatgcaccagcctcccgtcagccaggaatgcgctcacccatccaataaccgtaacctcaagccagtagaaaccttggccctccccacccaactgccctagagatggtcacttccatcccagtgctactattgcccagggctccatatggagtgagcccttttaccacagccgcgtggtcctcagagcctgttcttccctgccaggaccgctgtgctggcccagctgctgcgaaggagtgagggcagcccagggaagaacatgatggattcaccctgtttttacctgaagttgagaagattttcaaataaacaacacttctcagattttcatgtcttgttcaatttacagagtctggaaatggttgtttttgtcagttttatagaatttcataattgctttatggggagaggattggccaaccttctcatttggccacagctagaagaactgccctcttattttttgtgttttttggggttttttttttctttttttgagatggagtcttgcactgttgttcaggctggagtgcagtggcatgatttcagctcactgtaacctctgcctcccagattcaagcaattctcctgcctcggcctcctgagtagctggaactacaggcttacgccaccacacctggctaatttttgtatttttagtagagacagggttttgccagattggccaggctggtctcaagctcctagcctcaagtgatctgcccgcctcggcctcccaaagtgctgcgattataggcataagccactgcccctggcagctcttattttttttaatgactgttttttattgttagagatgaggtcttgctatgttgcaggctggagtgcagtgggtactcacaggtgtgatcacagtacactacagcctcagccccttgaataggtgggactacaggcgtgtgccactgcacccagctctgcctttttttttttttagacagagcctcactctgtcacccaggttggagtgcagtggcgtgatctcagctcactgcaacctctatccctcaagctcaagcaatcctcccacctcagcctcccgagtagctgggactacaggcatgcaccaccatacctggctaattttttgtatttttagtagagatgaggttttgccatgttgcccaggctggtcttgaactcctgagctcaagcaattcacccctgcccttggccttccaaagtgctgggattacaggcgtgagccacagcacagacctgccctcttatttttaatataaccacagtatcgttgtctcctccccaacccaaatcagcattgatgtcttaatatcatcagatggccagttatatgttccagttttcaatttacttttttttaacaatttgtttaaaccaggaagcaaaaaaaagcccacacaatggtaattggttgatatgacttactagtttctgttaatccataggtgttctctctctccctctattacagtaaatttgttgatgaaactggctcgtttgtcctgtagcattttccacactggattttgctgaatgcatctttgtggtgttgtcttcacgtgttcctctgtcccctgtatttcccataaagtgattgctggatatcgaggcttggtcatattcaagctgtatatgtgttgctgtatttttcctttaggaggcacataatgggtttttctcactttttgtgacattagtagctgttgttacccagtgcctagatccataaaggttgccaactattgatttccaatgttagcttttcttcttcatttattagatatagtacttctatgaagaaaaactttccttcatctacaattttggtacccagtggtagagttcatataggaaagtcagaattaatgcttgatttcattcactttattttccagtttctgagataatacatttgctttctgctcctctaacagtcaccgatcagtggtggtgatagtagtggtggtggtagtggtggtggtattggtggtggggggggtgggggggtggtggtggtggtggtattggtggtggtgatggtggtggtggtagtggtagtagtggtggcggtggtggtggtggtggtggtggtggtggtggtggtattggtggtggtggtgatggtggtgatggtggtggtggtggaggtggtggtggtggtgatggtggtggtggtggtgatggtggtggtggtggaggtggtggtggtggtggtggtggtggtggtggtggtgatggtgatggtggtggtggtggtggtggtggtggtggtgatggtgatggtggtggtggtggaggtggtggtggtggtggaggtggtggtggtggtggtggtggtggtggtggtgatggtggtggtggtggaggtggtggtggtggtggtggtggtggtggtggtgatggtgatggtggtggtggtggtggtggtggtggtggtgggtagtggtgtagttttggtgccattatggattgaagtttatttgctgtgttcctgtctgttatattaggtggaagttactctagttggctcctgggtccttttgacgtgacctcaggagcctttagtacttgttctctggcataacaagttgttccaggatccttgtatacatttcttacctatagccctttctctcaggaggccctccttcctttttcatctgaagggaggagatcacaatatgggtgttaggagtgcttgttgccacagggtaggggattgtcttgccttttcattatatgattatgttgtgggaaatactgtttctttcatgcacaggccatttggctatgctgacactcttggaaactggagttttggttctgggaaatacgtggctgactctgagctgctggtctctgtagggatcttctattttataaccttattgacagcgtcaactctgcctcacagtgggacgtgtcctcgagctttagaagatctgatagagcatctcttttggatgttttttcgttgtctctgaaccacgttcataacttctcaccctaaacagacaactgctcagcccccttggcagccttttgtccatgttgagaaggagcttgacttggaatgcctttcattcataacctcctcagtatcacatttctttctgttaatttagccagtgttctgcatcttatcttgtgtttctcaccattttctcagttattttgaacgtctgctgaaggcacgagggcctcatctgcagcctctttcctagaaagccatctgatacctgtcagcgcctgctaacttgagcaggtccattgggaaacatgtttctatttcttgtcagttacactaatgaccattccctggagagcagagagctcttcctactagaactctgcctctcagcttcagagtcattgcctgggagctgtgtggggcaaaagtgaaagccctaagccagggccgggccaaccgcatttgaatctagtgttctcccttagttagccaggtgaccttttcagagcagacagtgagttaccatgaggcccaactgaaagaagtgtgaatgagttctctgcagagcattgtgcagatgtcacaggggatgtgatatcatcatcagtaacagcagcagtgatggcccctggaacagcacccagatggtggactcagacccctggggagtgacccacagttccatgatgggagggaccctattttgttcagcactgtgtgcccagctagctcctagcatagggtttatgacgggttagttgcatgcgtgaatgtagctataactaactacagtgcaacagacacaaagcaaaatgtgatcagcagtatgagttttctggttacacaagatttttccagcatataggctatactgttgtggattactatctcatttttggatttaagtatttacagacctaagactaaagagagagagagagaaagcattcgatgcccaaacacagattgtcattgacatggaatttcagaaacctgctgccaagatcccggccgagatctgtagcccatctccaaggtagcagcaccctgcgctgccatgtgctaagaagggaaaccatgatgaaatgatgagggctttttctcattccgtcagtctcaggaaagctatgagggttctgctgatggccagaggaaaagctagtagcggttcttgagctttataggtggagctggccctcctgggccttcccaggatgtgggaaggaccaacgagcccccagccagaggccccctgcccaaagataaatgccaccttcacactcagtgaggcaggtggacactgaccctttgccacagactggggttgtggagaggagctttaggaggaactggggctattttgcaaatcaaggttcaaggttgatgttaactgtgcaggggtgcgggtctgaggggttacctcataaactggacagtcgaaactttagcagcagttgagaactaaatgtttctggcaatttctcgcttctcgcacaacaggcaggcccaggtttcagttgttggtctatacctcaccgtgggtggaagagggaggttcagaaagtcagcactggaactctgggcacacgcctggaacgcaaccacgaagccaagccctccaggagtgcatgtggatcacccagagcgggtgggggttctttggcatgctcagagccatgagcctagagaatttccatggaccattgaatacccatctcaggcatgttttagcaactgtcatttatggactattttatataacatggtcttttgctgataaactaatgttacgtgaaagtttatcacaaccagtcagctaagtgttggcaaaatgccagctccctcaggcttattaaatacagaagcttcatagtgataattctcatatttaacatgcatgtcgagaatcttatagagcactttatgattggacaggatggagttttgattgaattaagattgtacttttttaaagaacagaaataggaagaaaataacttcctatttattaagcccaactgcagatccttagcctgcctgttctagtttcagctcattgaacctagggtaaaaatctgaatgtgaagatgaaagagagaagcccagaaaggactaggtgcaactggtcatgcaattgtgtttctcttctttgatcttatccatgtcattgtttgaaaggtggggctttttctgcttttactagaatgaatcagaatctggcacttactccgtcacttgcagtattagatcccccatctgcctgggtctgagccctgtgctgatgcaacccctgccacccagccaaccctttcccctgtcatgtggcattccccctccctgggttgatccccatgcagatgcagcagtcttgtctccaagcccaaaattacaatcagtgtgccaggagagaggctacaccatagctgcacggctgttcctacacctgcagaccatcttcgctgccaccccctccctccccaccccagatctcacttgtcagcttacaggtactttgcaagcatgcaaggatttctgtctgtgccactcacctggctgtgttgctgtacacaaattactaagcctcagtttcctcatctgcagagcaagtctaattgaaccctctgctgaggcgctgttgggcttgactgaagcccccagcctccagcctggtgaagagtgagcaatcagtagaaaacagccgtaaggttgtccttctgccctgagcacctggactcttgctcccgtggctttatgagttctccagctgattttcattttgggccaaatcctagcttatttcagtggagtaagtttaggaatctcagtctccgagagagctggggaatgaggcttagagagtttttggaggagaggagaacaattagggaaagaaaaagggctctgtgggacccaagaaacaggctgtgctaggtttcttctggcctctggttagcatattgacaaacgctggttggttttgatttcttaggcaattgtttttatatatttatggatgaatgtaggtaaaagagctaggatttgaacccaggtttttctgcctcgaaggccacattctaatcctcacactctgccgtcttgccgggcagtcgtcgcggtcaacgggagagtcattttgaggtttttcgtggtggttatgtcgggggccaggggctgggaggcacctcctctgaggaagggaacgtttctcctggttctgcctttgtctctgagccactgcctgcatttccacatcacgcactggtgggtgcgtgctaaggacgtggaaacctgggtggggtggggtggtcagagttgtttacaaggaagattagggcctcctgggccatcttttcgtgcctgtgcagaggcctggggttgtggatggtacgatcagccggttcccctctgcagggaggacttccccaggcagaggtgagcttcaactcctgcatgaagaccgtggattagaataggaaaaaggaattacaatctgattaagcctgtcagagatagaagtggattgctgagagagattgtgaagtcctgtttcattcatctttaaaaacagatatgggggccgggcgcggtggctcacatctgtaatcccagcactttgggaggccgaggcaagtggattacctgaggtcaggagtttgagaccagcctagcctacatggtgaaacccatctctactaaaaatacgaaataattagccagacgcggtggcaggcgcctgtaatcccagctatctggaaggctgaggcaggagaatcgcttgaactcaggaggcagaggggcagatgttgcagtgagctgagattgcaccattgcactccagcctgggcaacagagcaagactccatcttaaaaaaaaaaaaaaaaagatatggcgatggtgattatgcaggtgtagttgtcaaaactcctcgaaccatgcacttgaaatgtgtgcattttactgcccgaaaattgtgggatgatgttgtaacatgacttttttccttaaatagccaattgcgttaaacctgtttgttaaataacaaatagttccattatggccgggcacagtggctcacacctgtaatcccagcactttgggaggccaaggatgttttgcttgagcacaggagttcgagaccagcttgggcaacatagtgagacccccgtctcaacaaaaaaataaaaaaattagctgggcatagtagcgcacatctgtagtcccagctactcgggagaccatggcaggagtcgaggaggtcaaggctgtagtaagctgggattgtactactgcacttcagcctgggtgacacagcgagaccccatcccaagaaacaaaacaaaactaatggttccattatgaaagacacctcattatgttttgagttcacaaatgatcaggtagttcttttttttgagatggcgtgtcgctctgtcgcccaggctagagtgcagtggcgcaatctcggctcactgcaacctctgcctcccgagttcaagtgattctccagccttaccctcccgagtagctggggctacaggtgtgtgccactgcctccagctaatttttgtatttttagtagagacagggtttcaccatgttggccaggctggtctcaaactcctgatctcaggtgatctgcccacctcagccttccaaagtgctgggattagaagcgtgagccactgcacctggcctgatggggtagttccttgagaccttttgcataagagtggacagccaatcccctgccgtgtcatgtgacagattttcagctgttctttaccctaaagctggtcggaggggcagtgcccctggagtcagattgcctgggtttcagccagtttcaggaaacctgtgtgaccttggatgagttagtttattgtacacgcctcactgtcctctcttgaaaaatggggataattatatctacttcacgaggttgttacgaagatacgaaaattaaataagttaacacaggaagagtttagaattggacctagcacatagtaggctctcaaacatattggccaggccgggcacggtggctcacgcctgtaatcccagcacttcggggaggccaaggcgggtggatcacctgaggtcaggagatcgagaccatcctggccaacatggtaaaaccccgtctctactaaaaatacaaaaattagccaggcgcagtggcatgtgcctgtaatcccagctacttgggaggctgaggcaggagaatcacttgaactcaggaggtggaggttgcagtgagctgagatcgtgccattacactccagcctgatcaacaagagtgaaactccgtctcaaaaaaaaacatattgtccatttaataattgtaattggtatcattaagtggccattgttagtagcattttgtgtttattgcggtcatcgtcactgttgctgtccaggcatggccagttgcaggcattgagtgcagagacggttggtttctggcgtggtcacctggccttctcaagcctcatcagcagccgatgacagcctgtctccggcttcagcagtccttttgtttttctcagcaaaaaatatgtatttgccccattccttcagaattcttgatttggacaggctgccttggtcttacatcgcccctattttgtcctggcctaggccaacacttcctaaaataccattccctgaggcgccaggccaccctgggtcctgcaggattcctgcctggcagaaggaaaatcacaggaaagaaggaggggagaaacaacccttacctgatgctttacgcgcctgtgagcgcaaggccctgtacaaatattgtccaagtggagcctcccgactgctatgaaaatgcgccgcttgctgtgttttgtggatggaggacctgcagccccctagctggagcagagagacccctgctaccctgcattctattctgggccctgcatggctccaggtttccagtccttctttttgcttgctggctcaggaaagtctgaccttttcccggactcacctcctggccgtgtttcctgtcctgggcatcgtgagtccccctccctgcatagcgtgcacagcatggttgcttccagccaccagggctgctgctgccttttgttgcaaagggctccttcccatgtgtttccacacaagcatcgcagcctgggtccttaggccctcccagaaccagaaacccaggggaagaacataccaagatacccctgggaagagaggcaggaagggctgtccaggcagagagcagtgagtgcagaggcctgagtgaacccgtgtgttcagtgaggagcaacgtggctagaaggctgtcctggtgggctttctgggcccttccaaggaattgagtcttcatccttcagtgattgggacagggaggggcttataagatttcataaaattgtatgaaaagaatttgtagggggcagtggctcactcctgtaatcccagcactttgggaggccaaggcaggcagatcacttgagctcaggagtttgagaccaacctggtcaacacagcgagaccccaactctacaaaaaaatgtttttaaattggccaagtgtcatggcacacgcctgtagtcccagatacttccctaggatcacttgagcccaggaggttgaggctgcagtaagctgtgatcataccactgcactccagcctgggtgacaaagcaaaaccctgtctcaaaagaaaaaaaaaaagagttcataaaaatttataaatcgctggacgcagtggctcacaccttaatcccagcactttgggaggccgaggcgggcggatcacgaggtcacgagatcgagaccatcctggctaacacgttgaaacctcgtctctaccgaaaatacaaaaaattagccaagcgtggtggcacgcacctgtggtcccagctactcgggaggctgaggcaggagaatggcgtgaacccgggaggcagagcttgccgtgagtcgagatcgcaccactgcactccggcctggcgacagagcgagactccgtctcaaaaaaaaaaaaaaaaaaaaaaaattataaacctttaccaggttttatcatctggccagatgtgtgtttttcaaaagatagctttggaagtggcaaaggattcattgaaaagcagatttttctcttggaaataattcattaatctggtgattttgtctaaatctgtggtggcagctaccgttatcctttgtaacgaacaaaatgtgtattgttaacatctgaaatgtaatttgtcatctttttatagatgggaatttcttagccataggctcacatgacaactgcatctatatatatggcgttagtgacaacgggaggaagtacacgcgagtgggcaagtgctcggtaagcgctgacagtggacctgtcgcttctcatgcactgcgtatagtttaactaccgtggaacagtgttggcagggacttctaaggccaatgaaatgaagacagtgttttaccctcccagggtcattccagcttcattactcacctggactggtctgtaaactcacagttcctcgtgtcaaattccggagactacgaaatcctctactgtgagtaccaccccggggttgtatgaagtctcgatctcagaaagcgttcactctgagatccagggggcctctgtgagaacccacctcctgtatgacttaggcacgtgccatcatctctaggtcatggtttccgcctctgtaacgtaggggagtggggctgcgtggcttcttgggtccttcccggtttcctgctgactgtgagcccctatggaggagaagatccagggcctgccccaaggggaagaaggccaagccctgcagaggggggcttggggcaggcggatgtggcagaagggggcgggtccgggtggatgtggccgaagtgggtgggtccggagctgtccaggcaggaggagggcctgtaaaggtgttatcctcacaggagggaccatgaagtccatccccgctgggtggacggcagccctgggacccctcctcctcccctcccaacctgaccctggccagtctctgggcccaggcagtgcttgggaacagcgaggatgatcgtggcgggcacttacaagcacatcctcatgccacgcactggttccttagacacccaccaggcacctgccacgtgccccactctgggccacgcagggcggcgcgtgggcacaaggaaggcctcgctgctcccctgctggaagttactggaaagcgcagcgctcctcctctgcgtcttctcagatgacctacagcactttctggcttggccgcatgatgcagggaagggctcagagcccaaaacacaggccccaagagcccacgggggtgggcgggtcacactcacttgagcgtccccacttgttgaggaccaggacaggcaggaccactggcggcagggaaagcagggcagtgtgtaccgagactgagctcgctccagtgcggagggcggccgcaccgtctcacctcctccctgtccagctcctgcctgacacaggcacaggaacggtatgattttcagggacaagccctgggtctagagccttctcagatgtggtctcgtactctgctggtgagagctcatttggggaacacacaagtcccctgggaggcccttggtttgactggtttcaataacctccattcctgacactgatctgaagggactgaggggtatagggaggcgagggggcctgaccgcagaggcagagctgtgttcaggggctcgggtgggggtgggcagcaggcggagacccaggaaccagaggctagagaagccagactgtgggaaacagacttggacggagatgggaaaaaaacaaagaagagggcacctccacccaggcccatgggctcgggctcagttccaggggaactcacatctgtgcacacgtggttcctgcccgactgggaagtggaaggtctccctctccaggaagggctctgtacccaacggggcacagctctgggggctcagccttgcttaggggaggggtggggccttggcttagatgttgccagactgtttgctttttgcaggggttccctctgcctgtaagcaagtcgtaagtgtggaaactacaagagacattgaatgggctacctatacctgcactttgggattccatgtttttggtaagtttgctgcagatttcactggttccaacaaaagagtgtctccttttaaaatatttcttcagttgctacggagtctcatggtcaccagtcttgtcagattgctcggctgctacgggaggcccatgagacacacctcctgccgcaccctggggtagggcctgggcttgcctggccgtggcccactgagaagaaccagagagatgggtttttaacccttctccactgtacagggcagcaggtcctaagataattccctggaaccctctcctatcaggttgtgccacatggacctaggtggaccagatggcactcagtcaacttaccatttgtgagggttattatttatatattttttgttcttaaactaaaaatttcactttcttcaacattcactttaggaatattttcataagtgaactaaattaaagggctgcaaattaatagaatttttaaagatagtgtttattgtctctttacgtaagactacaagtcttgtgagaatttgcagttttgtggtgttcagtgctgaggtccggaggttcactccagagctcccagtcgaaaacccaacgtgcatccagccctctcctagccacaggtattgttgaaagggtttccccgacaatggtcagaagagggcgtcccccacccacccattctccaggcccacctgggctcacccgacaatggtcagaagagggtgtcccccacccacccattctccaggcccacctgggctcagggatgcagagcctggagccagtaatgatgggcacagctgccaggctgccccaagcaagcaacagccacagtgagtgaccccaagaaacatgcgcacacccagggttaaaaggcctttggagagacccacccatgtagagttacagcaataacaaggaaactgcaggcttgaggacagggcagcttcccacaagatgcttcagagatcaaggagaggtgtcactttggaactggggttcctggtactgtctgccttggcctcaagatgaggcctcaaaagacctggcagcccggaaagcttgtctttgctccccttgcacagcagagcatcagagggtctccgagactggcctgagtgagaggagactgggcgcacagcgagaggccaggaactgaggctattgtgcttttttgacccttgtttctaaagctggacttcaggcagtttcatgttcaggaccgttcagtgggcgcttcctgcgccatgtggccctgtggcccctggtgtttccagcgccctgtttgtggtctttgttttaggagtgtggccagaaggctcggacggaaccgacatcaatgccgtctgtcgggcccatgagaagaaactcctgtcaacaggcgacgactttggcaaagtgcacctcttctcatacccctgctcgcagttcagggtaaaggacttgtttcttcactaatcttatcccccatggggcatgcacgtacacccgacctgtttggagactaagtggaaatgggctgtgagcgactgctgccagccacaaaggcagatgtgactctgttctttgcgccctgagcacttccagccgcccttagggaaaccccaagccccacaggacccacaaagccgttcagagctgctcatccacctctgcagccccacaggctcacgaccccgccctcccccacggctcccttgctccggccctgctcagccgcgccagccctgagccctgggacgcccttcttcatcctccgtgatcctgaccctggagacccctcaccctcagccccgggcatctggttaggcccacctttggggcgacctcatacctggcacctctgatactgagcatatctctcggctgagggcggtcatttgctcgtgtctgtcccctaccaggccacgaggactgtgggctttgtttctgtgtcccttctgtgtcacacacagagcaggttcccaagtgagagctgccgagcggagggcgagtaaaggaattaaggcatgcagtgagaattcaagcactttcccatcccagatggttcgccttgtagtaaaggaagctttcccccgtatcattccctccaggctccaagccacatctacggcgggcacagcagccatgtcaccaatgtcgatttcctctgtgaagacagccacctcatctccacgggcgggaaagacacaagcatcatgcagtggcgcgtcatttagtacccaccgagagctgtggggagcagcatgggcaaggaagacacagactcgcattacccttggtcactgtgatttctgttttgtttaaaaaattcttacaaacctcaggaaaactgtgccctccgccggctaccttagcttagcgtgtcagcgggcgccacagcggatcagcggttccgtgttcacttttgttgtacaatatatgacacagtgcacattgaataccaacaaggttgcaacgtttacattatagccacatcaacagaagtaactggtatattcttagtaacttttctatgaactcttcaaaaatggtcacagaatgccttttaaaacattgtatataatcttcactgtttcaccatctagcttgctaagtcaaatatttatgatgataatgaggtactgaaccacgatggctgttgaggaattggtcctaaaaggacagatcacttcagaagagtgaataactgatttgcacagctgaatcaggagacacaaagatgagactgtgtttggttacattttccaaagtttcattgcattctcccttggggaggctgtgagagagggcttgtatccctcttgtgctaagcagactctactcctaactgacttcaatatttcagcagggtacacaggcgtttccaagtttcagtgacaccgtcctgcctaaccagatgcggtcagcctcttcacacccacctggcttgcatcccccatcccttgttcacacgccctgattcacggtgagacattttgccaccttcttgtgtatattacttggcatgagatgatattgtacttgtataggattctagcaattcataataaatatgtaagactaggctttactgtcttatgcttatggacattgtatatttgtattttatgaccaagtagaccaagtcagaaagatctctctcgagcgtaccataaacctgcagagagaagtctcgaaaggctccaccaggtaccaagggcagctgcttttcctgtcttttgtgcatgggcgacccattacagtatgagataagattgagttctgatgcgttaaacggaggtggcagaaatttgtcaagaaggccttatccatttcgattgtgtgacagattgaaatttattgtttacattggggaatgtatctcaaatttttaaatagaagagtaataaacagactttaaagcaaatattaagatttttactcattcaaggcaagtaaatgaatggaattatctgagctctatggcactggttgtttagagtgactgatgaagtgcaactttcaaaaacatttttgatgacatcaccagcctactgcagaagtgcagggcaccagtaaacaccatgtattattgaagatgaatctgtttgtatgtatccttgtcaaatatattctataatgaaataaaatctgaaaagtggatttcttattgacctatattcatgaaagcatataaattaaaatatttaaaattagatatgattcacactatattctgtttcatatgcagattttattctcacctgggccatttgcagatgagactgtagtttgcagatgagactgtagtttgcagatggcgtggaagcattcatcaggggagataaccataaaggatttggcctaattaccatactcaattgtcagtttacgtggttttgtgaatactggcaaaagcaattgtttttaaattaacaatggagagaatgataagatgagggaaggaaaaggcattcattattgacttacatgtcagtaaggtctgcttttatttctatgtactcctgtttgccaagctcaataatggacaaaggatacaaacacacacacatctactattttagataaatgtactgttatatatatatgtaaactactattgctctctttataatgattaatcactttattatgaatgaatgaatgaatttgatggatttaaaatggcttcatttcattttaattgaaattctttaaccagtgcagtattaaccttgcaggtgttcactgttcactcactcacgcgttaacacagcgagcaatgaccctgtgccactgctcagcacctctcaggcaagcaaggccttgaacctccaagattctcccggaacgagaggctcaggaaccgcgcagctcttagcccagcttccctgcagcacgtaagatgaggaaagatgaaaggaaaggaaagattacgatttatttgtagttacaataattaagtttgttagcatgagagaattttccagtgaacaaaaagccctcaggggatttttttttatttaccatttgaaactttgtgaagatgaaattgttgcttttgcagagtaaagtctccgtggcagtcctgtttagataaggtcaagtatcaagggaacgctggatttcctcaagaacagggtaggtgctggcgttcacatgcttcaaagcttgcaaaagagcacagttgacccttgaacaacacaggggttaggggtgctgaccccacacgcagtcaaagatctatgtataactttttactttccaaaaacctaactactgatagcctactgttgactggatgcctcactgagaacaatttccacatattttgtcaatatgtattatatagtacacgcttgcaataaagtaagctagagaagataaaatgttaagaaaattataaaagaggccaggcacagtggcccagcctgtaatcccagcactttgggaggctgaggtgggaggatcacttgagcccaggagttcacaaccagcctgggcaacacagcaggaccccatctctaccaaaaattttaaaaagtagccgagtatagtggtatgtgcctgtaatcccagctactcctggaggctgaggtgggaggattgcttgagcctgggaggtcgaggttgcagtgagcctggagcagaccactgcactccagcctgggtgacaaaatgagaccctgtctcactctggggactctgaaggctgacagcctgctgccgcctgcctccagggcctgggaagttgatttgaagagtgacactaccagggcagggaggccatctgtcattctgcgggtgtttgtttgggggattttgtaggcttgtgacagcctgcagggaaagcagggctatttgatagatacactgaggcttggagaaggaaataacttccccaagacaggcacttgttccaaacttgtcttaatgacatgtgctgggcgctgggaatataaggacgggcaaaaccacaccagtgcctgccctggggcgcctacatggcatcagaagagccagaggttagcagaacgcatgcccagccgcgtgctagatgaccaccatatgagccaggaaggaattgagagcatctaactggaagacccgagtgagtatggggactccggaaagtttccctggcagaaagagaaggaaatgacccgggagagcggggagagag

SEQ ID NO: 181 - DNA, 63775 bp, Homo sapiens
  source 1..63775: mol_type = genomic DNA
tacagtaaaatgccaacatgtgagccagtcgaaagaatgaggtggcctcatgtaggtggatctctaacatatattaggttgaaaagcagagcaagtgaatgacaaggtgcaggataatacgcataacatgctcacatttgagtaagaaaatcctattaatgcgtgtgcttgtgtatgcgtggaagcgcttctggaaggacatcgaagatgctggggagagtgattgcctctgagaagataactgggaggctggggtgccaggagggaggaagatgtgcttctcacagtatgtccttggattgcttacattaccatgttcagtgcacaatgtatcagatccttctttcatgccccctcccctgtcccccgacagctgcaagacagggagggagtgatggcctgagctagtgagacctgaaacacagggcctgactgatggccccaaggtgagggtgtgggtgaggacacacccagcgtgccagtgtctgttttgtgctgatgaacagatttgtcattggcacttttgcaaaactgcaatgaaattctggctcagggcacaatcacccagctggggccccgaggcttttggaagtcacccgtggacagcttgtcagcaaatctttatggagcaacaactctgtgctaggtgctgagtacacagtgatgagcaaaacatgcaaagaccgtgccctcttcaacttggatggccagtggggattaggaaaacaaataagtcaacaaacccacaataccatcagtgttgtgttcaagtaggctatgcagagggacaggagggcctgagggctgcttcatacagggtgaggatggaggggttctgaggagggatgcccaggctgagacccaaaaggtgaaaatgagctgatagggagaggtgggtggcagccaggagtgagtagaattacaggtggagggaccatgttgggaggctccacggaggacagtctggaaggactgaaggacagccaatgtggccaaagagtagtgagtgtgagagagggggagccaggtgaggttggtggggaggcggtagggacgccacgctcctgctgccctgactgtggggcacagggtggcagtcaggcctgtgggtcacccaccttctcaggggctggcatttgccttttcttgccttgccctttcagttggatgcaaccactccatgactccagtggaggatgagaccctgggatcagttcctgccctggccacaggctttgctcaccctatgttctaatgatcagtatttctgcagtaacatcttgcagaaatagttttagttcacccatgctgaggtggaggcagggaaaaccaggactgagttgaaaatgctccaggtttcatgtgccttttccgtgttctaggtgatcaagatttctgcaatagtatcctgcagaattaggtggtgtggacaagggggcttcagggtgcatcaggcaacattatgtttggctgcatgggacagaaaatgccagatcatgtagctttaagaagatagagttttattttttgtagataaacaaagtttggaggtaaatctagacccttgaattagtcctagatcatccataagaagctaccacatggcccaagatggctgctcaaatgccagcagttgcatctacatttcagacaggaggaggaatgtgtggggaagagaagggcacacttctgtttaaggtcccttcatggaaatcgtatatgatttacttctgcctgtatttcattgtccagaatttatcccagggctgcccctagctgcaggaagagctgggaaaggtagtttttattctgggtggcgatgtgccaagctaaagacatcaggggttccatgttaaaggaggaagagggaaatgaagaatgccagacacagcattttctgccacatatgatcaaataaatttgagaaatacttggttaaacaaaatgaaataggcttcttcactgcagaatgtctcaacctttagtgcgctcatggacattgctaatctgtaaaagaggctgtagtagtatgtagcctttccaaaatgtattaaatgatagaattggtgtgtgtgtgtgaagcaccttacggaattggtgttctgcagaggctattcaggtaaacgtagtccttgattatagagttcaaaaataaccaagctaggcaacatgctttcattttaaagactaaatgccattccttcaatcagcctagaccacctaccctggaaacgacaggccctgggccaagtgctgggatatatggctgagtcatgattcctgctctcaataagttcaaagtcaagagagacacattctcagcaaaataatgacaagaaatgccagaatagaacctggactggaagaatgtgacattggcctgcagaatcaggtggctggggtggaggctgtggacagcatagagtggggtgggcggaaaagggttggtgcaaggcagtgagtctggaggggtgagtgcagccagtggtgaaaagcctcaagtgctgtgccaaggatgtgtgccttctcgttgtggcacctggaaggagactgcggggtgcagaagggccatgtaccagggagtggatcgtgatctttcctcctccctggctcccagcctgctgcccgtatgaagggcttcttcctgtcccgacacaagacagtgaattggtcaccagaacacatagccctcctcccgttgcaaagctctgtcatctcctttctcttacattgtcacaagaagccttagaagtggagcaggccgggcgtggtggctcatgtctgtaatcgcagcactttgggaggccgaggcaggtggatcacctgaggtcaggagtttgagactagcctggccgacatggtgaaaccctggctctactaacaatacaaaattagctgggcgtggtggcaggcacctgtaattccagctactcaggaggttgaggcaggagaatcgcttgaacctgggaggcggaggttgcagtgagccgagatcgtgctattgcactccagcctgggagacagagtgagactctgtctcaaaaaaaaaaaaaaaaagagcagagagggctgcccttccctcactttacaaagaggcagggacagctccagcatcctgccacctgcaagtggcagaggtaaaggggagggatttcacaccttggtcgggtgtgcggagagaggaggctgagagaagttcctctgaggcgggtctgagctccatgcgatgcctcttcctgctagcaaaggctccccttggaggctgctccaccaggcaggcagggaagggcctgtatccattcctgagggctgccatgatgaaggaccacagactgggtgccttcaaacaagggaaatctgttctcccatgcttctggaggtcagaaatctggaatcaaggaatcagcagtgcatgttccctccgaaggctccttctcacctcttgcagccccagggggttgctggcaatcttggcgctccttggcttgcagccgcgtcactccgatctgtgcctgcgttgtcccatggagttctccctgtgtacatgtgtctctgtgtctttggctttttcctctttgtgtgtctgtgtccagatttccttgtcttatgaagacaccagtcactggattaaggcctgactaaatcagcgttgcctcatctttccttgattacatctgcaaagagcctgtttgcaaatagcacaaacagaggtacccgaggttaggacttcaacagatctttcaggggaacccaatgcaacctaaacagacagttttgcctcttcagctcacacctgagccagcctggggccatggaaaagacccagagctgatgccagaccctgcagctctaacctccagcaaatctacaaatcccacttatctctaatttattagcctttgcatggatctaatgcccttcagtgcagagccctacaaacacacactgttttcctactgactcctagccaggtatgtggtgggggagctgggccagctggcagagagcatcacccattgccagggaggcaggcagggatgtggccaaattttcttcctgggcatctcctcctagccacaggtgctccttggcaaccaggcagtgaggcaagctggttctgcaggcagcctgggcccacctggagcccatctcccgccctggccttccggccttctcacgcggctgcatcattttgaacagctttgaaagtgatggcctggggtggtagtgataggggcgcttcgattctattattttcaacaactgtggccagttggctttctctgtgcattacaaattcctacctgtcctacaaggctgtattagctcactagagctgttgcaacaaagtactacaaactgggtgtttaaatgacagaaatgtaacatctcacagttctggaggctggaagtctgaaatccaggtgtcagtagggttcttttttgtttttctgagatggagtctcgctctgtcacccaggctggagtgcaatggcacgatcttggctcactgcaacctccacctcccaggttcaagcgattctcttgcctcagcctcccgagtaactgggactacaggtgcacgccactacacctgactaatttttgtatttttctgtagagatgaggtttcaccatgttggccaggctggtcttgaactcttgatctcaggtgatccgcctgccttaacctcccaaagtactgggattacaggcgtgagccactgtgcctggcctgcttcttttggaggttccttccttcctcctttttgctgggagggagaatttgttcgaggcctctccctggctgctggtgctttgctggcaatctttggcgttccttggcttatagccgcatcagccaggtctctgccttcatcttcttgtgtgtctgtcttcaaatttctgctttttataaggacacgagttgtatcagattggggtccaccctcttccactgtgacctcatcttaacgaattacctctgttatgcttctgcttccaaataaggccacatgcttaggtactacaggttaggatttgaacatctgaattttggggtggactcaatttagctcataacagaggcccatcagaaatctcgcctcctccaggaagccttctgcactcaaaaccaggcaatccccctttctggaactcccatagcacataatgtctgaggaactcagtggcccagggccacttgggtatttatattctgtctctctgaggctggacttaactctgggtcgatggcatttatagtttttgaaaacaagtgcagcacagcggaagcccttttatctgatgttattaggactggtagttgggtagtaaactgaaaatccaaaaggaatgccagaaagcagcatggctcaacatgcggtaggcggaagattgatgcaggagtagagagcaaaggttaaccactgtgttagtgaaatcgacgttggctgggagagattctcctgcacaaaaacaaacagcagccaccaaagcccaagatggatgaaatctggatgcgaagttatccagcttcccattgagagtggatttccttttaaagaaaccatcaatactctgtgtcatttaagactcctatctggtttgggtgtcaagggaagtggccatacaagctgtttgggactttaaaagtggaatggaatccaggacacagtgagggtcccctacagaacctgaatgattttgtttttgttttttgagatggagtcttgctctgttgcccaggctggagtgcagtggcacgatcttggcccactgcaacctccgcctcccgggttcaagcgattctcctgcctcagcctcccgaatagctgggattacatgtgtgtgccaccatgtctggctaatttttgtatttttagtagagactgggtttcaccatgttggccaagctggtctcaaactcctgacctcaggtgatctgcccgccttggcctcccaaagtactgggattacaggtgtgagccactgcacctggctgggaacctgaataattttggaaaataaagttgtcttttgagagttaaactataaaacaaacataataggcccaaagcagggagtggcaaagactttgtttcacctgcttcacagtgtcaacatagccccaaaagattggccatcagaactgtgtgtgtgtgtgtgtgtgcaagtgtgtgtgaatgtatgtatgtgtgttgtgtatggcagtgtatgcatgtgagtgtgagtgtgagcatgtctgtgggcatgtgggcttgtgtaatgtgtatgatcatgtgcatgtgtgtgtgagtgggtgtggatgtgtggacagccagggaggccaaggagagggagagcatactgcctttgcctagaaaggtgtagcaaagccaggcagtgtgtccctggctttccccaggggaagagggggacactgggccagaaacttgagctcctggcctctgctgaatctctgtgcattcaaggggagatatgtgcatgaagtcattgcagtgtgacgcctctgtactcatcagatcacccacgtcatctaatgcactcccatcacattccagactcagtgctgccatcagctccctaggagctctccctccaggaagggaatgtgtccaccgtcagacactcagacccagcatgtggggacagaggctgatggcctgtctggccattcctctcagttcctctcctcactagcttgtgtccttgtgcaagtcacttaccctctctgaggttcagttccctcctctttgaagtgggtttaataatagtacctgccacataggttgtgaagattgatgagattaaccatataatgtgcttagcacaatgcctaatgtatggcaagccttccaaaagtatacgctaccatcataatgatcaatatgataataaatcaaaacatccgtattgtttttcatatgtgctccagcgggctgactgtgcagtcggcttcctgatggcacaatctgccattcatcctgtatccccagagctgagctcagggcctggtgtatagcatatgctcaggaagtgtttgttgcagaaatgaatgaatgatagtgagtgagtgagtggcaagtaatgtttctaggcccataggtccagggctgatagctttgcacaggtaagccgttctatacacttgcacttggcaactgggccacctttccctggggacagcagaccccaatgaactctggcacattactcactcttggaggggaggcaggaagggaaggagtttggagatagagctctctgagcagccacttggtcaccaggccagggcttgggtcattatcaccaaacttctcaggctgttgaattgggccatttatgtctgcttttgttttattttagtttggacggaagcccaagcatcactgagcaaagtcagtatcctcctataccttgctacttattctaagtgtgtttcatggaccagcaaaatggacctcatctaggagcttgttggaaatgcagaatctcagcccgacttacggaatcagaatctacatgtcaacaagatccccaggggctgtgtgtgcacatcaaagtgtgagagttttctgccctagtgccactgctttaagaactacagcttggtcatctctagaagaaaatctagcatttgtgagttgccacttctcctgcactccaaaatgcacgtcccagcccctgacccattagaatgaggttgtccagggatgtacggtgctcttgctccttctggccatctcatctcccctctccttttctgaagctctttcactggtcagcaacccggcccttctttgccattatgagagaaacttctctgctgtttgctgatcgaactgataatttgttttcttgaaaagcgtgttttaattcaagggagttgttgttaaggcaagtctgtctgctgtgagttttatctcctctctgttgcttcctggcagtgccacccagggtcctggcatgcatcttctggaacccaaagggcaaacaacacccttagacttccacacaatccccggcttctcctccacatctttcctcagctatccagctgtgcagagctggcacacgggcatgccctgccttcattcttcccagctcatacctgctctggagagaatacacacatacgtcaatgacaacacataaaatccaatgacagcccaagaactcctaaatcttccaaattgccatctgcacttcctctctctttatatcctggcatgcctgagctgacctgccccccagatccagtcccagcagctgtaatcatgtgtctgcgtcttccagctgctttgggaaatgctggggctccaggtaccagcgtcttcctggctgcacctctccagagttggatacagctaaggagttagggtccctggggattgggaacagaggacagggcctagagcactcccagactcaagtgtcccttggctttccacgtggaaaaccaagaaatgactaaatccagtgaattagccacaggaatcccactgcaggaaaaaagagaattcccagttagaagagttgtggcaatgggacagtgcctcctttccaagcagctgtatgctaaataaggaaactccaaagaaaggttacaattttccttgagcatctggaaattaggttctgttctcaggttcaagttaaaaacagtggttggaattctggtatcaactttgccagataagggggaattgggggagcgcctcggtggtgacgtgacatcctggctggtctctgtgcctcagtattgatgaaggattttgggagacaaaggctccaggacagcccatttgctcattacaggtgcaaagaggccaatacttggcctccaaccctttttttttaactctaggagaagcaaagccatttaataactcatttcataatgaagaacgaatcatttttaaaagctttccacctcttttaccaactgaccctataattagacaaagcattcatttcctttttactgctggctccccaaagcaagatctaatggtcaggggctatcaggaaacagatgcacactcaaattaggatgctttaaggagtcccttaaaataaatgtgtatcctgcccacacctgccttgactaaggtgtgggcagggtatacagaaactgaaagggctggtgcaatatcctggagctgggatctcagttcagggctcttaccatccctgggcctaaagggcagacaggagagagttaccgaatctggaaggagacagtcaagcagagaggtggcattgacaggagctgggatcttcagctgaggcatgcagccagcctgagatgaccctgtgagaacagagacagaggaataaatatgccagcttcactgacctagtctatcagagaccccattgaccagacccagcccagagccagagggggtgcagcctattactgtaggacagacaggccagtctcgtggggtagagagcggcatggagaggggcaaagggtggatctggagaggctgagaggagccacctgggactggagctgctcttacattccctctgcaccccgcctgatgcattccttcttaaaactgctgccgtgcaaacatcttgtcattttgctctggagcacccatttgtggttgtcactattatatattgcctggatctgtcttctgccaagccagcttgcaagcccttagagacagagattgtgtctctcttggatttacccaccaccctggggtacatatgttccaagtctcctttggctttctacatggaaaaccaaccaagaaatgaataaatccagtgaattagccacaggaatcccacgacggcaggacaaaagagaattatcagctgggagagttgtggcaaagagagagtgcctccttcccaagcagcacaatgtgtatgcaaaacatgtggacaagtgcatgtgtgtgtgcttgctcatcagtgaggagaggccatgtgacgttgcaagtaacaagcacccgatctcagcagcgttgtacaataaatgttttcttttgttcacattacctgtccattaagggtcagcatggagtggtgtcatagtttgggacccatgatggcttcgtctcaacacacacatccccagtacaacagaagagagagtatgaagtgaattactcactggcccaatgtgtcccttctgtacacatttgatgggccaaagtgggcttgtggccatgcctaactttcacagtcagggaaggaaaagcctcacacactcagaaagcagagaactagaaacatttggtgaacagtctcccaaagtggctgaggttggtctctaccagggagccatggaggaatgaataattttgaattaaatggaacagtgggtgtcaataaaaattaaacgaataaacaaatctatgccttttgacatagtagttcaaatcagtcaactcagcaacagaaaaaacatgagcaaatcaagtacccaggaattatagaaatcaaatgatttgtaagacacagactagtttatactacaagaccccatgtcttgctggttttagcatagcctatgttgtttgacatgaattgtgcctgggatgtggattcttcattgggggagagtcgaattctcccccaattcaattatgttatggttttccagattctcatgtccttggctattctttaagactcagacagattgataaagatctgctcattgatcctgatgccctctgtggctcagctccaaagaggacatagccgctgccacacctgcttccctgccttttgtgggacatccccatgcatggcactgtgtactacccccaggcatcaggttataaaattgccctatcctgagcccctcccaaatccctggaccttacaggaaatcacctcacctcaaaagtagaaaagggtgaaaaaaacattttcagatctgggcaatcactttgttgaaaaaaattgaaaccaagttttcaggattattttcaaaagcagaaaagcatgttcactcatcttcagaaattgtccatacctaaaaactgtttaggtagtgatgcaggttggctgagttatcatcaaattgcctcagccacttggcttcccaaagaaattgccttgaaaaatcatgaagagactgtgacaaaagatgtaagagatggcaatatttttttaaaaaacaagatcaaaaaactacgatatctcttctctgttccctcctatttttaagtaatcttttgcacatcatgaaccctgaaagcaaatgctaatactgcttcctcagagtaaattgtcaaagtaattttgatggctggacttaggcaggtggttgttttatttacaatgccaaaccagatatcctgggataaacactaattcatgagatctctaagcacttttgtgtgcctagaagagaaacatgaaaatgaccctgtgactgaaaatgtgcatggtctcaatgagaaagttattgtcgcagtaatcttacaagcctataaaagttgggtggctagcagggtccttccctgtcttctgaggggtctgggtcaattcagctctgggaccttcttaagggcccttttgaagtcctgtcatcttcagtttttttagcaactcacattctgatatgacctgccagggagagggtgaaaatgatcagcaatggcaacttccactattataattcattttcctgatggtaaaactaggacatgctcattgcagagaatttggaaagtatgaaataaaaagaagaaaataaaaggtaaccatattttcccacccactgataatcaccatcaactttctgatgtccttctcttcctttttaagcttcagttttccgggtcttgatttttaaactatttcaatcatgcgttcatccttatttattgagagcatactattgttctgttcccgtcatcagtgatgtagcgatagaataaataaagtcctgttctcatggagatgaaataatatcagagacagttactaaaattcagagggcagaaagaccacgggaaaatcttcaaacacttggaagttaaacagcatacttctaaataattcatgggtcaaagaaggagtctcaaagggaattaaaaacacatagaactctaaggtgcagctaaagcagtgctgagaggaaaatttataatactaaatgctaacattagaagaggaaacatctgaaatcaataatcaaagttctcacttcataaaactagaaaaataagaagaaaattatgcccaaagcaagcagaagaaaggaaataaaaataagagcagaaatagattgaaaataggaagataatagagaaaaatcaataaaacaaaaagattgttcttcaaaaaaaaccaataaaatttatacatctctagcaagactgacaaaaataaaaagagagaagacatattaccacaatctcagagttgagacagaggatatcactacaaatcctgcagttgctaaaaatatgatgagcagatgctttgaacaactttacgctcataaattcaacaacttaaaagaaacggaccaattctgtaaatactgcaacctatcaaaacccaacccagatgaaacagacaatctgaatagctcaaaaactatgaaagaaatggactttgtaatttaaaaagcttcagagatggtttttctggagaattcttaaaaaaaaaacacgaattttacaccatgttattcagaaactagaagagaagggaatacttcccaattcattttatgaagctagtttaaccttgattccaaagccagataaagattgcacaagaaaagaaaatcacagaccagtgtctctcatgaacttagatgcaaaaatcctcaacacaatattagcaaatcaaatccagagatgaatacacatacctagggaggtaggggtgacttaacaaaatgagctaagacttcacacttagacagacttagtttcaattaccagtttcccatgcgatacaataactctctgaacctcagtttacctatctgtaatacaggggcaacacacatattttaggattggttcatgtatctagtaaatgaaattatatgtctaaaaaaagccaacggaagttatattattttgtcatgtttctttcttcttcttcttcttttttttttttgttgatagagatggggttttgccatgttggccaggctggtctcgaactcctgagctcaagtgatccactgccttggcttcccaaaggggattacaggtgtgagccaccacacccaccaggttttctcttatggaggaactaaatgttacagcaatacctggtattttgttatggcagacaaaggtgactaatatagtcatggcccttaaacgtggcccatgagaccctgcaccttctggcctcccctctttctgatcagtaccatgacctttcctcgtggccctctccccccagcaccgcaggcctccttggtattctctgaatgacatgagcgcattcctaccccagggcctttgcactcccagccagcctcactcttcctccatggaaatttccctcatttccttcaagcttttgttcaaaaagcttcagccttctcaatgaggctgaccctgaaaactctttacaactcacctttccccatcgagcacttcaacccccccttacatgttctactaaaaaaaaaaaacttcccacatattggtcacttcctaacatatggtatcatgtatttgtgatattgtctattgcctgtcaccctctgaaaaatgataagctccagaaaatcaggtatacgggtctctgttttgttcactaaatcattccaagtgcctaggactctggctgacacatatttcctgctccagaaatatctcttggctgagtgaatgaacctcttcccccagcgagcgagcctgtcggccgaggagaccacgccataccaggattttccagcaggtggcagccgacgcacgccagagacagctgggcgcctacactttgaactcaaggttcttccaattaagtgcaagataaggagcttggagactcatcgcgtttggcttactcctgacgcagacttgcactggaggttgtgtggaggggatgagccggtgagctgataaagcctttatctaatacgggagactgtttacccacaattcaggggtaaaaaaatgtaaacagctgttgagaagaaaggtcagagtcctcccacggtggggaaaaggggcagaagaaagcctgtggccacggattggcgtcactcctgcagatggaaaagtgacattggacaactactcagggaaaaaggtgagcccctaacacaccgctggggtcgtggacgtttctagtcttactttttttttttttgagacttttttgagttttgctcttgctgcccaggctggagtgcagtggtctgatgttggctcactgcaacctctgcctcccgggttcaagcgattctcctgcctcagcctcctgagtagctgggattataggcgcctgccaccacactcagctaattttttgtatttttagtagagagggggtttcaccatgttggccaggctggtcttgaactgctgacctcaggtgatccacccgccttggcctcccaaagtgttgggattacaggcgtgagccaccacgcccggcctagtcttactcttgacacaccagaagatgctttgttatgaaaccttgaatcttcctgtgggctcctgccaagctgccctcctcccgggtgcttctgttatccatccagtcatggaattgagttgcagtggtaaggagccctttaaaagccaagtgcaaggtgaacctgccttccatcaaattcagcgtttaagtgtgtccgtttagcaggaggctctgaggcagaaattgcttgagaatctgagtctacaggcccagaacaatccatgccagctgatcaacctagtaactaccacagtgactacaagagctagcatttattgagtgcttcctgtgtaccaggcatgtgctggatacgtttacctgcactatctcattcattctcagtgcagagttctgaagttcaccctcttctcatccccaactcacagatgacacaagagaggttgtcactagcccaaggacccagttcggtgctccgaagctcaccctcacccctggaggggaggaatctgtgagttgtgccctggtgacctgatagacctcagagaacatctagtccaccgctccgtgttgacagatgggggagctgaggcccagagaggggaagggactggccaagtttacacagaagcctgcccagtccctgttcagaaagagcaacccagtgcgcctttaacattcccaaccaatgtcaggaggtcaagcacaggcttttattatttatttctttgtttatttagagacagggtctctctctgttgcccaggctggagtgcagtgatacgaccatagctcactgcagcctcgaacccctggactcaagcaatcctccctcctcagcactccccacccccagtagctggaactataggcatgtgcatcaccgtgttgtcttgctctgttgcccaggctggtctcgaactcctgagctcaagtgatcttctcacctcgacctcccaaagcgctgggattacaggtgtgagccaccatgcccggccagtcacaggcttttagtttgctttcctcagattcctcatttgcttcagtccttgctggcactgaacacttttgcataagagcttgtgaaaataacaccacctctcttattttaggagttttatcaactagcagactgttcagctggaatcactggcctctcataatgtgaattctggtttctgtggttattagctggtgactttggtcaagctggtttgttcattggtaaaatggaggtagtggtatatattcatgaaaggctagattctaagccagtgctgtcccatgcaaatgtaatggtagccacatacgtaattttaaattttctaatagccacatcaaaaaaaaaaaaaaaaaaaaaaggtaaagggcgaaccaaagcacacgccatgattaattttcataaattgtttcattgaatgcaatagcttccaaataccatcatttcaacatctagtcaatatccagttgttcatgggatactttgtttcattttcacatgaagttttcaagatggggtgtgtgttttgcacttacagcacatctcaatttggattggccacgtggcaaggggctgccctgtgggacaggactgttttcggcctccgtagcattttgagcacgtagctctgtgctttaggaggatctttgtatctacaccttgtctgtagagggtcatcatttgggaccctaacggaacagagatggccttcttcttggcctaataagtccccagtactcccctgtcatcagcaggcctctgggctgcctttgaaaaccttcccttcccggataggtttcctccaacaccacagacaggtctttcccattctctgcaaatattcacgtccattttgtccttgatgtggtggaagtgttcttaacaactgcacagcagactgagatacggtgagagagaggaatgcagaggatatggggcgatgggggaggtggagagatcgcatcctccctcaggatgggcttggtattgtggcaacctggggctcagggctctggtcactgtggaatgttgtctttgcttgccagcttagagcctcaccttgccgcacccagctcaactctgtggcctcagtggaaacaccctcattacaggagtgccccacctccgcgaccgcgacttatatttgataataagcaggtgtaaggggggcaattgtgcatgggcagtgctcagagaaacatgaaaaggctcaaaccatgcttcaccctcaggggcctgggctgggagatgggagccagcgtctgcttgggttctcctgacagcagtggtcactggggctcatggagagtgacaaatgcaggtggggtagctcagacacagggctctgggctctccagtgggtctgggggtggcagaggcccctctaactctcccgtcactcccagctcccaggcagttccatcctttttattttttctggaaggcagaggttgatggcaagagctctgcattcagcctgcctttgttcacattccagctctgccacatcctgtgtggctttggtgagtgacccaacctctctctgcattggtgtcctcctctatgagtggggtggtaactccttctccgggttttctgaggaataaatgaggcaataaacaggagactcagcatcagaccagggtatcattattatattttacagggagagacctggttcccagtactttggcttgtccagaatagaggcatctttttttccccaatcaatgttatagttaaaaaatacaatatgaataaaatctatgctgatagagaacaatctccgagatgtactctgaagtgaaaaaagcaaagtgcagaatagtgtacaatataggccaacgtggagcatggatgtgtgacctgtgtttgggatggcacaaaagttactggtaatgggtgactgggaaggggagccggggacagcggtgcgagagagcttgacttttcattctctagccccttgtaatattcccattttaccaggagtatgtattcctgctttttttttttcattttgaacgtgaattaattttttcagtaaaaaaaaaaactaattcaaatatccttccctacccccaccaatgataaatggtcattgtaaaaaatttcccagttctgaagagagagcctgaaaatgctgtaccatttcattgctgggtgttagaggatccagggtccctgcctgggaagttggtttgctccgaaattcgttttccatgtatcaccacttaagcatctgtcagggtttaacttgggcgagaggaaagcacccagcaaacacagcaccacagcatttctctctcacacgtgcacgcatgcacacacacacacaacctaaggactacacatgcaaccctcaacaaccaaaccacttcatacccacatactaacaaatgagccacttcacctatccacatccaatcccaaaagccctttacacctacaaacgcacaacgcccaccccaacaaccaagcactccacacaccacaacaacctttacacacatgcacccaatgaccaaagtactttacacatgcaacccagaaatcagaagggcttcacacatctgcccaataagcaaagcacttaatatacacacgcacagagctttacacacatacacaccccaaccaaagggtccacacacatactccaacacccaaaacacttcgcacacacacccacatgcacacccaaacagctttactccttcaaccaaagtgcatcatacacagtccccaacaaccaaaatattttacccccatgcaccccgacagccaaagctctccttacagaccccccttcaaaagccccaaagtgcttcaattggtttgatgcagcggcagatacttgaacaccaagacattagaatgcaactttcttttcagattaatgagcagaaaaagattggaggagggagggagtgagaatggcgggagagagcaattacacccaaatcttttctctgttgattagggattccttctctagcctgctttggctccagctaaatctttttctaatgagatgtggcttatccagatcaaggcgctgagaaaaaaagttgcaattaactttaagaagaaaaagagtgagtgagaaaaggaaggaagagtggagggggcggccaggggttgaggatgggggcagggccaggggcctgggcgggcaggctgggaggagcccagggtctggagcaggctcccagcaggtggagaggcgcaggcccggctgtggttctggagtttagggaacggccctgtgatgcctctgccaacctgagtcaggcctcgtggccacttcaggctcaaatcaaggtttgggaatggcgagtgccctcgggtttgggctttcccggctctgcacccccatccctggcaatggcctctctcccttctgtctgcctgccctctggaggacatgggccctccactgtccacccagaacctcaggtggtgtccggtcagcactgactctgctcttgggagctggtgggttcagcagtcctccagcggccaggagccatgggcttgacatgtgcctcagcactgatggctgctgctgaggtccccctgacttgccccactctttccatctgggagtaaggtcttgagttattttcatgtgagccacttagaagggtggacagggcctaggactgaaggagacacttcatgtcgagatgctaaaaacacctcaagatcctagaactgacacagattgacctttctgtgcttctctctggataaaatcaagctagacctagctacagctgatgaatggtcacttcctctctctgatgctcagtttcttcacctgttcggaaaactaaagaagtggggcagtggatctccagagtctctgccaacctgacacccccagattcaacagaaggcacagacgcagactccacgtgtcctgatttgagtactcatggttccctccccgactcccaagctctgcttggcacattcgtgggacacttacaccttcctgaaagttgttatctgtgcagagattggtttttgccctatttggcaagaaatatccagcaatgcctgaaggcagctttcacaaatcttgaggtctctaacctggcgcttgtggtggggtctcggctaataactcaacatctgtatgccagccgagctggggaccctgagcctggatcagatggagttagaatgggtggggtggatggcggggggtgcaggagtgggctgcagtctcccttctctttggtcacacacagacacacacagccaggtatgcagaaggggtctgggcagattgtttaaagctgaagtcctttattttcctactgacagcatttccttttcccattctatggatctcccagtgcaaattaaaagggattttgatggcacgctggtgactccgtgggaaaaagtgaatctgggtctctgcaacttgcttggcttccaaagaagcagggcccttgcatgttggtggccacccacacacgtgggcttcctcatgggatgtttgggtgaccccttgccaaataagccatggagatgaccccaggcctgggcacagatgagctgggcccgtctttcctgtgtctaagttctagagaggtcacacaagtccccacctccaagccccaagaatttcttttgagcctggttcccgggtccccagccagccctcccttctgtccctgccctccacactgttagctgctggagacaatctgggctttctcctgtctctctctggctgtcgccaatgtaataagcatatgtgctagaaatcctagctgcagtgctaagttagaaattcttcttaaacatatagcaaggtcagatgaagggaaaaaaaatagaaaacaaaacacaaaaccccgaaacagaaattggacacaggagggcagatgcagactgaacaggaagtgctggcccgaggctaaatgaaacagctgtcaccattgttctggactaaaaactgcctttgcaaactccatgcggtccaggctcagaaagcagatgttaataattacagcacatgaaacgaagggcacaggattaggcaagtgacgaaaaagaaatggtaccagtagatttataactcgcctaggcaaatctgcttgctggtgtggggggtgggctgggcggcttccctgcagaggcccctcctcaacccccttcctagtttggcattttggcttccgggatgatctcagaatttggggattgttttatggtggggggccatggagacccattcaagctgcctttcccgggaccccatgcctgcagggccatagccggttgcctctgacctacaggaaaaaggataaaacccctaatgctcagcccaggtaccaaaaggggatctgtgggcagaaaatagttggatgggttcctgaaagcagggactcatgtggacacaaagctgggcagccattcttggagctcttgcttttaccaaagagttcatgtctaaaatccaggagctcaagttctttgcagcagaaattgattcgcactttaaaatcagccagcccctagcgtcttggcaagggagctcgggtagaatgttgggacacttgaagaaagtaagcaaggcgagtttcttgggctaattacataagtagaaaaggcagagtcttcacatgttttctgaacattcctcggtgcttttccatgtgagccagagttgtaaaaaacaaaacaaaacaacacactcacatctacaaaaattcctgccatcccaccaccccctagaaaggacgtttctaggaaaggttaggaagaaggtaaagcatgtgtttggcatctttaggcctgatatggaaaccatatgcttatatacactagcaaacatacttaatataacactctcttttattaaatgtggttttataaacgctctccccagccagggcaccttccccatgctggaggctggaacttggcaaaataatcttcccgctgttacatctatggatacacattttttgaaaatgagtctcggacccttggaaaatagactggttctgattattattgcaagagggaaggggcacacgagggcatcttttttcctctgataaattaaaagaactgtaacgggtgctttctgcaacctgtaaaagggcagagccatctgtaattcatttagcagctccttatagaagatttatttgattaattcagtcagaagagagagtatggattttccccttctctgaaaggcacatatacactcacacatgcacacatgcacccacccatgggtagacatctcaggaatgaaaaattactaatcgtattattggaactggtgaacgcggggcctcagtggtgagatagcaagctcccgccctgccgatgggagggccggtttcagaagagatttaatatcctcaggcccagtgccaccaaagagtgagcccagaggataataccgtgaactactggatcgctttgcttaggcattgattactgagtgccaggcactgtgttgagcattttgaatgcattatctcattacatcatcacaatgacccttgcgggaggtactgtcgccatcaccactttatagactgggagacggccccattcccagcagccctcagctcaaaattcttttcactttttccagcggaattttgctttctcagtcctccgtgcctacagcagacagatggaggccacgccttacatttatctagtggtgggtgatcttggaaggggttatccacattggctatgctttatccctgtaggtttcagttcagtgctgattagagaaacactctcctttaggcttatctctagtctcaaggaaagctctggcctcctctggccttggttgcctctaacttacgtgacccaaccctataagcaatcatctctagaccactgtcaattcctggtcgggggaggtggcaacagcccctgagagaggtctttgcaaagggcaaagaaaacagtacaggtgagaggaatcataaaagcacacaagatctgagccaaagaagactatggatgtcaatgtcaagagtggcaaatatatggtaagtaaatgtgtcactgctctctttcccttcctcacagcagacattgctaattgatcccagctctctcttctactaagcctcaaaatcctcaatacagaactctacgcagcctctaccaatagattagaattagcaaaaatagttgaaagcagtttgcagtccctttcagttgaatgtttcattttgtggagggagaaacaggggcccagatagaataagtcagctacaaaagcagtcagagaaggtcagtacccagcctcagatctctggctttctctgcccggtattttcagcatccacaccagtggggctggtccaagccagggtgcagtggatcagaaacctctctattttgctgggtctctgctgtcaccccctccctgcaatagaacgtcaccgaagctgctctgcagacaggataaaaggcatccttttgaaggcggcagaaaattgaaatctttgtgactttaacataattaaccccaaaccaggatggagtggggcagcctgagcccatgatctgttacaatccagggtctaagattctagaaagaagtagaagttttcattttggaaatactggcatcagtagacactcctcattctctcactggctggaccacaggaaatgcctagatcaaaggcaaccaggactcaataggcttaaggtattgagggcttgtctcggctgcagggctctcaccccggccctcagacttttcagctgggcggaatttctctgtggaaagaataacaggattttgtgaaaggaagaaggaggcttcaagttcagaagttccctccagagctctttcctgctgctcccttgctaggacctaatcttcaatgtttctcagcctgacgtagctcaagggggattttgtggctcactacttagttctgttgaatatctgattggtggagaaaagcttttccatagaagaataagactgagtaccaggacttaggttcagagaatcagagggtgagtctgaaatccaacatattttgaagggaggcagtcatggccctttcagtatgaaaagcgttttcactatcccattggcaggggtgcctgtggggtctttagggggcctgcttaaagaatagacaagtatcgtgtgcaacttgcctctcagccctggggttgatcctggtactcctgctatttttgaggaggcttgaaaacactttgtttaaaccttccttctacaatcctgtgtatactatgaatttccattatctaaaaagaaaattttgctaactgaatcaaactctagcccagcccaacttcttgaaaagatcacaaatattggacgagtgaggtcccagatactgaggattttacagggcccaaatactgccccttgagggggtttgttgaccaacatcatttgttgaaagaagatgcttatattacagaagtggttttccagaatgttcctgagtgggtgattggacagtccagagaaggagccaagttgcgggtcaggtaatgaagagaggaggtcctctgtgtgccttttttttttttttgatggagtctggctctgtcacccaggctggagtgcagtgtcataatcttagcccactgcaatctcccccttccaggttcaagtgattctcctgcctcagcctcctgagtagctgggattacaggcacccatcaccacaactggctaattttttttgtgtttttagtagagacacggttttgccatgttggccaggctagtctcgaactcctgacctcgggtcatccacccacctcggcctcccacagtgctgggattacaggtgggagccaccatgcctcgcccctccctgtgccatttctgattccacttacggataaacgagcaggctgaggtgcatatgcattaccctgaagacacaactcaaaagaggactgtgtgcctctgggaattacactcagtggccaaccagatcttcactagatgtgtgattttggacaagttagataacatctcctatttccttctctgtaaaatagcagtaacaaaaagcacctaactcacaaggttgttgtgaggattcaatgagataaagcacttagaacagggactggcacaaagtaccaagaaaatattatctccacaatctccatcagctgatgaatggatgaagaaaatgtggtctatcaatgagatggaatattattcacccataaaaataaatgaagcgctgatacacagtaccatgtggacgaacgtggaagacattacgttgaatgaaagaagccagacacataggccatctattgtatgatttcatttatatgaaatatctagaataggcaaatctacagagacaaaaagcagaatcatgatttcttagggctggtaggggtgggaggacggggaagtaacagctaaagggtatgggatttctttttgagatgagggaaatgttcgaaaatggactgtggcgatggtggcacatatctgtgaatatactcaaaaccattccattatatacactttgaatgacttgtatgggatgtgaattatatcttaataaagctgtttaaaataaaactttttgggccagacgcggtggctcaagcctgtaatcccagcactttgggaggctgaggcgggtggatcatgaggtcaggagattgagaccaacctggctaacacggtgaaaccccgtctctactaaaaatacaaaaaaattagctgggcatggtggcgggtgcctgtagtcccagctactcgggaggctgaggcaggagaatggcgtgaacccgggaggcgcaggttgcagtgagccaagatcgggccactgcactccagcctgggcgacagagtgagactccgtctcaaaaaaaaaaaaaagaaaacttttttttttaggtgagtgtggttacgaaaatgggatgatggagcctttgacaactgggcaactggggagtggatgctctacctagagacattcagatagaaaataaaaacacgcctgcgggccaaactcagcctcaatttcctcatcttctagacagacagaagttcctccctcaaagggccgttggaaggaaaaatgagataattcatctacagcacttagcatggagcctggcatattccaggcactcaggaggtagcagtggcattgccattattcttttagactctagaattccatgctggaggagtttggggggcagtctgattggaaaggaagtgggtaactaggggtcgtgtcttgaagctacatttgcaaatgaagcctactgcatcagcttaggtcatatgttacaataaaaaagacatttgcaaagttttctaaacatgcctttattcacactgtcatagtgttgaaaacacacctgtaatcaaataataacattgttaaaaagttgaagtgtctttgatgagaggcccatgaggattttggaggaatttgagtctccctgatcgctgaaaactgatgccataggtgcctgattccataggtgctaccactgtcgttagaattaatacttaagtgaccacctgtgaagggcactggacagagtgaagaggctgggttcttgacctgacccagccactcaccaaatgtgcaacttaaggaaaatagtttaatttccctggacttcagtgttttcaactataggatgagaagatggtgggtgcaacctctgaatgtccttcaagcaaaaaacttcagaatccatgataatggcccaaatcttatcgctgcctaggtaagccagactggactgtccgaaggatgtctcccatagactggaacgtgtcccttctattccaagggtcttgagttctagattctaggccaaagctcacagcacacttgctagagaagagcctcaccactacctccattctgattcccccttaggctgaagtgccaacatagttaagcctctctctggggctggagacacctgaattgaacagtatcacccctaaattcatgtctactggatcctgtgagagtgaccttatttggaaatagggtctttggagatgtaatcaagttaagatgaagtcatactggattaggttggctcttaatctgatgattggagtcctgctaagaagagggaaatttggaaaacatgacacggagaagagaacatcatgtgtacgtggaagcagagattgaagtgaagctgccgcaagccaaggaagtcagactgctagcaccaacagctaggagagtgacatggaacagcaatgttatcatcccaagggcatggccagaatttcgtggcatcagtgatgctgtagctcacgcctccgaacttgcttcacacagtcccagagtaacttctacaccccgccagctttctggtgctccatgttttgtgggccagacaccaactggacagtaccctaaagctgtcctattctccctccctactttgacttggtgctgagcctggcctgtgggtttctgcagcagtgagacaggatggggctgaaggcttggcatttcctcaggcatgagggataacaatggttattgaagaagaatgtctaatgacagaaaagtgctcatggttcatttgttcattcattcaacaaatattaatattacttgagcacccactctgtcacaggcactgtctcaggcactggaggtagagcactgctggtgggaatggggatgagccagtccagggatcctggggctctagggttggctgagattgttctgtggacccctgagcatttttgcagtttcttaatctctaatggagatggtatagttactcccagcaagatcacttgggctgacatgtcaccttcctttgcaggaatctggaatgacatcagctggaaatggtgatgctaaataaatatcttgtggtggtcagaagctgcctgaaagataggactgcagttagaattaagtttttttgtttgtttgtttgttttgagatggagtttctttcttgtttcccaggctggagtgcaatggcatgatctcggctcactgcaacctccacctcctggattcaagcgattcttctgcctcagccttctgagtagctgggattacaggcaaccgccactatgcctggctaatttttgtatttttaatagagacagggtttcgccatgttggccaggctggtttcgaactcccgacctcaggtgatctgctcgcctccgcctcccaaagtgctgggattacaggtatgagccaccatgtccagccaagttagaattaagtttttaaaataggagagcaattagtacattataagtgccttggcttggtagacaaacaactttcaaaatgtagaactagagggaagggccaaataattgaaagtgttcttggggagaggaaagccctttattcaacttaatacattgactaagtttatttaatatataccttagaatagaacctgtgtgctaggccctgtggtcggcgctggggacagcgacacacaacacagagaaggtccctgctcccacggggctgtcgcacttactacaggagacagccaacaggcaaacaaaagccaccttcttaggcactcaatacatgatagttattctagttattcactgtttccagtgaataactatcatgtattgagtgcttaagaaggtggcttttgtcccacacaggcactaccctgggctctggagactgagcaaggagcagcagaggccagctcaggccaattgcttgctgtcctgaaacttccatcctatcagggcaggcagctaagaagcaaatggggaaaaaaaaatccaaacaggaaaaggtcagatggaaacatcaaacagagtgacacggttgagacttccagggagatgggaggggggtactgtagcaggtagtcagggaagacttcttagaggaggtggtctggaactaaggcctgaccaagaggcaaagatgaggaatcccaacactcacttctttcaagaggcaaggtgaaggatggagaagcacgatttctgcctagacttggcaggtccgagctttgtaggaactagctagctttgctttagggccacaggtaggtaaactgaggtgatgtggtctgtctagggttgctcaagaagtcagtggcaaagccggcctagaactctgggtttgggctccgtgggcagtgctctttccatgctgtgtaccatcctgcctctcaggaaatgacttcctgaatgcttttatggacctctggccgcacaaaggatgtgtctctgtgtcaggcgggtctcagggatttccagaagtcctaaaatgtgcatggtgctatgccagaagccacgaggagtgtgacagtccaagctatgagggatctacactctcacaggaagatgaaagcagcagtatcagagggtgtgggtgtggatgtgacagtgtcccatcgtgctgctgagagaagcggtgggttgaaggggctcccgggaggagaggccacggcagttgggctgggagcttaacttctcatttactcacagacaacttctcagcccgcatttcaccggccccccagcccccagcatgggggcccagggacaggaggaggtcttggcacagctggggctggaggcctttgcttgagccctgggttgaggtgtcttcgacctgcagagaggtccctgcccagggttcctatgggactagccctgcccctgctcacttctgttccttgttgctgtgccaccgccccccacaccccccggctggctttgatgttagtcccactcagcctggcctcctgctgcgacgccccaggatggctctccagctcgcagggactctccctctctgtatcacagcccagatctggcctcctgcttgctgggctgtggcagcgggatcactctggggcccagggagaggtaacgaaggaacaaggtaagtttgggccagattgagggggttttgtaggcctggggtcgctaggcagatgtgctctgatggatgacggggagtcccccattcctggccatctgagtggcatgtgaggcctaatgggggtagttggaaatagtggtcaagagtttccatttcctccctgagtagccatggtcaagttccttagcaatacctgccttgttgactttactctgtgcctcagttttcccatctgtaaaatggcgataataagaatgggcaattcacagggttgttatgaggactaaatgaggatgtgcccggctcactgtactctctctaaactgtagctgtcgttgatgctgaagtctctgctggatttgggaggaattagccctttggagcacagctgcaatggtgcttggaccctctttgctgccttcggcatgacaggagcctgccttccctgtcttgagtttgtgttttcctccttctctggcacttggcccagtttggccctaataacctttgagggaccttcatagctgacccccagcctctttctgctcacagctgcccgatggatcttccagccctgctcaaagtcctctatggctcccaggggctacacagcaaatatagccacctccttagtctttatttaagatcttctgcaatttgacctttgtcttaacctttcagccccatgtggatctggggagtccaagcctgaatttgagtctgggttccactgcatctgagctgtgaaaccttgggaaatgcatgtaacctgtatgcaccgtggttttcttatttgtgaaatgaaaataattactcctgccttgtggacttcacaaggatgtttgaggatcagatgaatggggatgtgtatggtgttcgtaacccagaaagcaactcgctgtttgggggccatacagtggtttcctttctctaggcctttgttcacactattcctccacctggagttccttgtctccctcggttaccattatccaaatgggtatagctatgttcagagcccagggaagacgccatgtctcgtctgtaaagacgccctgactattctgcctgaagtgtatgtttcctacatctgatcctcacacctctcacagacacgtcttcctgtatctgctgtctccttcctttgactgggagcttctaaagggcaggacgataccaaaatcagctctgctttttccacggcacctcgtactccacacacaacaggtgcttgatgagtacttggtaaaaggatgggagagtgtgtggatgagtgagtgaatttggggagagtgatagcgcactgaagccaaaagcatggccccatcccctctgggacctatttcatggcccttgatgactgtgcctaatggacagccatttcccacgcgtggctcaaattttcacaaataggatagatccattcacctctataaggagggtttaggggcagaaatctgattggaagttggggagtgggcttgtctggacattatattatgcagaccaagcatatgttttgaaaaattatgtatatagctgggtgcagtggctcacacctgtaatcccaggactttggggagccaaagtgggagaattgcttgaacccgggagtttgagaccagcctggccaacatggagaaaccttgtcaatatgaaagaaaaaaaattaggctaatgtggtggcaagtgcctgtggtcccagctactcgggaggcttaggtgggaggatcacttgagccctggaggttgaggctgcagtgagtggtgattgtgccattgcattccagcctgggcaacagagcaagaccctgtctcaaaacaaacaaacaacaacaacaaaaacctcaaaaaaagcccaaatcaaaccacacacacaagcacacatgcatcatcccttcaatgtgggcatggcgggggtcagaggcacatcacacaactagatcagagagtcggggtgagtcagggcaatacctccctcctcccaggttggggtaggggaagactggggctacgtgggagctgaggaagtgactcttggtgacctgaattatgttccacacttaggagcacctgatttattatcagggactgaaacacacaaaagaacaaagggccctggggacatttgtgacccatctgctccttctccacattgcaccaaggcactgcactctcagcagttctcagtgtctttgcatctttgcgggagcccctcctcaacgtccccctccccacccgccccacttacattctagggccacacattcctcaggccgtgctgaatcctaagtattttaatgcctgatatctatctccgtatggatttttttttatcatgaggccactggaaagttttttgatatctctttgaaacagatgtcagcaaaagcttccagcacagatcaagggcaggttaaggcctttgagatgggtctgaatgtccctttaacatcgttcaatctaatacccaaatatacctcgagtcattaccctgtttttataagaagctctgaaccatatgttcgggaactaattaagcatacaaatcaagccctgggatcaggtggcgctctgtttaaatatcttaaccttttatgattatcttaatttagagaaaattcaaaacacattcagaagtcttagaaaatgagttcactaggaatttactggccggcttttttttcttgatgttgggatcctttctttacaagtccagccgagattcctggggaagtcctccgagctcacacctcccaggaaatgtagacatttgccggcctggggggcccaaaaggccacacctgtctttaccttccactagcagcctctcccagccagaaactccacctgtccccacctcccagcccacatggcccccatttgccagaaggaaggggagaaaaaccgtggactctgcacttggaagttttgccttccttttagataaaataaggtatgaaatgagttggggggaaacattcctgcagcccatgttattttgggggaagccatgggaggagctaagggcagagactgaaatgtgattgcacaaacctggctccagaatggctacaggtggctgagagggaagacaaaagctggaaaccatccttgttttagattctgggtgattctagcagtgggaagtgtgggctggggtagcagatggggatctgtcttctcacctacctcaggcaaaggagatacttgatctagaaggcatgtctaaaatgtgtacacataccaaattgaattgacttgtgacaagttcttctaatcttttacctgctcagccaatatatctttattgagcacctactatatgccaggtctgttctaatgtctttacaaggacattaaactgcctttgacacaagtgcccagtttacttacaaagactggactggatctcaaaaacactctttcttaatgttcttaggaccagtaaacctttacaatagggtttccagataaactgtaggatgttcaagtttaaatttcagatgaacaacaaatacttgtttactctaagtatgtcctgaattttgcatggcacacacttatactaaatcattattcattgtttatctgaaatgcaaatttagctgggtgttctgtgtgtttatttgttaaatcttgcaacctgactttagaaaaagatataaatagatatgggtgctgtctcaatcttggatgttaaatactaattttggaggaagacaacagaaagcagctttgtgcaaggcccccttacatatgtgatttgacttagacctgtattagtctgttctcatgctgctaataaagacatacctgagactgggtgatttataaagaaaaagagatttaatggactcacagtttcatgtggctggagaggcctcacaatcacggcggaaggcaaaggaggagcaaaatcacgtctcacatggtggcaggcaagagaagagcatgtgcaggggcaactcaccctttataagaccatcagatctcatgagacttatgcactatcatgagaacagcacaggaaaggcccaccctcataattcaattacctcccacctggtccctcccacaacacatgggaattatgggaactacgattcaagatgaggtttgggtggggacacaatcaaaccgtatcagaccttatcacaactctaggaagggggttctgtgatcatccccattttgcctgtgagtgagctgaagctcagagagcttgagggacttacccaaggtcatccagctttttctctagcccagctctgctggactttgaagcctgggctctttacagtgacaagttgatggttatctttccagagttcttattttcctagagctttccctggcttctctcaacttcttcccccctttcccacaaatatgcaaggagagattcactcccgtcagatcaatgtcactgccataatgaaaaccaccacccgagttcatgaaggacgagatctgtcgaaccctaatgagaatggttccaattatgcaaaaagcaacctcatggttattctaatgttacaagtaaatagaaaacatttagaaatacttggcttggatattttttttaagtacagatgtctgactctctgccagtttgttattaaaaatgctacagtggtttgggtacaaagattgttataaaaataaaagctaatgcggtctgagcacttgttttgcctttgtggggacctcagccacggtaaggccaaaggagatggtggctagtggtggctcttaagcaggcaccccaacattcatagctctgttagtgccctgcttaaaatgatgcaggagcttcctggtgtccctcaaatcccgaatctgctcctgcagggttccagccctatctgttcccactccctcttgcttactggctttttctagctcatcatgcatttgcacttgctgtgtcctccacctggtgtgtttctcccagcccttcacctcgatggctccttttcttcctcggccttcaggtcttctctgaccagcttctctgtatggctgtcctcttgcctccagttactttctattgtaactctctgcttatttcttttatttttcttataactctctgaagttatcttgctcaccttttgtctttcccaccagtaagtcaaccccatgaaggaagggaccctgtttgtttcattgacacacatcatcttcaacacctagaacaatgttaggcacatagtagttgctcaataagtatttgtcgaacaagcgaatgcatctaccaaagcacctgaagtcttgcattgcttaatcccgcctggggccacgggccagaagaaaagtagcagcgtctacagttttttttttttttttttttttttgagacagagtctcactctgtcacccaggttggagtgcagtggcatgatctgggcttactgcaacctccgcctcctgggttcaagcgattcgcctcagcctcctgattagctgggattacaggcgcatgccaccacgcctggctaattttttgtatttttagtagagacagggtttcactgtgctagccaggatggtctcaatctcctgacatcgtgatccgcctgcttcggcctcccaaaatgctgggattacaggcgtgagccaccatgctgggctgcatctacaaattttaatcaactcaactcatggaaaacaatataacttgggagaatcctaaactcctgtgaatgatggttttgagtctagcaggagtttccaagactgtgcttcaaaccatggcaatgaaaaacttcattgctatagcatttgcctacgtgtagaaggtgaagtgtaaacagaaaactgggggtgttcaaatgcatcaaggaaaacattgtcaccctaataatctttcagacaaatgtgttgatgtgaacagaaccattttggggtcatgggagggggatcactctttagaggctattccccttagcttggcattcgagactttgcacacacttgctgaggcctgcctctcctgatttcttctgcctctctccctgcagcctgctgtccgttggtcccgggttgtcgtcacacccccactccttgcatgctttcccaggcttgctcctttatcttgctctgaagaatgctcttccccatctgtgcatatccaaagcctaatcacatgggcctggttcaaaggtcgtctccaccccaatcttatatctcatctacctctacctggtggcagcctttccctcctttgaagtctctgggcatttttttttcttttcttttttgagacaggatcttgctctgtcacccaggctggagtgcagtggtgcaatcatggctcactacagccttcacctcccaggctgaagcgatcctcccaccttagcatcccaagtagctgggactacaggtatgcaccatcacacccagctcatattttattttctgtagagatgggtctcgctaagttgcccaagctggtctcgaatttctgggctcaagcaatcctcccacctcggcctcctaaattgctgggattataggcatgagccaccgtgcctggcctctgggcaatttttttctttttctcatcaccttctacttgacatcaagcctgacttcaagctgctaaaggacaggaactgtgtctcatttttgtgtcctccactgccccagcacagtcatttttgttaatagtgagttagtgatgctttttaggatacacagccccaagtcttcagctcccgacaatagtggtgccgtgtcaggaagctatagccaatcggagtccataacattacctgcccccaccccaaggtgtgaaggagaagtgatgtggtttacagtgtggacaatgtaaaccagtgtctgcatgaccccacatgtccagatgaaagacccagggggccaaagatccagaaaacagactgaactttcccttttccattcagatgttttcctgttgggtggcccaaagcctgaaacggctgaattcctgggcgctctataaacctctcccattccaaccttcccaaatgttttcttccaaaactctgtccaaacaaagaaacaaaaaaaaaaaaatccctcaagaaactcaagtgctaacactgaacacatgagcccaagaaccagcggtccaaggggaagcaaataccctgtttttgccagacaaacgttgtcaaatatatgagcatgcaaatatatttatctcaaatgagttacaaggagagtcgcacagggtccaaagccacttgcaaaagatggcaatcggttttgaagaatttcacacatattaagccaaggatcctccctttctgcacgatctaggagatttggaagtgttctgcgagcaatgtggttttcaaatgaggtccagtacaagcttttgatctatataggatagtatgaattcatacgcagtactgatgaattgacaggccacatttaaacattcccctcacgtacacaatctggatttatgattttgtttttgtgcacacatatcctttgagtttctacatatatgacacatggagaggcaaggaaggaactcctggtaatctttcaaaggctgacacccaagtgtgatcttgacagctttggggtcattgtcatatttttgacaagcaatcgcactgttacagagggagctagtaaaaatgtttccctgaactcatcgtggattgcaacaggaggaaacactccatcactggaaagtgacactaatgcattctattagatttgcttatcatgttaaagagcatattaaaaggaaatgtttggaaaagagatgccataacttggtatgatgggttgaaaattcctaatttggaaaaaatgtgctaagacaacatgattgatgtgagtgacctactttattttataagaaagtatgagttgcctcgggcccattggtacacatatttggaaaaagttgttttttttccacattaagtttttattaacatttcaaaagagcaaaaacaccatagaaggatataagttgtaacttgtcaatgcagatgtgtttgtagccatttgctgctgagaaaaacatatcacccttgctggaagggtttctgaattaggtgagtttcttgccaagcgaacacctgatggggagaaatatgacagtcttttccctgataaaaaatgacagggaagaggtgtttttatttaaagcacaaatgactcttctgctacttgtaggcagtgatctcttagagtgattaacatttcatggagcctcccagccacctttctgtgtaggtggcaaaggattggggctgagttaaccattttagctctgcttgagaagatggagttcaatgccctcatcctgttcctcaaatgaagtcccttggtttggaagtcaggagctcttaggtttatctcaggcaacagaagggacagctgagggtccagcagagggttggtcctctcaaaatactctgttaccattcaatcagtattgccactgagtttaagacctcaggaaatgcctatggtacaatgtttactgaagaaagtaagattaaaaaaatatatagacctggcacagtggctcactcctgtaattttctacattaaaaaaaaacaaacaaaaataagaaattagccaggtatgatggcacatgcctttagtaccaactacttgagagctgagcaggaagatggtttgagcccaggagtgagttcaaggctgtggtgagctatgatcatgccactgtactccaggctgagtgatagaaccagaccttatcttaaacaaaacaaatatcttaataatgtaagtgggagaataaattggcacaaactttctgaaatgcaatttgtgaatttgtcacaaaagctttagattgttgcatacctttggacctaaaaattccacttctagaaatttcttctaaaaaacaactatgaatacttataaagatatagctaataagatgtttactatataattatttataatattaagagatagactcaacctaaatgtctgaagttagaggattgcttaaataaagtcatacaattaaaacagccattaaaacgataatgtgtaatgtataagagttatgtggaagaaggtttgtaatattttacaggaaaagtgggttataaaacatgcatattatgatgctatttgaaaactatacatatgtctacttaatttttagatatctacatatgtctactgcagtagacatatgtatagttatgtatatattcttatactgtctttaactatatgcatatatatgtgaaggacatttatcaaaatgttaagtgtaactatttctgaagagtaagtcttccaggtagtttttgtttctttccttttgtatgttttcattttctatgctagccatgctttactttgataataagtaaaacagttattaaatgggaaaaatccaagagatttaacaggttacttaacagaaataagagaattcacaaggattacccggcacaaactagttttctcatataatagtaaacaggttaaaatataaaatgagaaattattccattcactatagcaaaacaaaacaaaacaaagcataaatcatccacaaaactgaaaatgcaatgactaattcatgcaagaaacatccaagacctatttagaagcaaataatgaagtacatcaaagaaaatctaaataaattattgtgtttctggttggaatgaccaaatattgtgaagatttcaactctttcccaaattaattcatacatttgatacaattccaataatggttctgattaaaataactggcaagttgattctaaatattatctaggagaacagatgcatgagaatagttttcctaggtgaagaaagatgagagcagctttgccctactggattttaaaagatattacaaagtcagggtcattaagcagtatgctaattttgtaggaatatcaaatatgttaatgaacaaaatagaatgcagaatagaataaatagaataaaatataagaatctagtatgcgataaaggctgtatttcctgttaatggagaagggctatattgttctgcagatgatgttggaataattagttatccattaagaaaaaaaagtgggtcttcacttcaagttacattcacagaaaaaaagtccagatgtattaaagacgtacacattttaaaaaattataaaagttatttaaaggactaaaaacaataatcccataatcttgagaatgagaaagactttcttgaagagagataagcctcagactccataaaggataaaaccaacaattttgccggcataaatatttaaatctttggtatgagaaacatactatgagcaaaggacaaactaggaaaaaaatgcaacttgtatgataaacaatagattaagagctttactatataaagtgctgttttcagataagagaaagattatcattccaatagaaaaattgggaagatagaagcaaagctttttatagaaaaagaaatatgaacatacaaaaaatgctcaacctcactaataatcaaacaatttaaaattagaacaataaaatattattttcactcaccactgtcaaaagttttaaaagggaatgatcatatttaacgtattatgagtgtagagaaatactttgatgcagtaatttcatctcagggaatttactctgtgtaaagattcagaaaagggttccaaaagtctggaatcctatgcagttggttaaacaaatgaggcagacctgtgtactgatggaggaaagtctgaggtatatcaacacatgaagagaactggcaggaaaacaatatagccttgtgatcccaacttctgcttaataaacatacatagctatttgtatatataaaataatttttatagcagatgttccatggcagtaggattagggggtgatatggtttaggtgtgtccccacccaaatctcatcttgaattgtagttcccataatccccacgtgttgtagaagggacctggtggcaggtacctagtgggaggtaattgaatcatggggatggtttcctccatgctgctgttcttgtgatagtgagtgaattttcatcagatctgatggttttataaagggcttttcctcctttgctcagcacttctctctcctgcttccatgtgaagaagacgtgtttgcttctccttccatcatgattgtaaatttcttgaggcctccccaaccgtgtggaactgtgagtcaatcaaacctctttcctttataaattatgcagtcttgggtagttctttatagcagcatgagaatggactaatggcaagggggtgagcggggagcaccttcatttggactttctcctcttctgtcgtattttaaaatttttaggatcatatatcacttttgtaataaaaagcaacacacatctgacaaatctgcctagagaggtgaggtgacttgcctaaggttaatagcacatgaagaccagaagccactgggtctcctgacacccaggctcttagtgcccccaaagagtcccttcttcttattgaggaacccatgggaccatggcatagcctctctctcaaaggagcccacaaatgtcctaaaaatgctatttgcagcctcctatcaggctgcagatcaccccatcccctgggcactcttggatgggagaagtcacatatgcagcattgggttgatgagtttcagggtgggaccagtgccctcagaagtgcccatgccaatgccagcttgcccacttgccttgtaaggaactctggatggccccctgtagcccacaagtggtgagcaggccagggattccttccccaacccccatgactgcttttgcacccaccatactggaaacctcacacaacagacctggcaaagcgggatgggtcagttaggaagcaggaagatgcatcacttcaaagtacaacaacattagcttatatcttaaagtgctttataatttacctttctacccatcaccttgtttgatcttcagaatcatcatctgagagaagaacaagtgtaattgttatcattcccatttcatggaaaaagaaactgaggctcaagaggctgagccactgacctggtcacatagcaaggaagtgtggagagagaaggagaggttgggtcagcttggcacaaattctccacttttgccacattccctcttttcctctctcctgagtaaactcctacccaccctcagcccatggaagcatgttccccttaatccagcttggtcttggccagggcactatggcacttcttgccatagtacagtttgacttctgaccccagcccctgactcagtgtctactgcacctgggcctccccagcagccttctgctccttgggggataatactggttggggaaattctctggagcccccagagaagggcacagatctgagggttctctaactgaggatactgtcctgtccaggagagcttctaaccactcacatcctggtctgtaaggatgtgagtggttagaatcatatatcacttttataataaaaagcaacacacatctgacaaatcattccattgattcacacttgtgctcccacaatctagcaaagcacctggcatacagcaggtgatcaataaaagtttactgaatgagtggagtggccagaggaccctgagtcccatcaccagtccacctagaactcctgtgacttcaggccatccctgtccccacgctgagactctttattccctcctgtaaataggtgtgagttagtctctaagaaccagaagccacccagcagaggtagaggctctaccagcattacatttagaataaagggactggaggaacagaggccagttttacccaagagatccagaggcagagagtggagagggatccccacacatctattctgagtccagttctgggaaactgtctgagtgtctagcagatccaccagcttcaacatcttcaagaattggatgccaccacgagcagctccttaaggccaggggatgtgcctccttgcttctctgtccccagcacacaagcaggtgcatgtaaatgaatgcatggatggagggctcctgtaacaacttgtcataatagaaatcaaaagtttgggacaggaaatgacattataggccatgtggttcaactccttccactggagaccaagaaacagcaaagacttgcccaaggtcacagagagagacaatggaagagatttgggtgggatacattagctggttttcagggatcagccaaagctaaggccagcttgcttgagttggttcagaaaccaggggaatcctgttgggagccactcctcacacactagaacccccacattggctctacccaaagctcaattactgctgggagaggccttatgctctcataatgaagtcatatctatggcaaagatccttgaggctaacaactgtgaaataattacatgtgcctcagaactgggagatcaaggatttccatccaaaatcccatgatgctcttaaaaaaggtttcactataaactgcaggaggggtggggagaggcgagatttccaagccaggttgccatattttaattccaccttttatgtgttggcatcatcccatctatgtgtatatctcactccatagacatattaaaacaacatcaaaggagattaaaagagtaacaattgtcatccataatcatattgctataactaaattatacccacatgcatgtatctgtctccctgttcaattatgcaagcaatatgtgaatgtattctcatcatcagaaatcaagaagtatacattgtagtcagaataagtaccatgaccacaccaattcctgcaagttcccctctcttctcctgaagcaatgcagttgtcaggttggtgtgtatttttccagaacttttctctgaatttatatcaagtatacacatataactatatattagtatgtgaatacacacatgcacacacacaaacaagcacaaacaagtagtatttattttaagcattaatgggatcatatcatgtattgtcctggagtttgttttttctccccttaatagatcttggaggtctttccatgacactacagaaaaagagctacttccatctttgcaatagctatattacacagttttccataatatggaaacatacttaaaaaaaaagtccccattaaagaacatttagtctcttgggtttccaatttttcaatatttcaaatagtgaatatgcgtatatatatatagagagagtatatatatatatatatatagtctatatatatactatatataactgtatctatataactatatatataactacatctatataaccgtgtgtgtgtgtgtatatatatatatagagagagagagagagagagagagagagagattcagccttaagcactctctctctctcacatggctgatcaatctttttattcatgtctgcagactgtcctgcttggggaaatgtcagctccaccagggtaaagattttatctgcttttctccctgctatatcctgagtgcctggaacagtgcctggcttagcacacaagaaatatttgttgaatgaagaccagcaaggggagaacatagccgcaaactattttaacaaataatgcttgtctaatgcctgcattttccaaaggcactttgactccctaatcacattctacctgcagaacaaccgtgggggctcagtagatcctgcgtggttaataccccatgctgaattgtgttctcaagtcagggcttaggaaacagacagagaaaggttcaaatcctagctctgtcactttctccgtgtgtctctggagaatttacttaacctctgtaagctgcaattttttaatctataaaaaaatggatatacataccttcccttgaaggattttatgacaattaaatgtgttcttatatgtgaagtacctgaaatactgtaagcacttaataaatgcttgttctcttttgtcccttgctcagtatattctttctacctgctcaggtcaatcacccatggccctccttgtaatgtcttactgtctaccaattactgaaataccttacagtttttcctaaaaaatatcctggtatatcagttttcctccaccccacaggagtttcttgggaaagaaacaaaagaaatattttcttgtctgtgttgtttaaacataacatcagtggctttttcctgagcattgtatgtttgggcacttatcacgttcaataatatttagctgtctagttccctaactggttctcaagggcaaggaccatgacagactcaattttttaaccctgttaattacaggtcaattgcaaatttccttataaatggtaaatgctcgatactggtggaactaataaatgatctgaaaatactataaatatctgattttaagtgatcccatacgttcatacttctgggagcacagggactcctaacccactctgctctcatgatagcacccaagctgtcctgagtcagcttcatcatccagtggttgatgtggggaactgaccttttgtttcttttccagtgttggggtttatgctttttccttcctccacactcagtcaaatccccctctggcagtccttctcctgggtttacataccttttaaatgttcttttcttttccctttgaaattgcaagttttctcacctctactcccttcagataatttgaaagtcaaaaaacaatcaacccaccccaacagggcttgagaagttaaactgtaatggtcttattgtaaaagaaagagacatttggaaatagtgtcagatccagggccattgtgcccatgaaccctgaaagtctacctaaaggtctgcatctaattccttaccccatcagccctccctgctttaaaattcctttccccttgccaaccgacattcacttctatttttctgttttgtttaactgtgacgacctctatcacaatgtctgtgaagattttattgtacttatgtatttacaaggttagtcttcctcggctagcttcttgagggaggatatcataggacttttcatttttgaatttcaaatgccaacacagtgtctggcagataggaatatttttgggaaaaaaagaatattgttttcctctaattttttttttttttttttgagacggggtcttgctctgtcgcccaggctggagtgcagtggtgccatctcggctcactgcaagctccgcctcccgggttcgcgccattctcctgcctcagcttcccaagtagctgggactacaggcacccgccaccacgtccagctaatttcttttttgtatttttagtagagacggggtttcaccatgttagccaggatggtcgctatctcctgacctcttgatctgcccgcctcggcctcccaaagtgctgggattacaggcgtgagccaccatgcccggcctcctctcattttttttttttttatgacacacaaccactatcacttaggaaacacagtttttcctaaagaatctcctagtatatcagttttccttcacccaccaaacttaaaattctgtatttttatgagtagacattgaacagattgttttgggtagcatcttgaccaccatttataacattgcttctgagagaccacattctgagttccagagagtggctaagaaggaaacttttggaatctttttgaaagctaaggccttttaccttccttcctgactcaagcacggattctcgttacattccaagggaccctcaccccatcaggaaatgcagtgcctcactgtgaacgtggcagagtgacagcattaaagaagagggaggctggcaagcggtgaggcccagcaggaccttaagattgtattacccatttaaggatccagccctcttggatgtacctgcagcctgcctaggagggcctctgagaggctggaatggaggggagccaaacctggtcttcctctttgtaaagctccaggtgttgtgtggctggtgttagctcagcatctcctgctttttaggtcagtcttttgctacttcatctctcttgtttgtttgtttgtttgttttttgatataatatttgtccaagattctttctttttctttatgaagatctaaacatttacagtaaaatactttaaaatcttaggtttgatgactttttgcaattgtatacatccgtgttaccatcacccaaatcaagatataaaaccattcctggcagcccagaaagtttcccgggcctttcccagtcaacccactccagaggcaaacaccattctgagttccatatccgtagatttattttgccggttacctcacataaacagactcacatagcctgtttcttccctttcagtcactaaaacaacaatgacaatgttgttagacatatctaacaatattagatgttagacaaatgtaataataacaatgtataggcataacctaattccttttttctttttttttgagatggagtctcactctatcacccaggctggagtgcagtgtggtgtgatctgggatcacggcaacctccgcctcctgggttcaagctattctcctgcctcagcctcctgagtaactgggattacaggtgtgtgccactacgcccggctaattttttgtattttcagtagagctggggttcaccatgtcagcttcctaaagtgctgggattacaggcatgagccaccacacccagccctaattccttcttttttttcagttaacatctcaaaatgtttggcagtggtgacccccacataggggtaatttgcatgattgttattgacttctttacacattctggcataatgtaaaaaaaaaaaaaaaatatatatatatatatatatatatatatatatatatatataacatttcatgataatgaggaaaaaaagcttcttcatggggtaggagagcatagcttttgtggagaggtaaacaagtgagattcagaatgagcctgatgagggagctttggttgtccgagggctgagaacatccttcccttgcaggcttttcctggtggcaggggacttcttacagtatcttaagatcagagaccccttgagccacttcctgtctgcattcttgtttgtctctttgaacatggaactatttgaccaaagaattccttctgcctcaaattcttcctcttggatcttagcaaagagaaaacattgtctaaagcgagagttaactgtactttgaaagtcatgaaacacacacacacacacacacacacacacacacacacatacacacacacagagccataccattgaaaacccttgaccacacatttgagtttgagtgacacaagtaaggcaaatggtaatagagcaaaatatagagttatccataaaacctatacaccattgagtataggtctctcagtatcatctgaccacagataaggggcaactccttgttctgtttccttgatggcttcgcagtacaaatgggtacatacatggaaaaggtatgagtctcagagaggcaataaatgcagaaaaagttgggtcctgaaataatatgtgcaggaatacttaaaacatgaaaaagagaaaacttagcaatttcacaacacaatgcaaggtctaacttcattggttaaatggtcccatatgtggtaatctacaaagctgggagacttggaatgggacagccagggctctgcgcacaatggatggggagtgagcaacttgtgcaacctcgttgagtccattcctgcctctctaagtggggtaataatgacagtgtccacctcacagggctggtaggagaggtgactgaagtgaggtatggtcaggctatttgtaaaccatccacgctgtccatgtgccagtagtctgttgtctctttcagagtcggaataaatgctctggaggggatgtgggatccagactctttatcctatggtcattgactttttggaggactaaagagcaaagtgttgtctccttcctcacccagtggcttcctctttggggaaaggtgggcattttgatatgaaatcagatgtagggaagcggggagaaagaaaagcttttagagtcagaaagacccgggttggaatccagacgtcctcatttactagctgtgtgtgtgaccttggatgaacgtcttaacatcttagagcctccgttttctcatatggaaaatgggaatagacttcaatggatttctgggaggacgagatgaaataaatcctcgtaatgggagctcagcacagtacgtgggactggtgccatcagtgatagaaatgaattatctctcatgtgagatgtcctggcagcagatgagaaatgaaatatagtctatctcgctttcagcacacccgggcagctgccctttaaaccaggatcatggagactcagagaacagggtagaaataaggaacgctggtgctaacacagaataaagttctccactacaccgggcagggacgagatggatcacctggatgcagaaaatgctgcagacaggccagatgtgcccaagcccatctggggaagacccacatccacatggttggcactgcaatccgctcctcatctggaaggcctgccattctgtacgtgttcagaggcctcccagtgctgccagggccagagactgcagccattggggtgaggggagtgggttgttttatttttagcaacaagaagacattctcctccctcctctgatctcagcccctctacccacttcccagctcatcccagcaggtgcctgggagccccttcagggacagagccgggaggtactgtctctacttttccacacccacaacaacctttcccaaggctgggaactggaccagatcccaagtgggctctgggcctcactgaacctcaagttttgccagaagtggggagactaaactgcctgttccaggttttagccaagtttctttgttttgttctacaagatgttcaccaggtaaccgtttgggggtttttgcttttgagaaataaacagcccacggcatcctgacagtctcctctccctcttgcccttttgctgagcctaccctccctacctccccacctcaccagcccaatttccttccccagctcccaagcttctgagttagcagcctcctgtttattaagctgtaaagttaggacggttctcatttctgatcttttctttggctacacctgacttcgtctctttttttcttttttccccccacctccctaaactaaatcacttgcgcggttcttgccttttaacggagcgataacgtgaggacatctgaaattccgactttattttcctccagcacacctggcccctgccctccaacgggaactcccgactgcttgcttattttagctctcaattggtattaaaagcagactgtagttgggaccatctgatctgtaaacgatgcaagccctagacagcttttcccagtccggggtagggacgggcggccgcgagctggggcagaggacctgcgggagcccgcgcagcgcctccgctctgccaggcccctccgcatcgggcacccaggctggagccctgcagtttgtcgtctggagcccggaacccgaggtgaaaggcctccgctgagctcccagactcctcagccgagcatatgctgcactcctcacattcatttttaattcatgacatcagtttagggatcactagagcctctaaacagcctctctcaaaaccaaaacaaccaccataacacaagcgaggacaggagacggccgcggagtccagaacatcagaacatcggctcctctgtccccggggaataaacatttggaaaatcactttccaatggggacctgctgtccctcacagcagctaccttccccccaactttgtcctagagccgacagtggactccagggtattttgctataaagacatagctggtttcaaagtggcttcgattaggactttataaagttacattaaaatgatcaaatgcatacttggagattaaaggctctcccaaatacattcacacacacacacatctagaattgtatacaacatacattgtataataatatatgataaaacattgttagataagtaatataacaacattatatcggaactggatgttaaatattaatttatgatatgaaaccacataatacatatttatatgttaaacagcatataatacaaacggaacatctatgttatagatggtacataggagacatcgtgtcctctgaaatagcccaggtaccgatctgctccttgtcgccgagcaccagctcagtacaaggcgctggaggggaaggagggaagcacatcagcgtctcctcatagtgatgcagccaccccagccctcaccctatcccagttccccacgcgcccacgtgcctttggggtggatgaaaagatctcaaacgaccagctcctcattggggtaaaggagtgaagagattatctctgatagaggtcaaactccaattgggaggagggcaccaattctgtaaatgacacccgagggcacactcaccaggttcactgcaagccctgagcgttttgcgtttggtgccccgagtgtaagcctaagtattctgtctccgacacgtaaaacaacttaaagtgccattttccaacggaggcatttagaggcaatttgaaaattgaaacgaatctttatatgcaagactggaacgttccagaggccctttaaagctgcggttagaaaggcagttagggaactcaatgatgggctggaaggagacgattgaacgcacagccaaatgcacagttagaaatttgatattaaacacgctctctcaagtaatgcagtttaatgataattgctgcgtgtttactcttcactggttggggaaatagaagaaacattttgacagaaaagttaccctaaagagttacaccatttacaaggggaaaatatctcagtggccgctgctggcttactagcaacccaaaacagtgtgtggggggaattagtttttctccagagctaccgagaaggggaacctcaacatcaagtgtctggcagatgggagtgtgtgttaagcgagggctgttttcgttgggaacgcacagcacagctcccttcctcagagccacctccagacccctcggccctcccacgacccccagttcccgggtccgaggttctgggcgccagcggcggccaccgcgccgcgcgagcagcttttattcgcactctctttaactcgccctttctggttctcttcccttcgagcgccctgcagcggagtgttagacaagccctgttgtctgtgggctctcacctcagagtcaatattatctcagatgggcacaatagactggaatgaaaagctaatattgaatcaatgctgtccctgtccgcgccgctgcgatgccaccctttgttgcgcacgccgcccccggcaagctgctggcggccggggctaagcggagggcggccgcggtcgggcctctccgggtccacgccaggggtgggaggacacttcgggcccagcgtagaggaggcctccgaggcccaagcgggcttcggctgctgcgagtccccagaggctccctcgggcctcactcgcggtgtctcctccagacgccaggggcaggccacgaagccgagggctccgcgtggccgtgggagaagcggggtgcacggagccttcccgcgcccagacgccgaggggatgcaaacaggggagccgggcctggtatggccaacctccaggatcgaggggccccagaatgtgcgtgtggccgggggcgggggcagctgcgggggccagaactagagtattccttcgctctcccctgggggccgggcccccacgagttgcagcagagcccgtctgtaattagggcctcctggtccggcaaagctgcggctgctcccagagagagttggggtcttctcagggcccgcgatgggggagtggtcgtggtcagacccccgtgagccccttcggaaggtcccagtccctgtccattcttctgtcccgcagctctctccgcgcaggcggggcagagccggggaagaagacgctggacgaggggtcttggggccgcctcgctggctgcggttggaagcacccgttttcccgcccgcccgcgcaggcgctgctctgtggccaccagcagaggtttcccggccgctgtgagtcgcccacgcgagcgacgtggggatacggggcgcacggagtctcagctgccgccacgcagcgcttgccctgcccgagcttcggctcactggcagcggcgaggccaccgaccaccctccgccttccagtcctaaactcggggctggagaccgcaggagctaaaccaggaagaagaaagagggcagggcctgaggccgggaagagcggcccgggggtcaacggtgagcgggtgcatacgaggcaagagccagagtgacattaagtggggccgcccgggcaaaccttgcgcgtgcaccccggcccacctgcagggcattctcccctgccttttctccttggcttgagtgcgggcggctgactcctgtgggcggggaggagagggtggtcttcccagggctccaagtggagtgatcactgcacccatggccaggaggtgggggtgcgcggagtgatttttgtaacttccctgagcctcagttttctcatctgaaaagtgggtatcacgactgtttccctgaccacaccaggttgtgatgttcactgaaatcatgggcttgagcacacatacttttaaaaaattgctaaaactcgatacaggtgagaggaattgttagttttcttgtaagtcttgccccaatcctccccatatttcaaggagggccgcagagtccaaaataaaaaacctccagtttcctttttttcctcagttggctggatttcccctccaagccccagcccagcccccacgtccagaaaatggggaagtattaaaggaagagacgattaagcccctgagagtgtggctcctgggacgccagcgtttcagaagtagcataggctcctagatggacgctgacaaacccaagtagcgccttacattgtcgggcgaggaccagactccaagttaaaaggccggccgggctatcagtggcagagagcagagcctcaaacacgaaaagccagaaagcgctgcagaggcgtggaaggtgcgccccgcttcgctccccatgctggtcctctgggaactcaggagccggtgcacgctctggtgggctcatagagatgtagctttgggggcgatgggaaggacttgccacgctcccacccaccctccatcccgagagagtgcaagggagacgcaactgtcttcatccctatcccgggctggcgcccgaactagagagtgtacttcttccctagctcctgcaccaccgtctgtgtgtacgtctgtctgtccctcccagtccttgctcggtcctaggctttcatttgaaggcagctgagggagaaagaaactgcaaacccctttggttctgtttccttgctttcaataatgaatcgagacagcgtgtgtgtggtgagggagtgacgagtttcaacgtgatgaaggagataaaacccgacggtggggtcctgccagtggctccatgcgtcactgaaacattgggtctcaaaacggatagatctccggagacgcagaggttcgcgcggatgtccagaggaggacagcgcccctgcagccacccgcggagcccagggccagggtcaaaaccctgccgcaagggctcggagctccaagcagttatgctgagggcgccggtcccaggccgccttgctatgacacgggtttccagtgaagcccaagcggattccacggccccacatcaccggaggagccaggctgccccgggatggatggggtccgcgcgctccgagaggaatgggctagtcaatgtgcgctgctaggagtgtgtggtaatcaatcgccacccctgccaaaaccaaggaccccctgtgtcgggcgtcttcagccagccgcgagggggcgcggatctgagagagtcgcaccccgggaccccagctcttcctactccaccccaggcagggcccgcgcaggccgtccaaggcctgttctctgaaccacctgggttgggccgcgaaatatgggacctcaggcatggaattgtggctgcacaggtgatcacggcttcctagtccttcttagagcagaacctgtcccactccagcccacctctgcgcccccttcggaaggaagcctactggagctggaattccagcgtgggtggcgaactctcaagccaagagctggagctgatggaggcaggagggacgcacttccaagccatccgggctcctccgtagccagtgagcctcctttaacccctccactggcctggatgacggcctaggcgagactttggcagtgtggcgcgaccccagcgctcccccgccctcgggctcgggggcgcggtgggtaccgcgcccgcgcccggccctcgccactaggcgccgctgcgctcacgccgatcggggccccgggtcgccgcgcccgcctggcgagaggcctctggggaagacgccagaaagggatttgtcgtaataatttttaaaaaatgtttttagggcattaattatacttttcgttttctcaccgccaccctgcgcgttcggagaggccggcgtgactggggatctcagtgggttggaggaattcttaacgcccccgaggcctttccaactcgggacaccattctcgcgcctcgggccgggaaagggctcgcccttcacgggcgtcggtgcggtccgcggcgagccgcgggagcacagggcgggctcagcattctggttcaacgtgaggaccagaacctcggcgatcagggaccaggacgtggcagagtgcagcgggtagcttcgacggcacaaggccatggcctagcaataactaaaatgtgatgaacgctaacagtgtgctaaatatgagctcactcactctctcaacaaccgttaacacatcgctatttccttttcacagatgagtcaaccgtggcttaagaaggtgaaagtcacacaggtggtgaccccagacagctcccacacacctattctcagttgcaggaggccatgcacccaccccaggtacctcacaggcctagcacggagcgcagctatagtgaagcactgccctttgctcctttgaagcccgggggcaccttgcaggaaactcctagcagatgcttatcagagatccccaggagtctccgccctttgacaccaaccaaggagccaggactccaggccttgctcaccccaaaatctccctagaaaagctctcagcttttgggggagcacggaggagtgtggcaggagtgtcagcattagctgatgtttgtacagctatattgttcacagactctgaaacccagtaacaagccttggaggtgggtatgtaatagcagcatcaaggacaggagcaaacttttattgtagttcattatgtgccagacactgtctaagcactttactttgtttatctcattgaacaaacccagagcaaaggtactatattatttattcccatttcagagaagagaaaaccgaggcacagagaagttaggtaacttgcccaaggtcacacagttaagctgtaaatgcaagtctctcatcttgggggatgggggcaggtgtattaaagtataattacatatagtaaaactcaccctttgtagtatatggttctgtgagttttgaaaaacacatagagtcatgtaaataccaccacaatcaggaagtaggatagttctatctttctccaaaacaagcccactgctactccccactgcctcccagacagcattggctgtatttttacatatgacaaaatgaggtggggaggtttctgtgttgcccaaggtcattcagtgacagattcggaattagaacgtttgaatgtgtctgctagtccagctacctggaaaggtagattcctcagtctacagagcccaagaggcagcagtggcttggggcacacatggggcagagggaggaagccccttgctctaagctggagcctcagaaatccccacatctcccactccacgcagggctacttaaccaaacacccactccttgggcagctaaggaacaaaggtggctgtattctgcaaggcctaaatccacaagtaaagttgagtggcagggcagctgcgccatctaggagcttagggtccagtccagaccacagtgcccagtgccctggcacgactccactggccagtctggttaatgagttactatcctagttaatttccctgcacatcggggccagaccccgcgaaccttcccgggcccttctggccccgggaattagcatagattacccatgcatgaattagcatagattacccagcttctggggttctgaactgcccgactcactggaaacctgcttctccttcaaggggctggagtgcagctcgggtctagcagcacttggagcagaggaactagcatatcctggttccttcaggaagggggacaccagatctcagatcctgctgcccctttacccctgcctacgtgttggctagctagagcccctggggcaaacctggccacagaagggcagtttataaaaggcaggtagcctgcagaggatgccgactgactgaagtgggactgtggagcactctacccctctactgcagccagatgtccctgcctggggcagaaggctgaggggtcccatctccagcccaacactgtcctggttaagggaataatgattgcaccttagcgcccagggctgcaagttttaaaagagggaaggcacccatcacccttatacatcacaaaccatctgggtctcacccaatctcccagacagactggatacctgttgccctaaaggtcaatgacttttatgcccccatccaagatcactaagggtggagtttcagtggctccagtttgcaacctctgagtctcaggctgagtttggagggtctggcctgagggcactgccagaatctggccctccagtcctccttctgaagtttgcatgaaaggtgcactctcctgcttgccaggattcaggatgcacagtctgcctaagctgagtgtttgtttccagcctcaaaaacctgagggcggacctctagctccaccctaagcttactggctgggcacagccaaaagacctcccccctctgccatgtcttcaggctccctgctggcctagctggggttagaggagaggcctgtaacctcacagcctaattgagagagggatttccaaactgtagacaatattttgggggacagtggtccaggcccaagggaggtgcatctttaagtgcacccctaccccaagggctggatccaaagcccagaatctttgggcctggaaaaaggggaggaggagaaagcaaagccacctggaactgacagagggacaatactgggctaggaccccagcccagaacttcgaagcctaagggaaaggcaggtgtctcccactgtgagggcaaagctgaggcgcacacctgtctcatctgtgaagatgtgtatgtgtgttccctgggaaggtgtggggtgggggcaacaaagatgatctctgccagttcctcacgaatctgtctggtgccctgacaaccccggaaaacactgctcccaactcctctcttgcctggtttcccaaaagaggtttttggacacttgccccaacacaacattatatctggaataaaggagtaattgacacaaacataaatatacaccagatgaaaccaagggaggaagcaggtagctcgtcctgagacctgtcccctcaactatgcatctggtggcagtgcagcctggctcacggtggacttcactcttctcctcccattgccatcggcttcccaggtttcacggcaacctagtcaccaaacacaggcaattctgcgttcttaggagaaatgacaggggcctgggagtaatagttttaaacgacgctagaatttttttttatcattaattgtaaacgtgcaaaatacctgctggtacttcactttagaagaatgtaattggcaaaaggaaaaaaaggaaaaaagaggcggctgatgaatagataatagatctttaaccaccaataaacagagagcagcgccagcagcctggggatgtgatcataattatgccgccgcgcgagccaatggggacgagggaactcggtcctaaaatcatcccaaaaccgaaggcgagctcgaaaatgcggacacggcccgggaccggagatgcgatccgtagtcgttagttgcactgggtttgcacagcaaccaccacccccccaccaaccccgggacaacagatggcataataataataatagaaataataataataaaataatatcatctataataataataacattgaccacactgacaaaaataattacgacggaaccttaatagtacagtagcaccatatcgggctctcccctgaccttggactgccggtcccagatattccagaaggaattgttttggggaaggaggtgagcaccctcccagacagaaaacgctagagaccgtggggcgagagagggagagagttggaagcccactgctccggcggggtcggcagctcccggtctcaactcgcaaacgaacgagccgggtcaagaatcgcgaacgcaccgaccctgggacctcgaggctaagcgtggttgatggggtgggaggaccccgtacccctcactccaggatccctcctggcctaggaaaccgctgggagttttgctaagtgtggggattggtataaccgaacggcgcctttagcccgggaaccagcccctgcccgcttaccctcgcggtgctcttggggcgatcccagttctcccgacgcggggccgcgtaaggcagcagcggcggagcgctaggctagaggaatctgtctgtccttctgtcctaccagcttgggcgaggcaggctcgggattcagggggccgcagcggaggcggcgccggccagggactctgcagggaccggggtgccccggagggagtggtgctggtggaggaggaggcggtggctgagggggagtaggtggggaaagaggaggaggaagaagaggaggaggaggaagaagaggaggaggaggagaagaagaaactggaggaagaggaggaggcgaaggaggaggagaagccgcagcgggcgccgcaggagcgagtgagctgggagcgaggggcgaaggcgcggagaagcccggccgcccggtgggcggcagaaggctcagccgaggcggcggcgccgactccgttccactctcggcccggatccaggcctccgggttcccaggcgctcacctccctctgacgcactttaaagagtctccccccttccacctcagggcgagtaatagcgaccaatcatcaagccatttaccaggcttcggaggaagctgtttatgtgatccccgcactaattaggctcatgaactaacaaatcgtttgcacaacttgtgaagaagcgaacacttccatggattgtccttggacttagggcgccctgcccgccttttgcagaggagaaaaaacttttttttttttttgcctcccccgagaactttccccccttctcctccctgcctctaactccgatccccccacgccatctcgccaaaaaaaaaaaaaaaaaaaaaaaagaaaaaaaaagaaaaaaaaagaaaaaaaattaccccaatccacgcctgcaaattcttctggaaggattttcccccctctcttcaggttgggcgcgtttggtgcaagattctcgggatcctcggctttgcctctccctctccctcccccctcctttcctttttcctttcctttcctttctttcttcctttccttccccccacccccacccccaccccaaacaaacgagtccccaattctcgtccgtcctcgccgcgggcagcgggcggcggaggcagcgtgcggcggtcgccaggagctgggagcccagggcgcccgctcctcggcgcagcatgttccagccggcgcccaagcgctgcttcaccatcgagtcgctggtggccaaggacagtcccctgcccgcctcgcgctccgaggaccccatccgtcccgcggcactcagctacgctaactccagccccataaatccgttcctcaacggcttccactcggccgccgccgccgccgccggtaggggcgtctactccaacccggacttggtgttcgccgaggcggtctcgcacccgcccaaccccgccgtgccagtgcacccggtgccgccgccgcacgccctggccgcccaccccctaccctcctcgcactcgccacaccccctattcgcctcgcagcagcgggatccgtccaccttctacccctggctcatccaccgctaccgatatctgggtcatcgcttccaaggtacgtgccacgtcgcggaactgcagcgcgccgctcccgccgcatccttcactgcccccggcctgctccgggtgggcgcttggcaaggcctgggcggaggttcctccggctcgcgggccagcgcgccctgttgggaaactaggcggcgcggggccgggcgtggtgtcgatccccagtctccgaagctacgactggtttggagtgatggcctgcgggccgcttgaccctttgggaaggggtgcgaacggagaagttgtcccccagtgcgctcgaatcagagcaggctgggctgtgcgtgcccggcgccgcggagcccagagcccgcgggatccccaggctcctggtaccctcggcaatgcccccaaccgtcctggctccgaggggcgcggacaggactcggccgccaggcttgctttcgactgcgttcgaccctgttcaccacccactttgcgccccttcagtccagacccgcggcttcttagtcttccaccctcttctggaggcgagaggatcctcgcgccccgggagaaaagtatgggatttgttttttctttcctgcttttcggaggcctggggaggggcgggaacccgtgcgggaggaaagctccagggcttggcgctctcgccgcgacctgcttaattggggcgccgagcagccacagcgggaaggcaggttcggtctggtttttgtttttctttctttctttaaaaaaaaaaaaaaagaacctggtcaggaaactgtcttagagggaaatatctgttcgtgtgttttcatttcttgcgatattttttatttgtttgtttttctctgggtacggggtgggaggaggagagttaaaacttcagaaaaaggagtaattagtttacggattggagtcagtaaaagacctacctccggcggcagccgatcaatactccgcggcttgtccattcattaacccattgcgttcctgccggagcctagaatcgggtagatgtcacccccctccccatattttaaaaaatcaaaccaaaggaaaaaaaacccaaaaagccttttacccttaatcccgaactggatttgcctgcatcctgcctggactgtcggcttgtttttctttgtttgggttttcggtgaatcgatttcctatgctaatgagtgaacccaaaactctgaggctttgcttgaaaagtttagggctgcccttcctcattcgctatcagtcatgcttatggtcccctcaccagacccggagccgctgggatcttcctgcgttacagactgtcctggcggtgtctgcaagtcggtaaccccccgggtttcgatcccttcgctcgcgtttctcttctagttctcgggagccgggagccccggagcccagttcgcgagaggcagcagcggctgtagccaagcacacccgccggccagatttctgtcccgatcgggcttcaacgactcgccccgcctctatacttttccggaggggcaataaaacaaataatttaaaaataaatctccatgaaaactctggagagcagcccgccgcctttccaccgtgggtcaaagttccccgagaggttagaaagaagagaaagtagtttcttcgggttgtgggcgccaatcccctggccaggctctgcggctccctcccctgcctccagcgcccggcgaggaggtggcgaggcccgcggcgccagggcggctgcggagccggccgaggtcaggagcctggggactggctcctctgcgacagcggctggttgggtgccgcaccggtggagacccggcgttccgggccgggcagctgagcaggcgttcccttcgtgagcccttgggaggaccaccggcccccgcaggtcgagcggcgcggctatgcgaaggccctgagcacggtgccgggccagcccggctcgggagaagtgcgcggctccggtcagagcagccccccctaatgggatttctgctgtgctccccgcagggaacgacactagccccgagagtttccttttgcacaacgcgctggcccgaaagcccaagcggatccgaaccgccttctccccgtcccagcttctaaggctggaacacgcctttgagaagaatcactacgtggtgggcgccgaaaggaagcagctggcacacagcctcagcctcacggaaactcaggtgactgcggcccgggcgcgaggaacccatctaggcgtgcgccccctccccaaagctggctcccaagcacacccatgagcacggagctctgtgagggccttccgcacaggtcctggtagctggttccacgcctgggctcgggatgtatgtctcaaggtgctggctttgttgggctccagaaaggggctgtaagtgccaatctgccccaggttctggggaaacgcgccgagttgtttctctgtccagttgggcatgtcctggctaagacatccctgcatttctggtgagacttttgatgagagtgtgaagacccctgctggggtccaggaagagggagagcacagtggggtttctgggtgtttggagctggaggctggtaaggacaggatgtgggttaaagatgagttctgagcgactgtgagcccacggctcacaccgtcggctccagtgacttccctgaaggagatgggcgatgggaaggtagagggcaagcgtcctgtgtgtaccctatatcagagaagtaaagttgggaggctgcagagagggtctgcctcagggcacaggccttctgcacagcagggtccctgggcgggcctggcttgggtttatcccagggtggggagggggtttaggactacactaggcgctactgtacacggagccgcagggcggggtcaaagttcccagcaaacagtaacgtttttttgggcagactaagttgtaacacttttcctgggcagctcagaaaggtc

SEQ ID NO: 182 - DNA, 41406 bp, Homo sapiens
  source 1..41406: mol_type = genomic DNA
gccgctgagatccccttcagactgaagcactcagtccccagattgcttgacatttggctgctgatgggtcacagctgagctcctcaccaggccttgccctcagctgaaggaagtggccttgctaaggccccacccctctctgggatggcccctgtttgaacttacgtgcatttcttgcctcgtgcatttcttgcctcatttggggacctcactgaaaggccactccagccctacagcaccccgctgaggcctcacctggcattgcccctcaatttctccctctgcccaagcctggaccccttacaccctcacaggtgttgatcgtgagaaccttccccccaaaaactatctgcattcaaatctccatcccagaatctgttttcctaagacatccctccacaccctattctcagcgtaacagctagagttagtgtgttagagataaggcaggtctttactactttactcagatcccttcaatggcttccatctcatcagaaccttgccatctacacccttgttgcattatctcttgactttgcctcctactcctctgcccttgatcacaccagccacactggcttccttgctcttcctcaaacataccaggcatgcttctgccttggggtctttgcacatcttcttctagcttcttggaatgctccttgtccagttatctgcataactccatccctcacctccttctagtcttgagtcaatgaaggcttccctgaccccctacttaagtgtgcaggactccaccccaccccagactccacatccctttctttggttttctccatagcacgtatcaggatctggcacacggtacatcttattgatgttatttaacgtctgtctccaccagaatgtaagctccattatgttgtttaatgtctgtctccatcagaacgtaagctccatgagggcaataacttttatctattctttgctgtattcccagaacttagaatagtaactgatacaaagttgcagcccaatcaatatttactaaatgaacaagtaaataaacgaatggaagactgtgaacatggaatcagaagaaggcttgtgatcttcagggaagtcccataacttccctaaagtggaatggaagacttccctaaacgaatggaagactgtgaacgtggaatcagaaggcttgtgatcttcagggaagtcccataacttccctagagtggaatggaagacttccctaaacgaatggaagactgtgaacgtggaatcagaaggcttgtgatctttagggaagcattcttcacatgaaaaacaggaaccataattcttatgtcattttggtaatgattatacaatataacatttatagaagcatcatgtaataaactgctaaataaaaggcatttttgatcaaactgaattcttcatcagagaggtacttaatttttataatctaagagctaccagattgccaaaaaggaagcacagaaacattcagacacagaaaaccttaaaaatggttctgatattcaaataaaatataaaatgatttattccaaagccatacccaaaacatacaatgaaatacatccctgttaaagacttaataaaaagagcaatctttacattttacaatttgaagaccttctgttcccacaaaaagtctcataaaattccataaagtgtcaaatgtattttcctgtttatataaaatgtattctctcttcaaatatagccgttttattatgaaattgttctcaatttctgaaattctcagtagtctatagtatcccattttcacatgcttcttaaaatgaggtaagaagacaaacggtgaaacttttttcagatcattttttcagaagtcaatgccttgctgatgcaaagcgcaacatgcttttgtcatccctttcatctgaaatattttcccagtggttactcagtattttgcacacaaaaaacagttacaatacctgccacttaaaaatccataacatgttgtaattcttcttatgtgattttaaggtctgaatcaaagccattgctacagtgattcactattttctttacaggtattttaataaatattcctcaattctagaagactgttccaatcctttaaagtgggggtcagcaaacgtcttctgtaaaggtccagatattttgttttgtgtgtcatttttctgatggatattttttacaactgtaaaatatttttaaaaaattatttagctattctgtaatttgttactccattattttaaaaaatagaagtaactagtctctaaatcagactactcaagtgttaataaaatgtaaacttcacattgtgcagtaaaataaatccatggtttctgactactaaattgaaagttcataagcagtaagaaatgaatcccactcaaagagtggggctacattccagatattctttttaatcaatgacactgttttagagcttctttttcactttcattgaataagtcacatgtctttagtttgttttttcttggtcttacttttcacagggaaaaattctcttcatgaggctaatttgaagtttttgaaattaaagactggaatactttcatgctgacagaggtagacgcacacgcactggtatatgcagttacaaatactcgcataaaatggaaaccattatttcatatataaattaattaatcacaaatgctctccatggctaagaaggaatcagtggaaaccagacagaaggtatgcaagacagtcctacagaatgttctaatttgcttttatcacatgtagttgctacattttaggaaaacatgatttaaatatgaaacatgtaatataaattaatatagtggcatgatttattcaggttctcgatgcatataacctggaggtgactaaacgctgatctataacatggtcctatagcttggtactgagaatcacaactctgcgtgtgtgtgtgtgtgtgtgtgtgtgtgtgtatgttttgcatgttttcctttcctaccacaaacagtgttataaccagattatggcaaataaaagaacagttgtaaatttacccaaatatatcataaacaagttggaacactctggaattacagtcatatgatattctacaaaaatatttacaaattctaaagctgaaaaagttgaaaactttggtattcctaaaaagagaaagttcagggccatgcgtggtggctcacacctgtaatcccagcactttgggaggcaaggtgggaggatttcttgaacccagagttcgagaccagcctggccaacatggtgaaactccgtctctatcaaaaatacaaaaatcaactgggcgtggtggtgcacgcctgtaatcccagctacttgggaggctaaggcacaagaatcacttgaatccagaaggcagaggttgcagtgagctgagatcatgccactgcactccagcctgggtgacagagtgaaactgtatctcaacgacaacaacaaaaatttagccaggtgtggtggtgcaggctgcaatcccagctagtcaggtggctgaggcaaaagaatcgcttgaacctggggaggcagaagttgcataaactgagatcatgccactgcactccagcctgggtgacagtgagactctgtctccaaaaaaaaaaaaagaaagaaagaaagttaaagtatactggggagtccatgcttaatttttgaactataaaaagttttcagtgcaaaattattgctattgataaatagcaatgacacaaaaaccacatgaaacacttaacatctatacaacacataacaatatcctgaaggtatgttttggcatagaaaaggtaattcggggataggaaataacagattgctttactgatttaattctaagtctgggtgttggagtgtttaaacactctctttttgcaaacagactcagcatatttatagctcatcatgtttcttcttaaatggccactttgggtgttgcaatacgtggtctgcagcctgaaggacaagatacataaattcttctacatcgaaagagtagttggtgaacttcgggtgctcccccagggttggatggtggccctgtgaaaataaaccaaaacacgaatccataactcaatgagggcatggttttctctacagcaggaaaattatgttactttggttaaggcaactaatttatgttctacatcagagaccagcaaacttttcctgataagggccagatgataaatattttcagctctgctgactctaaggtctcagtcacagttactccactgtcgttgaagtgcacaaacaactagagacagtgcataaacagacaggcatgactgtgctttctttacaaaaacatgtcatgggctggatttgcccacagggctgttgcttgttgatcccgtctctatatataatctaatagatctttctaagcccaaatttcacgaagctgcctttgtaacattaaagatataggttgcttaattcccctttttctcctatttgcaaatataaaataaaacaattcagtattccagagaacagtttatctttgcagcactgaagttcaataaccatttttcatatcaataattggatactttaaaccaattaaaaatgaagcaaggtaagttttgtgattgaactttaccttatcctgaggaaagactttgttctgccgtcgccaagtgatgtagtgaacgcctctcagcctggccaagtctaagtaacagcgttcatcttcacagttgtacctaaggacacaagggtgtcacaacatgaggcttttgtccaaggttttttccaaatcaacaactctgcgaaaataaaatgcagctcccaaatatgtccttgcaaaaggttgtaaacaagactgaggaagacagtaaacaagactgaggaagagaatgtaaaaatattctctgaactaaatgaacttaacttttaaaaaacaaaatagggtcatggaatggagagaattgaccttattcaatagggcctgctgcctatggacttggcatgaccttataatacctctgtctttaaatgtatgaaagaggcaagggggataggtaacacttccaaggtcatataactaaatagtgaaggatgcaaaagtagaacccaggtccattagactataaggcttgagttttctcagttacatttctctcccttctctctcctttcttccatccttccttctctctctataagagaaatgacagagatagaatccattatctggctatttctctacatatatcatatatatttttgaaatgttttgcagggcattggaagttcatgacaacttttttcctaaatagcctcctatttaaatacagagtcaaatcacttttaaaatgaaaccatagaacccagatatttagacataatggggggaaacaggtaacagtaactgctattagtgtctcaagacctaaaatggagcacagtgccaacagcagaattattatgagagggaaggtcatgtctccataaaccaaccactgagttaaaagtatgccctgggcaaatcatgaacacccaagggcctcagtttccctgtgtatgggatcagcaagcactaagttaagtggttggcttgtgttttgaagctatgtcgtgcatgagacataaatgctttcttttaacacaataactacactgtttgcaagaagacgctcagagtttgggaggtatgcaggaacaaactcagaataaggaaaccacagattcacatcttccatatcatgctcgggatgggaagatgaaggggtagttggcttactaagtgcaatggcaggctgcagactttgtatttttagcttcaggcctcttttctttccagattgtctatatgatgtgacttctctttttgaatgattaaatattaagccttttgatgctcagaatgaaagctttagcatgcataaaaagcattatcagttgcttcagtgtaaaactgcctcccaacacttacagttcaaatacagcagcccagtctggaaggaaaagtaaatgggtcagaccagctccatgcattccaataaatatgtccgtgttgtgtgtgatccttagttgatctaaaaacccaagttctctgtgaacatacagaataacatgagagagatggggagaagagagaagtattaggttgagttagttcatgattcacagtaaggatatttataaaagtgtattgcccattttaaaccacattccatttttaagaagcatttttgccaatttcaagtgcgctctagtaattaataagtttcttaataatttaacatattttctaagtaagctcacctatccttttaggtttaagtactttttttaaaggaaactttaatatctgtcttaaatggaaaagcagtgacatatgacatcaacaaaactgtaaaaattgatataatcaaactaagtagtgttcaaatcgaggtagatactattgcaagacaaagctcagagcctgaggcctgctctttcttcatgaaaaagagaaattggcaagtgttaaagagatgttgtgacacactagcactaaattaaaaactatttccttaggacaatagaagcactttttaaaaagaaacatttctccttgtgtgatttaagtttttataatgccctctgggtacctccaaaatgatctcagataccaccagggcattatcctgcctttggaacagacaaatccacaattttatgcatgttaggactgtacaagtgttctctaaatccaagacactaaccagtgtgtaaactttgaaccaaaaatcagtccccaaacaattcactgaggtgaggctagggagaaatgctggaataagggtgacactctgaataaacagaaagaaatgagatctcccagccccaacttacccaaagtaaagaaaaataaatgatcaagattattttggatctacgaagggaagctgaattcccttttacaccagctaacaacaaaaactccgcataggaaaaagatgacagctccatgtgtatgtgtatcacaacgagaacatgtgcctcagtttctccaggaatgtgaactgatgccaagggaaggacggccattcacccaggtgaacatacccctgcactgccagttgtggaaacgcctgtggtcagcactcaccaatccccatgccaacatgttactagtatttcccgcagactggcaaggtacgaattcattatcattcttgcttatctgagaaactacaacatatccttaaaagccagtcaatgatacagcctcagaggtgccctgcccagttctttccatttcttcccagcctcatctaggtgaatggttttgggactgatgtgggggccccatattggctcactcatttcttcaagcaacactgacacaacatttcttcagcgcagcagattttacataatctgtaaaatgggactagctgggccaactcagaagactgttgaaagcgtgagatgagataaagcaagtaagcataaaagtacatttcgataaatagtagctgtttttacaattgctatttacctctattcagtgtctgagatcctcaagaccagggctatgccatccgccataatgggattcctactgctgagactggtgaccagctcatgggtccccaatagagatttattgcacaaatgaactaatgtatgatgaatgaagtgcaaagctcccatgccaacattctctgaaattaagtgtatctatattagatacccacatgctgggatatgtatacttcttttaactggaaagtgttcacagtgttagatttgggaaacacagctgtgactgtaggtggacatggagacagaagttttcacttttccttttgatcttttctatactgcttgacttttcaaccagaaacatgtactacttttaccaggaagatgtaattctagcaacaggaattacccaaactgtgaataataggcatattctgtctttctaagccttttagttgtgttaagagttttaaaagaaatgtaaatatttggtaagtttttttaaaatttcatgttattctgaccctcaaattatccccatataaataattttcagtcagatgttgaaatctggcaggaggcagggcaaattaggtttataacatctaaattttgataacttttttgttatcaaacatttgataatgttatcaaatatttgataaattttataacacctaaattttgaactagttgccaatttttttttttttgagacagagcctcgtactgtcacacaggccggagtgcaatggtgcaatgtcagctcccttcaacttctacctcctgggttcaagccattctcctgcctcagcatcctgaacagctaggactacaggcacacgctgccacactcggctaattttttttattttttagtagagatggggttgcaccatgttgtccaggttggtcttgaactcctgagcccaggcaatccacccatctcagtctcccaaagtgctaggattacaggcgtgagccatcgtggccagtctgccaattttttaaaattatgaaattttaggccgggtgtggtggctcatgcctttaattgcagcactttgggaggcagaggcgggcagatcacttgaggtcacgacttcaagaccagcctgaccaatatggtgaaacctcgtctctacaaaaaatacaaaaattagccggatatggtggcacacgcctgtagtcccagctactcgggaggcagaggcaggagaattacttgaacccaggaggtggaggttgcagtgagctgagatggcaccactgcactccagcctgggtgacagagcaagattctgtctcaaaaacaaacaaacaaacaaacaaaaaattctgaaattttaaatgaaaatctgaattcatcacttcttttgaataaggagatggagtgacaacatcaggccccagaaagccaaagagtaactgcccttgttaccagggacttcacctgcccatttcattcatctgtagtgtctacttgtcccttctgggcctacaaatgccaatggctcccactggaaaaatgctttctagcccccttgacctcatccaagcaaaagttgacagtgtctgctgagattggctattacttacctatacttgtaatcaacaatctggacttcaaatgtagatactgttttcagtgcatttacaagctgggaaaaaaagagaaacatttagcatttcttttccttctttcacttctgtttttcccttatgagtcctaaaatttctttttttgcatatactatttcagatattaaatatcatttggtaacaacaacaacaaataaaaagaaaataaataaatatcattcaggtcaatagttctgaactgtcattaagttcaaatccaggccccacctgtgaacacacgactctacctccctcagataccaatgcactgtgttgctgtgaggctgaaaggagaagacaattcagggaagtaaagtgctaggcacagaaatagctaaccattaactgttgttattaccatttgcttattattccctcaactttcaacacacatttttgggcatcagaatgcccaaaatgttctagactttaccttaagagtttttgccccatccattatctcatttcagacaacactagcgctttgaacctcatcctctgaaaatactaaggtcttggcagaaaaacattttcagtacttctacatagaaaaacaattattcttctagcaaacagaaagtaacaaagcattgttaatctattatcaaaaatatagtcatggttctctgtccctcacaattaggccacgggggatcaccaccattcagaaatttctgcaactgtgtcatgttgccttgtggcatgcactgcactgcaacagcaacatcaacagttgcaagtatcattgatggggcatgtaaatggtgctggcatttctaagagtgtcgttaggtttacttcacttaatcctcgtaagaatcacaccagtggctgggcgcagtggctcacacctgcaatcccagcactttgggaggccgaggcgggcagatcacctgaggtcaggagttcgagaccaacctgaccaacatggtgaaaccccgtctctactaaaaatacaaaattagctgggtgtggtggcacatgcctgtaatcccagctactcgggaggctaagagaagagaatcacttgaacccgagagatggaggctgcagtgagccgagatcgtgccactgcactccagcctgggcaacaagagcaaaactctgtctaaaaaaagaaaaaaacataccaaatatcataccaagtaagtattagtactatgcccactttacaaattagacaagataggctcagagaagtgaaataactttcccaggatctcacagctcccaaatgcacagccaaaaataaatctaggtcttctgaccccagaacctgcgttcttaaccagtgcactctattgtcctgcttacagaaagcaacaagcagtgaccaacatttaatcccctcccctctctctctctctctcacactcacacacacacacacgcacacagtcataacatggaaatttccctctccagacagccactgaaatcttataaagagttgaaggggtaagaagattagaattctgttttacaggagagatggcagatggcataagccttggtcttttaacaagattgcccacataaaaggaatcatgtgtgctgacggtctcagggcaagcatgccctttttcatgacttctagttgcacgaaaaaggtggccctatcccttccgatggctattcaaaccctaaagttgggcagaattccacaagccatgatttaatgaggccatttgggttgattaatacatacctgtttattaatcaaagtatagccaaaggtgctttcttcccttcccaggagctgcctttctagtaacatccaatcctcaagaaagaagcagccagttgggtgctctttggcttggagttgggggctgaatgatcaaatttcgcctttgggtgccatcatctgggcaatgcgcatgactggatctgaaaacctcacacatgcactaaagcatctaccagcactatacctttctactggacttctctgcagtggcctgatgttgttcctcagcctgccccttcctgatggactggggccagaggtagcttctgcctcctctgaaatctatttgctgttttagtagtagcacactctggctaagaaagcagtttcagtccctgactaccttgactcacgcccccgttactctaatcaccagccgggtgaccttaggcatgttttttaaccactgagcctcagtgtccttgtctagaatagaggataataatacaatacctacctcatgggtttgctgggagggttggggggcacaatgtacaaaaggagcacacaataatatgcttgacccccaactgcactcaatatgtatggtctataccaatatatactgttgatctgttggctagtgaggcttctcatttgtattcccaacattgcactatttgatacgttcgtatttctaggtctttaaacacacacatacaaacacacacactgctcatttcttccatccacagagcttacaattaacacctcattatgccatatgttcatgtcctctgtaatccatatgggtctcaggaagagatgttaattacataattcggatcagcctgttaggcagccaaattagtctgtgtaaaatattttacccatcaaaacatgacacacaccacctcccccctcaactttcctcttactgaatattttccagtttgtttccacttatctgctcaagttaaaagcctcaagtcacacttgatccttgatacctttcctggccttctctaatgtgaatgtacttttacattccaaaagtaagtatcataggtcctatctccaaaatatgtcttgaatgcatctaccatgtcatctctactgtcatcactttggctaaacactctcccctgggccacaataacaacttctgatcaatctccttgcagaatgacttaaaaataaatgtcaattcatgtctctccctctgtatttgttttctatctgctgctgtaacaaactgccacaaatttagcagcttaacacaacacaatttatccccttacagttctgcaggatgggagcctgacgtgggtctcactggactaacaccagggtgtcagcagggctgtgttcctcctgcaggctccaggaaagaacccactgcctcaccttttccagcttctagaagccctccacactccatgactcataggcctgccccctccatcttcgaagccagcaacatggcatctctctggccccacttcccttatatctccctctcccacttttaaggaaattatgaactctgatttgatcagtgagaagaatccagtgaagaaaagagctgtccaggccgaggcaaaagttctctagcagatggagtttaaggcccatttgtgattatactgggctcacgtggatgatccaagataatcttcttactttaaggccagttggttggggaccttaattccatctgcaaccttactttccctatgccatgtaacctaacctgttcacagattccagggatttggatgtggacatcctttgggaggagcaggaagagacattattctaccaacaacgccctgctttaaaacttcacaatggctttcccctacactggaataaaatccctctcccaccaaggtctaggaggctgatacgatctgtggccccctgcaccatgcctgacctcttggatatcgccccacctctctcaagatgctacagtcatattggtattctgtttctagaatactgaaagctcagtccactagaatacatttgactctgcccgagaggctctctcccttgctagattcttctctgattaggtctttgaatgccctcatgtgagtacaaacccccatccatccacatccccagtctctatgacatcaccctggttcatccttcaaagcacttatcactgcctgacatcaccgtacttattgacgttttcacttacttcttatctgtctctcacctctacggtgtaagctccatgaggtcaggcaccttccccgtctttgctctactctatctccagggcctagaacatggcctgacacatagcaggtgctcaattaactattgtagaataaattcttactactgagaggctatcttcaggccatgatgttgtaggtagtggccttgcatggtgatctcattgaggttaaatgtaatttatgagttggtgctactgaaatgagtaaggatgctgaaaatgcagtttctaagacatggtcatgtaagaggacagagattcttccaactaaatctgctgctgataccacaggattaatggcctcaaccatctgttgcatcaactatgcaaaagaaagtcttacatttttgctacttgtctgtccggatgccctctactgcagtcaaggcaagattctgacagctttttccatgctgagttgatgcagatgaaatttactataaggcaaagctagtttgtctatgggtggtttggtgaatctcactagaaattcaaatctaataaataaaccgggcataggccatcaaacttttctcaaaactaagttttaaaccaaagcttttaacgtaatgtgaaaaaaaaaaaaacacaatttgctctatgaattgaatatgaaggcattaaaaatgcataccaaaaactaacctcattttggttaaggattttccggtattctgtgctccgtgcaagaatggtgactcgaatttttccatcctgtaatcaaaatgaaacggtaaaataacactgcatatgcctgggtagatgaatgaacatctgaacccaaaatgtgattttcacaaagagatgaaactcaaccaggatacattaatagaactcttcttttttagcttgattccttcaccactctcagggaataaaaatgtatccacttcaaccaccgaaggcaaaaaccagctcattacattgtctgtttggttgggtgggtgaattttttggcaggggttgtgtatgttacatgaacatttggggaggtgagggagatataaccaatgaagggggaaaggaggacaggaggaagcacattcttgtaatatcccttagcttctcttttataggtttttgacacctggtttcagatgactccaggtcagaaaatgtttttgggttttgttttggggcagtcttgctctgtcgcccaggcgggagtgcagtgacatgatcttggctcactgcagcctctgcctcctgggttcaagcgattctcatgccccagcctcctgagtagctgggactacaggcacatgccacctcgtccagctaatttttgtattttttgcagagatggggttttgccatgttggccaggctggtcttgaaatcctggactcaagtgatccacctgccttggcctccccagaaaatgttaacacaaaaacatggtctcctgattatttctgtttctgaaaaggtggtatcgatttttattagggaagaaaactcaagcccacctcagaatccgcagtgtatccattaccttaggtccttcttgtgtgatgtttagtctgtgtagtacatgctgggcaaatgccctgaatagtccagtattttgacagccagatatctaaaataaaaacactggttcatattacaatgaatacttctgtattataatttaagatactgtcaacttatgtataaatgttatgtctgtaaatatgaatgctaatggtagacaatgtgcttaccagaggagtattatagaacagcccatacctcatgcgggggagtaatgaaaaaacagcttctttaaaacatacctaagaacaaagatacattaaaagaagatgtaatttgcacccttcacaccaaaaatagcacgtataattttgagaaatagattttaattaatctccattttgcattgcttgaatagcacactatttcattcaaagagaacagaattcatatttttggaaagattatagaaaaaacttttcaaaggctgcatgattaacaacactgaggattctaattataaaagaaattcagaaattcagaaatcagtggtaatggctaataggaactcataataaatgtttattttatgagtgagtcatctgcactcaagaaatattcacagacatttcaggaaaatttccagtacccttttggaatcataagttttcaaatgtataacgtcataatcagtaaatgcattccatgtgtcggagaataggtcaccatatccgtaagaactctgaaagtagaaacaaaacaaggttttagggcaataaaaggatataacatgacttttcaaagatgcaacaaaatacctgaatttgcctgtgttaaaaactaacaatcctacgcaagttcataaaatccatacaagcaaaatggatcttcatcttgggccagagcaaatgcctaatttgatgaaatatcatcagaaataattatcacaattatactcttagccattaatagtgtttcatttttctaccttaacttcttttattctcacatctttgtagttcagggctttttcctgtgaacatcttatccaaattatagatacacacaacacacactatgccaccgtttacacacactcttatgctcagtgtgcaaaaaccatcagggtgaatgaaaaatctttggaaaaaaatttcagagcaagaaaatgggttcaaagttttaacactggctgggtgcggtggctcacagctgtaatcccagcactttgggaggccgaggcgggcagatcacctgaggtcaggagtttgagaccagcctgaccaatatgatgaaaccccatctctactaaaaatacaaaaattagccaggcatggtggcatgtgcttataatcccagctactcgggaggctgagacaggagaatcacttgaacctgggaggcgggggttgcagtgagccgagatcatgccattgcactccagcctgggcaacaagagcgaaactccatctcaaaaaaaaaaaaaaaaaaaaaagaaaggtttaacattaaaaatataggctggtcacagtggctcatgcttgtaattccagcgctttgggaggcaaagtgggaggatcacttgagccttgaagtttaaggctgcagtgagctatgatcatgccatatactccagcctgggcaacagagcaagaccttgtctctaataaaataaaataaaataaaaatatataacatatgtaattctatgaaatatccccccacccattgactagtgaataaaaagtggtaatttcccattaatattaatggtgtcaataacaactttatataataataatagcatcttacatacttcctatgttccaggcagtttttttgggcacttgatattattaatgtacattaagccacccacaagcctaatgagttgataatatcattttctctattttgcagatgaggaaactgagacacaattttaagtcatttgcctacattgcgaagcagctgagttatagagctggtattcaacccagcctgtgctgccacttccatctgacagctgcctttcagcaggaattagttctttccagtataattaccacatgcttttttttttttttttttttttgagactgagtctcaccctgttgcccaggctagagtgccatgtcgtgatctgggctcactgcaacctccacctcccaagttcaagcaattctcctgccccagcctcccgagtagctgggattacaggcgcacgccaccacacccggctaatttttgtatcttttgatagagacagggtttcaccatattggccaggctggtctcaaactcctgagctcaagtgctccgcctaccacggcctcctaaagtgctgagattacagaaaccacacccagcctgatttattttttgaaaagtagttgattatgagctccattagctaagaagatcaattaatttttaaatggtttcacttagattgaaaaattcagccaatagaaatcagaaatatgcattgtagcactacattcaagctctacagttatacattatgttcatgtctcttttttatagcattcttttctcagattttgaaaattttatgttgcacatattacagttatttcaaagttattgagatctgttagatgtgaaaaaaaaaaaaaaaagccttctttccatgttcctccaatgccattctaataaaggcccttctcaacaccatctaaaatgaaatgtccctgttctggctcaataataaataaagggcaattaaaagaagtgattctagatggtttcctgagataaaatacttcagataaaataaaatatgtttgaaaggaaattttaataataaaatacagtaatcctgactgatccttcctcagggaagtcatacattattgaataagaaccacctccaaaagcttcttttccatgtttcccaagtccaaattatccaccatttgggaaggaggcacttcttcctatactcatgttgaagaatatttggatagtcttcaagatgacataaaatttcctttagtgtgtctcaaatttaaacatgcacataatctatgacttagaaattccaattataggaatctgtcctacagaaatgctaggatgagcatgtgaagatataggtatattgaaaggacatatgtgtttatggtcacatttcagtaaatagcacagaactggaaacaaaactaaatgtgatggggggtggagtgggaaatgaatacatgcactgatgcatgcatccaacttccaaaacatccattaaacagaataccacataacatctaaagcaaggatagccctaaaggtactgacttaaaaagacattccacagataatactaaggtggcaatatgagacagagaatgtattttccataagaatataaacatattggccaggctcatggctgtaatcccagtgctttgggaggctgaggtgggaggatcacttgaggccaggagttcaagactgtattagccagttttcacactgctgataaagacataccctgagactgggaagaaaaagaagtttaactggacttacagttccacatggctggggaggcctcagaaccatggcgggaggtgaaagacacttcttacatggcagcggcaagagaaaatgaggaagaagcaaaagtggaaaaccctgataaacccatcagatctcatgagacttattcactatcacgagaatagcataggaaagactggccctcatgattcaattacctccccttgggtccctcccataagatgtgggaattctgggagatgcaattcaagttgaaatttggtggggacacagccaaaccatatcattctgcccagggctctctaaatctcgtgtccccacatttcaaaacaaaccatgccttcccaacagtcccccaaaagtcttaactcatttcagcactaacccaaaagtccacagtccaaagtctcatctgagacaaggcaagtcccttccacctatgagtctgtaaaaacaaaagcaagctagttccttcctagatacgatggggatacacgtattgggtaattacagccgttccaaatgggagaaattggccaaaacaaaggggttacagggcccatgcaagtccgaaatcctgcatggcagtcaaactttaaagctccagaatgatctcctttgactccaggtctcacatccaggttacactgaagcatgaagtgggttcccacagtcttgggcagctctgcccctgtggttttgcagggtacagcctcccttctggctgctttcacgggctggcattgagtgtctgcggctcttccaggtgcacagttcaagctgtcagtggatctaccattctggggtctggaggatgatggccctcttctcacagctccactaggcagcaccccactaaggactctgtttgggggctccaaccccacatttcccttccacactgccttagcagaggttcttcatgagagccccgcccctgcagcaaacttctgccagggcatctaggcatttccatacatcttctgaaatctaggtggaggttcccaaacctcaattcttgacttctgtgcaccgcaggctcaacaccacatagaagctgccaaggcttggggcttccaccctctgaagccacagcctgagctgtacattggctcctttcagccatggctggagcggctaggacacaaggcaccaagtccctaggctgcatacagcatggggaccctgggctcagcccacaaaaccacttcttcctcctgggtctccaggcctgtgatgggaagcggccgccatgaaggtttctgacatgccttgaagacattttcctcatggtcttgggaagtaacattaggctccttgctatttatgcaaagttctgcagctgacttgaaattctccccagaaagttggtttttattttctattgcacaatcaggctgcaaattttctgaactttgatgctctgtttcccttttaaaactgagtgtctttcacagcacccaaatcaccttttgaatactttcctgcttagaaatttcttctgccaaataccctaaatcatctctctcaagttcaaagttccacaaatctctagggcacggcaaaatgctgccactctctttgctaaaacataacaagagtcacctttgctccagttcccaacaggttcctcatctccatctgagaccacctcagcctgaattttattgtccatatcactatcagcattttgggcaaagctattcaacaagtctctaggaagttgcaaactttcccacattttcctgtcgtcttctgagcccttcaaactgttccaatcgctgcttgctacccagttccaaagtcacctccacactttcaggtatcttttcagcaacaccccactctactggtaccaatttactgtatgagtccgttttcagtctgctgataaagatacacccgagactgggaagaaaaagaggtttaactggacttacagttccacatggctggggaggcctcagaatcatagtgggaggtaaaggcacttcttacatggtggcagcaagggaaaatgaggaagaagcaaaagtggaaaccctagataaacccatcagatctcatgagacttactcactatcacaagaataacacaggaaagactggcccccaggattcaattacctccccctgggtccctcccacaacatgtgggaattctgggagatacaattcaagctgaaatttggtggggacacagccaaaccatatcaaggaccaatctgggtaccataacgagatcttgtctctacagaaaataaatttaaaaattagccagatgtcaaatcagaagacagtaatatatattatatatacgcacacacacatatgttatgactatattgtcataacacatatataacacatatatggaaaagaatagccaggtatggtggcatgcacatgtagtcctagctacttgggaggctgaggcaggaagatcacctgagcccaggagagcaaggctgcagtgagctaggatcatattcctggactttagcctgggtgacatatttgcacttattaaaataaagagagtcctgcaagggactcacacacgttaaatgcagttacccttgggggaacagggaattggagaggaagaaggagacttttttaaaaacttcacatacttctgtgttgtttgaactcattataatcaggtattactttcataattaaaaaagtaatcatggctggacacggtggctcacatctgtaatcccagcactttgggaggccaaggcaggcggatcacctatggtcaggagttcgaaaccagcctggtcaacatggtgaaaccctgtctctactaaaaatataaaaattagccaggtgtgatagcacacactgtcatcccagatactggggaggccgaggcaggagaatcgcttgaacctgggaagcggaagttgcagtgaggcaagatcgcgacactgcacttgagcctgggtgacaagcaagactctgtctcaaaaacaaacagaaaaaaagtaatcataaagctatactacttctcagcacaagcaaatgtggaaagcctgccgtaatttctccttttattcattctgtttgataagagcaaccctgctgtgcccagagaggcatctgaagatgggtccctctatgcatgtttgcaggttggtggccttgcccatcccactgaagatgccacatgctgaagggagtaaactgcagagcttttcaaggaggagagggaaaggccccataggcttccttgtgatgacaggttggaaaatatcaccaagatgtgaactgcagtcacagttacctccctgctcttccctgggcaaactgctcatccaagaccatcaggactctggcaacaccatccaccgggagggattcatgtcatagtcagcctgcaggtcacagtgatgcttaatttaagtccttaccaacaaaagggaaacagcagccacacaaacccttacttagcgccatccccatccaacctaccctgtggacctgaattctggagcaatctggcagaattgcctgtcctgagaacctggcttagtaaatggcttctttgaccaagcgtccgggtttaaaatggatgcacatggagtggcaaaggaaggaggtaacaccaggcggccaccctgctgggctacacccatcctgcttaactgtgccagagctgaggtcagactgccctcatgtctcatgctcagctgactgagtaacctggggtcttcatggtggccgtgcatcctactccagcagccacagagaaggggagggttgtaggagctggctcacttacagtgagctaatgtgactaagttatactaagcccatttgaggaagatgtagaaaagcatgcaacaggtacaaggaagcttctggaagccatctgataaatttctgtcatctgataaaattctgtttggcaacttaggtagagtcctcttcagaggactttaagaagacgacagagcactgtggtgtctgagcacaggtctggggtcaggctgcctggatggaaactttggttctgccctcgctgacagcattatcttagaacactcacctgctgctcaggcctcggcctcttgtctgtaagataagctaatgaaaactcaagtccacgggggtcataagcatgaaatgaagtaacataatttatgttaattacaaaatttaaaaatagttttgtttaaaaacggcaaaacaaccctgagttaataatttagggcttgtaatggctggtgagtgtggcctgacttcactgatacaaaaagaagaaaagaaagggattgttgttccctttgctcacaaaacatttcgaagaaatgaaactgtggtggcagcaaaactgaaatacaagaggaaaatgtaaatgcatatagacggaaaataaagcattaacacgccaagaattatagtctcatcagacttcaaatctaactcaaagtctagggagcagtgatcctgaaaacctttttacacagctctactacaagcctcttatcagtgaaattaagggtcggcaaaactgtctctccttctgcatgagaatttgacctcctgttaactagctaagtcggctctctgcaaatgaggacagcttgtgtcaacaagcctaggcaacaatgcttctgatctaaaaagatgcttgatgggtaaactgcatctggactgggaaagccatgtttcggattccctgagtacgctgactcctggaaccaggcatgtctctttcagggatcctggggactttgccaacacagctgtgtcaggagatgttggcccctacaggatatgaggctcctaagccaaggcatcgcctgtacctgccccaggcgaatcttgtctccttgcacctgagctgtgctgtgtgaactgctagcactccctctggaagaaacacctgaggctgccctgccagcaagctgtggttcccctgcaatgtcatcctgaatagactcacaccaagagccgagcatatgagtgtcgtgagtcagaatgttgagtggaaccttatatgaccccttggtgggtgttccaacttcccagtttagacagcctctctcatgtacactacaaaccatttattctccttattgtaattgtcacagttaacattcagagcacaagtactgtgtaccaggcatggtgactgttcacacactacacggttcattctcaaaatgacacctaggtaaatgtcattatctcactatctcatttcagagctgaagattctggggcacatcttggggtttcctcagcaagtggaggggccagatatgggaagaagcagggaaaaggcaggcaaagagagagaaggaaaaaaagattgcactaaaaacaaataaatagcaggtgtcactcaacacatgcatttatgtgcatgcctaagacctgccctttacagtgagctgaaacacacagcataattcagcacaaaggacacagtaacaaggaagctgctattaagcaaaggcagacagtaaatgcaaaaggccaaacagtaaacagaggcaagcacttccaacataggttacagaggttgagtgaatgacagcctttttttttttttttgagacagagtcttgctctgtcacccaggttgcagtgcagtggcacgatctcggctcaatgcaacctccacctcccaggttcaagtgattctccgaccacagcctcctgagtagctgggacaacatgtgtctgccaccgtatctggctaatttttgtatttttagtagaaacaagatttcaccatgttggccaggctagtctcgaactcctggcctcaaatgatccacctgcctcggcctcccaaagtgctgtgattataggcgtgagccaccacgccctgctgaatggcagtctttcatatgtgtgtcccagaggaacactaagccaaagtcactgaatctctggcctttggagctccacccacccagaaagagaaagaaaccttccccactgcctcattctaaaattcaaagaatgaaggtacacacatacatacctatctgcctatacgtatatgcacatgtcaacacatatatgtacagatacattcgcacccatccgcattatgtgcggctgtacatgttgaaatatatgtgtctttgaaaattctgtttcacaacatcagagtcacacactgatacaagggaaagacagtactgaagcggagagcacattcttacttacggtgtcccacatcacgatgtacacgtcagtactgaatgagttattaacgtgctgagtaatataaagattgatgaaatcacagaagtggtgatacatgttaacacctagtgttggaaaatgaaactacattaattaacaccaaagagcacatgatcaagcaagttttattctatcccatctatttacagtttaagagaattttagtttaaataaatggggaaaaaaataactgttttgtttttccaaacatgaaatgatctagatacataggtagtcctcaatttatggactgcctgggtttcaaaagtcactctaaaattggttatttaaaatcaggaatgcattttcccatatatcccaagtaacaagtgatcattaagttcccagaaaaaaacaaggtaggtctatttaactcaaaactgagtagaactacagggccatgaagacaaaccattatttcttctgactttatttatttttttaatcaggggtggggtcttgctatggtggcatgtgccaccatgcctagcttgatcagttgttttttaaagtcaattaaggggccaggcacagtggctcacacctgtaatcacagcactttgggaggctgaggcaggccaatcacttgagaccaggagtttgagaacagcctggccaacatagtgaaatcccatctctactaaaaatacaaaaattaggcaggcgtggttagccactcaggaggctgaggcaggagaatttgcttgaacctgggaggtggaggctgcagtgaaccaagatcacaccactgcactccagtctgagcaacagagtgagactctgtctaaaaaaaaaaaaaaaaccagaaaaaaaaaaatcaattaagaaacatctgttcatcagggaagtactggcaatgatggcaactaacattttggtaattttcattcctgtctcttttttccctatttaatcattacatgtatcattcctggaaaaacattaaccaactatcatataaaagaagtgaatgtcttgtgttctgattgaaagagaagcaattctggagaaagaagaagttgaattccagcacagccaagcatgcgcaacattcttagatgagtttataaagtccctaagctttagcttctctatagaaatgggaaatagttacctaagtgccagctttattatgagaaacccaaagataatacatcttaaagtacccatcccagtgccaggcacataggaagacctgaatgaagactagctggatcccactaggtcagatagagtggagagggttgtgggaactactatttgtaagttcacatgccattcattaaaaagaaacagaatgtgcaccctctccacttaggtatgcaggacccaatattcatcctggaaatatacaaatctaaatgggatgaaattccaagaactgacacttagagcatgcattttaaaggtaggaaaatgctgagtaaaagaaaaacagggactctcaaatgcagaaatcataaaatattctgacttcattcccacagtgaataataacattgtgtgccagaaataacagtataaaaatactctgtttttttcagcctcgtatcttagctgattgtttggaagggctaattttttcacccagaaaaatcttggcaaagaatatattttcaaattaacaagaaaaataaagttctatcagaatctatcctcttttcccaggttagccatagagcacacatgagctctttcacgtaacatttagtgagttcctaacagttactgaggaatgcagcaagcacaaatcagtgcttggggttgcaagaatttataaacagagaagaaaacataagctccatccttgagaaatgtgccccctaatgagtcctgatctgtagaatgttcatttccctaaggtacaagttaacatgaaaaggaaaactgaaccaggcacagttactcacacctgtaatcccagaacttttggaggccaaggcagggggatcacttgagcccaggagttcaagaccagtctgagcaatccatgagaccccatctctacaaaacatatgttaaaaattagccaggcatggtggtgcatatgcctgtagtcccagctacttggcaggccaaggtgggagaatcacttgagcccaggaagttgaggctgcaatgagctgtgatcatgccactgtactccagcctgggcaacagagcaagacctgtctctaaagaaagaaaagtaaaattggaagacagcataaattagaagaaaaaagtagagttatgaatataggaaagaaatgagacatgtctactctagcctattattctcactttatatactttattgtataagtatctgcataaatttaatagctcacacatatttgccacttttacagacggatcagtgttttctttgcccctttttaatttgcatgttttaaaaacgagtcaaaacctggaacatagcatttttactcgcttttatttcaaaaacctaaacttgtctgatttctgaatttaatactttgtaatataagaactatgacttcagaaggcagagcacattaaaactatgatcaataaattatactaattctgaaatatttgtgacagaggctctctatatttcactgtaaacccaacctctcatgaattttgatatgatctagcacagtaatccctgtctctcataatgaaagagataatatagtacaatctgtgtttctcctccccagtgtaactagttcgcaaagttaaagctctgcttgcaagctgagaaagaggctataagtataaatgataaaataattttaattttatgtcaagaataaattacactggtaacttccagaagaattttaagttcactttagtcatggaaatgatacagaaagtttgtcagcgcaggtcatggacacttctttcccacccatactatacacatggcttttgattttttttttttttttttaagacggagtcttgctctgtcaccaggctggagtgcagcggcacgatcttggctcactgcaacctctgcctcctgggttcaagcgattcccccgcttcaacctcccgagtagctgggactataggtgcctgccaccacgcccagctaattttttgtgtttttttagtagagacgaggtttcaccatgttggccaggatggtctcgatctcctgacctcgtgatctgcctgcctcggcctcccacagtgctgggattacaggtgtgagccaccgcgcccggcttagcttttgattttaaacatcttaatgaaagacaatctaaaccaagtgattagagaaaccagatgaggtaaatttagttacaaaaggcataaatatgccttcacctctcgtcctttgattttggttaagtcctttgatataaatgtgaaagtttcttctaaaatgcccaagttataaaataatgggaagttcaaattagttcaactacttcttcagagaagaaagcaaaaaaaacaaatctactgtttgtcatactgcttccaaaaaattcagagagaattactacatccaaaaaaaggaataatatctcattaacaaatacacaaataacagaaaaagttatttctcacctgcatctaatttcatgaaatatgttggtttttcaatgacaatgtcacatttagcatcttctataggtctgaagttgagctgagtatagctttgtagctcagcaaacctgaaattatgaattgggacatgacttcaaactgattctcccaaacttcctattagaacactgtaacttaggatctgttcattaggcagattttacctctaaatggtacagacactcctatggacacctgtaacttctaaaacttactgacttttatataggttgatatcaattttaatgttaagacaaggaacagaccgggtgcagtggctcaaacctgtaatcccagcactttgggaggcagaggcagtcagatcacgaggtcaggagatcaagaccatcctggtcaacacggtgaaaccccatctctactaaaaatacaaaaattagctgggcgtagtggcgagcgcctttagtcccagccattttcaggagcccgaagcaggagaatcgcttgaacctgggaggcagaggttgcagtgagccgagatggtgccaaaaggagccgaggcttacaacaacctgagtgagtttagcagcagattctccaggcccaggttgagtctagagatggctacagccctggccaactcagccaagctgctcccaaaccctgaccctcagaagtactgtgagataataaatgtttgtattttaagctgctaaattttagagtcatttgttatacaacaataggtaataaatataaatataccctagggtacactttggaatagcctgtcacacagcaataagcaactaatacaattatgccctgagcaactaccatgtggaatcaaatatcagaaagtaccaggaatcaaaaagcccacttgaatatagaaactacctcttgtaaaagtctgctaagtgacttgagacattgcattgcagactgcaaaatcccagataaatgtgtggtagatcattattctgaatgatctgcagccaggcagtgaggcctctttaaggacaaaaaaaaaaaaggtttgctcagcatgaatttctttttttttttgagacagggtcttgatccatcgcccaggctggagtgcagtggtgcaatcatagctcactgcagcctcgacctcctgagctcaagcagtcctcccgcctcagcctcccaagtagctaggattacaggggcatgccatctcgcccagctaatttatttttattttttatttttcttttttagagatgaggtctcatcatgttgctcaggctggtcttgaactcctggcttcaagtaatacttctgccttggcctcccaaagtgctgtgattataggcatgagccgccattcctggccttggtatggacatttgaccttacaaattaacattatgtaagtaacctatgtgactatacaggagtagcaggagagtttctttgggatgatggaacaattctgcatcctgattgtggtggtcgccctccccgtcctcctccccctctctctccctacctacatacccgcacctacacaagtgataaaattttaatgagtacaggtaattgctggtaaaacctgcacaagttaatactactgtaccaatgtcaatttcatggttgtgatcattgtgccatggttatatgagatattatcattagaggaagctcagggaattagacaacgtacaagttctccttgtagtatgatatggtttggctgtgtctccacccagatctcatcttgaattgtagctcccatcatgggaggcacccggtgggaggtaactgaatcatgggggtgggtttttcctgcgctgttctcaagatctgatagttttataaagggcagttccctctgcacacgctctcttgtctgctgtcatgtaagacgtgcctttgttcctcctttgccttctaccatgattgtgaggcctccccagccatgaggaaccatgagtccattaaacctctttcctttgtaagttagtcagtcttgggtataatacatactatttttaaacttctatgagtctaaaattattttaaaatacaaactttttaaattcaaaaagctggccaatgatgttaacagtcagagtagcatctacctttggagagggggatgggggtagagcctgggagggagactgaggtgctgacaatgttctatttttggacctgggtaaaagttacatgggtgggttcactttttcacaatccaaactgtacctttttctgtatgcttttacatactttaatatatgtgtattgttttttaaatgggttccccaaaacacatttttattttttagatttgaggtctcatcatattgcccaggctggccttgaactcctgggctcaagtaatacttctaccttggccttccaaagtgctgagattataggcatgagccaccattcctggccttggcatggacgtttgacctcaaaaattaacattatgtaagtaacctatgtgactttgtaagtgaataaaacttggcaattgtgagttaataaaaatggatttttaagctgatttttttctttcattagcaaacagtaagtactgtatctactattataaacacatacttaattcagatgcaactgagggattcactcggtttccgtcacttcccagaagctcatgccaaattatgtacaaatgaagtaacattttccatttgagagtctccattaatatctgcaagtgccgtaaataaaggcaaatatttccgaaacagatacgttaaaaatatcttaccatgactgcagagggcttttgcgctgaccttcagacgtcaatgtacggatgtcaagtttacagtgccctccaatttcaccactctggaaaaagtcctccttaaatctggtatataacaaaacattaagttaagttcagaaaacgtcttcatgacccaagcacgtgggttgtaactaaagtggattaccaatttccaaactgaattttttaaaagaatttaactatttacaatagaaaatttcaagtgtatatgaaagtaacagaatcctatcaggaccctaatgtatccacaacccaactttgcaatgcgattaactcatggcctgtctgagtcatccatccccccacccattccccaacccctctgccatatcatcaaaaacaaattcaagatataccccttcagcaaggcttggtggctcacacctataatcccagcactttgggaggctgaggtgagaggatcacctgaactcaggagtttgagacccgcctgggcaacgttagaagaccccatctcttcaaaaattaaaaaattagccaagcctggcggtgcgcttctgtatcccagctacttgagaggctcaagtgggaggatcacttgggtttgggaggtcacagctgcactgagccatgattacaccgctgcactccagcctgggcaacagagcaagaccctgtctcaaaaaaaaaaaaaaaaatccctggatctgaaaatatttcagaatttatactagatgttaacattaaccactaaagtacctgtcatgatttctcttgatgtttcttaaatcaagatagagattggttgctctgcagtactgaagataacgggaacacaccagacttgagtcactctgaaggttgagcaaaagaaaagaatgactctgagtattaacacagcaaagactcatccggacttgctagacacactgacagcacggataccctcacattcaaaccacacaacatgacaaggaaagctctccaaagactgcatctgctgaaggatattttctccttcccagcagaccctggccaagcatacttttgccagtttcccacttttaagttaccatggaaaactccccaacgatctgtcacctcaaattttaaagccaagagctgtatatgtggctcagttcagtcccctttaaaagaaaaaaaaagtacccagatccagtactactacccccacagctatatgaaaaagcagcttccaaaagccaaaagaaacaaggaaaaatgcacatgtaagagacattaaaagcagggagggaagtttgccagttttaataagaggtgctttctgcaaaccgtaaagcttgtgggagcctctgtctcaacagcaacatgagggcaatattttctaaataattgaagaaaggagtcgaagagtcagctaccagagcctgattctatttcaaccaatctgggttatgctcagaacttcaaaaacttttatctgctctgggttttatttatagatttaaatgccattttaattgtttttcccaaaactcccaatgaacacaaagtctcaatcttgacctgcatggtgttttggagtctgtagttggtaaaatattgcaatggactgaatgtccgtgtctctgccaaattcatatgttgaaattctaacccccaatgtgatgatattgtttagaagctacccagtctatggtattttgttataacagcccaaacaactaagacaaggatcatactctgctagcacaaagcaaatcaaggtaaatcttaatcaaaagaacattctacaagccaccttgaaagaggagtgcaagataggggttgtcattattatcttgccctttccatgtgaacagctagacttgagccaaatgtgcaagacagaacagaactctgttaaagacaccctgcggccgtgcagtttaatggcatgcctcacatcctgaggcctcattcaccttgctagaatgctcaaagctctattacgtgacaccctccaatagctctataaagtatatactcagtttttgaatgtgagtaaattaaaaaatttttttagttctccagtgtggttggagatcggagacccctgagatgtcagagactcagggttcaggatcattgaacagtgtaccttaatcgtaagtgcttacaacttcatcaacctttaaaaaataatgctgagcccttggccgggaaccaggccctgctgcactgagcatttttatctgcagaacctcatttcttccttaccatatgctacataatgggcatggctttaaggcagaggaaattgaaacaaggaaagcctaagtaccttgtctaagactcaggatctgaattgtagttgagagcctgctcttgtatttactaccccaaaccacctcttgacaacgtgtttatctgatccactgaggtacgatatggtatggttgaaagtaaactggaaaaaaacctgcattttaatcctagatgtgtaattaattttaaaaggtagctgtgcagtcttggagaagttgcttaactcctctgaggaccctgttttccatactgataaagtggcatcagtagtatctgctataacgcttataagcatcaaacgagataacacacagaaaagctttctgcaaactgtaaagctctgggcaaatatagagcagtatggtggtgttatatcatctgtcccaaactatctgagaatgaatttgtaaagacgcagtttatcaatttctcttcattagcacatgtttgggggaatgattctaaacctaaaaatatttcgactgtcttaaaatatgactatctgataaatgtgggataaggaggacagggtttccaaaggaaagaaaacaacctatttggggaagttacataaaattctatgccaataactaagtgagagtgaggaattcctttcatagtgccgtctatcttgtttttacattacaagctaaatgataaatattaaaaatcaataataagtaataaaaataaaatagcttagttgggcacagtggctcacgcctgtaatcccagcactttgggaggctgaggtgggtggatcccttgaggtcaggagttcgcgatcagcctggcaacatggcgaaaccccacctttactaaaaatataaaaattagcgggggggggtggcacgcgcctgtaatccaagctactcaggaggctgaagcaggagaattccttgaacctgggaggcagaggttgcagtgagctgggatcgcgccactgcactccagccagggcaatagacagaaactccgtctcaaaaataaataaaattaaaattaaataaacaagtttatttagtaaggagcaaaatacccaccgtttccttaggctgacagagcacatgcatctcctccagcctctctctggcatatccaaagtcagcttgtttccaaaatatgtcctcagctgactcaagagtgtccgtcctatttgcaaataaaaatattctgtgtttttttctttttacttttttggaccttgaattttcattctaaaggttaaaatgctagaggttccttattactttaattttgttacagtatattatcatagtttttccaaaactacgcctcactacatgaagttacgaaactaagttattcacagaattattcctttatcataaaatacataacagacatgtatgaagttatcacctgaaactgaagccaatgatgcattcttaattactatattttctttacctcattaacattgcatgtattggaagtactaattatacttaattctcccaggaagaatcaagaagaaaccatccatttatcttcttactatacactgggggaaaaaattatctatggtcctggctgtttctccctctggcagaggaaatgacagatattcctatcccagtatgaaatagtcaagttgaattcatgactgtgcaagcaaattaatatctaaatgaattactatctaaaaccaaaagaatctagctggaaattagggcatcaacatacactgtatagaaagaggaagacttgaagagggtattccatatggaaacttaccatcccatgtcgacatagctgcaaactgggtaaccaaacctgaactctggtttgcaggatttctcataaccccagcagtactttagcttctctaggtgtttctagaacataaaacttacattgatttcccttcttctgacatttagagaagactcttagatttttccattaagaaaacaaatcattatagagcattcacatttacatttataatacgtattcttataacaataaatttaaaacttacagttaattctaaaaagagcagtctcaaggttcttaacaatcctccttactcatcacccccaccatatcggtcccctaaccgaaagtctgggctttacctagacgctcaaagaccacttgaatttgaatttcttgaagtagcttaagaaaccacctttctcagtgagcaagcggattctaaaatcagtccctaaaagacatataaactggaatttgtgctaccaaaggaatcacagctaaactgaatcaatcagcaacttcacttagcaatcaagatcagcagagaccccacaacacatggacaactctgccacccttgggaaccacccagctgctgctggccaaggagttgagaatgctcttctgcaaggccccaggagcaatgctggtctgattcccaagtctgcttttccatatgcttcctgtgccagcaccatgggaaaggaagtgtctcacaatgcccagctttgatctctggggccctgtgagatgtcttaatgggctcctatttgaggcctttccaactcctctaaaacagaaagaaagccacagtaacaggcttaattatgtggagacagaggctgaggtgttattactgaaattaagtgctaaccgatcctctcatgtgccgtttaagaaagaagaggtgtgaaattctttagttacttttaacaagatgttctttcctgcataaaatctaattgcttctttacagagtttacaaatagtattggctacttatttgttttagaagtgatttagattttaaatttctctcttatgaatgggacataattttaagcagtttagtcacttagaagtattatatgaaacaatgattaacttatacagtgacaaccgaaaattagaattctgccttcagtttcaggttataaagcagaacctgtaagccagctgaaattgcatcctcataaaaataaggagaaaagaaataatacctaccttatatggacaaagagagtctttcctacagacagtggcaatatgcctattgttgtgcaaaaagaagggaatgtgctcctctggcaagcggatgctggcatagttatacagaggttcgcctggaatgctgtgagtattaggaggagcttcattctgaccactcagtgagacttcatgaagtaagactccaaagacaaacaacattaacatagcaacctgcaaacctagagatcaaaatgaagacaactttgttaacaaatttcctttaaaagccaaaacaacaacaacaacaacaacaaaaaaaaaaaaaaaacaaagggtcaagggctaagtataattacaaagcactttgctatcccactgaataatgatcctttattcaattttttttgagcacttgcttggtgccaggcaccacgttagcaaatgggtatacagaggtgaacaaaacaagaaagagccttgctctcatggtgcctttaaacctactacaactgtcataaacaagcaatcaaataaacaacttcagctgatgactgggcctgtgaatcaaaccaactaggggccagcaaacttttcctgtaaaggagaagcagtaaatatttttggctttgccagacataagatctctgtggcaactacacaacaatgcctctgtccaaaaaagtagccatggtctattataaaagaatggatgaggctgtgttccaataaaactttttaacttacaaaaattatggaagggcttgataggatccagtttagtgatacctgaaactaaataaagtaatatgatagacaacatagcatggtgaacatttaaagcttaaccacctggatttgaatcgcaaatctgcagcttcccagctgtaagacctggaacaagttacttaacctttctgcacctaagctttcccatctgtaaaatggaaataataataaaccttcatcatagagctgtcatgagttaaatgagttagttattggtaaagtgtttcgaaaactatctggcacatgctaaatgctatggaaatgtttattaaataaaagtttaaagccatgtggggcagagaaggggcctaaataacattaaagctgagatctgaatgatgaggaggggaaaagtatctgtgagagagcaaagggagtgggatggctctgagcaagtgtgtgtctgctgaataaaaaattataatcataatcaaggtatgagcacagacaatgttccaggagcgcttctgtactcaggatacagcaatgaaggtgcagtcacgaactaaactcattgcccttgtgaagcttacatgctagtaggtataataatcagctataatagctaagacttagaaactccaggacactaagcagtctgcctcaaagactgtgcccttaagctctcccatcatgcctttacattgtgaacagtgataatggtcagaaacctcactgcatttctaattcacccagtaagtgttaaatctcttggaccagatttctcctatatatcccagacaatgatcctgccattctcaggtcactttagtgggatctttgttctttttttttttttaagtgctctttccactggatgacagagtcttaatacacactggatgttcatcagctaggactgctgtttcctgggtcataccggaaaacccaactttcgaaatcagtcttcattgattatgggctgtgaagatggaacctttagaaacagactgcaggcctgtaatagtagcactttgggaggccaagactggcagattgcttgagtccctgagttcgagaccagcttgggcaacgtgatgaaacccggtctctgctaagaatacaaaaaatcagctgtagtcccagctgaagtgggaggatcactttagcctgggaagtcaaggatgcagtgagtcgtgatctcgccactgcactccagcctgggtaatgcgagggagactctgtctcaaaaaaaaaaaaaaacaaagaaagaaagaagaaaaggaaattgactgctatgttccatcaaacctcaagttccaaggccatggaattctaagtgaacagtggggacaccaaaaaggaatcctttttcccccattttccccccttggagtagttaagtattgtggtttttcactttggcggccctcaagagtatggtgttatctgctgtaaatctgatctgaattacaataacattttcacttggagcttttatccaagaatgagttgacagcagttttataaaaatttaaaaacacatattaatagtaacaatgactctacttgtaataaaaatatatacctcttgaatcttcagaaccactcagaagcttctgtgatgtttcaggtctctaaaacctgtcagaaatgaaacatattaccttaaaaggatgctaaagtaaacctgatcattcagatgatgttgtgaattaaaggaaatattaagaaagaaaataatgtaacgtgataactctcagccagaaggcctggccggtggtgcgctttcttttccttaatgaataccacactgctatactcgagttcacaggcaccacccccaacacagcaactcggaccagattccaatggggaacgggaggaggtggcccactttctacaggcatccactggaactggccaacaggatacttagtggatcaaacattcccagaagcaaacaactttcccattctcacagcagtaatcccactggctgaatcacagggctacccacctagagtggcgagcctgagggttcccaggccttcctattttttgactcgtccttcccggtaataaagtcattgttatgaccaagccctgacctttggttatccaagtccattgtcctccagtgagctctggccatcactaaactcaccgatcagtggagaagtaacgcttaggcgatggaaaaaatctaaagacgcagatcagaaagctggcgtctggcgagggcatgtacccacttgcataaggcggctgggggtggctgctgggcctggcacaaagccttcctggtgtcggtcgtcctgcaaggcccgccgggatgggtggctgcactcctccagcacacggacgctttactggccaggctacttttccttcagctcaaagcagctggaatcactccactccagaaacccttgattcgatttccacaggcctaatgaggaaggaaaaaagggaaacatctgaaagatgatggataggaggcaaaacctggggttgacacagcgggcgaaatggggcaatgtcgcagagagagagagcttggaaaagtttaaagacggcagtgggcaaatggaaagttcaacacgtgagaccccgaatgacacctcaacggctggcccctacttgtgccaaaaagtctctcggcgggtgccaggcagggctcaggaagtgctcggctgccccttgaacgtcagtcccggcagagcccagctgtccgcttgaacgtcagtcccggccaagggctgaggggtcagtggcgagcaccccgccgcggctgagacgccgcgctggggttccggaccccgggcgccgccagggattgcttcggggtcggtgatctcccggggccgcccgccaccgtgcaccgcggcgccccgggtccccagcgcgcctgggaggggccccggggagcggctccgccccggctggaaacctggtcaacgcggctagggcccggggcccgcctgcgctccgggcgctgggaaggggccgggcgcccggggccggggagggccaggatcggcttccgacgcccgcctcccggcccgcagggaatgggaaggcgcgggcggagtgcgtgcgtaggctatagccctccgggaagccgcgccgggagcggctaccacccgggcaagaacagcgcagagcgctgcggcggcgggaaggagagcgggggaaggctccgcagattgcgggggagtcccacctggagccggggcagccgtgaactaccgaggaggaggcggaggagacggcggctgttccagaggagggagtcgtcataaccggctactgccgctcaccggaaacctcgggcgcgggagctgggccagggggcgccaaggagcagctgggacaccttggccagccggcgccgtgggcgggctcgggccccgcagaggcaggaccgggactacacccaggagggccagggcgcggggcccgacgctcggagcggcttcagcccggcgagcggcctcgacccggcgagcgcagcagggaggggctcagagtcgaggaaccatctgcccttcctggcgttctcccgcgaacgttcgcgcgagtccgccagctccctcaccagggccggaaagaccgacggcacgtgccggcgccggacgcccatctccatcgcagcagcccgcgcctccttgagcgagagcgttaaagcgctcagaggatgttaggacggggtgggtagaaaacctgactcttcgtgtcttctgcgttgcactgaggtggatttttacttttgtcttatttcaagcagaagttgccgccctaacttccaaatttggggactgaacatcgttcaccgaatacactttgtgatggtgaggatactttggagtccacacacattttaaaagcagtatagttttacctatccgtaaactcatcaagttcaaatgctactctgtggagtttaatttttatggttttgttaatttactttattactgcttataattatttgaactcccatcccccactgtcttttcctctaagctcccccaggcctagtattccatctacagcacagtagagttgatcattaaatagtgactaaagttgaactgattatatgaaggtgatgacttcaaaataaacatgctcaaatgaatatagtcaccagaagttaaataatatgatcataaggaaacaagtttgtttccaaaggcttacatgctttttacgtaatttttaaaagtaatgttgtttaagaattgttacaagttccattagtgacctgctaaattaggaatcttacctggaatttttttcaaataataacagcaagaacatgtggtgtttaacatgtgccaaacattgttttaaagcactttacagtattaatttattctttttattgaaaagattttgcctctaagggaactgtcaagaggcatgtgaaccggagcaactccatcttaaataggagctgagtaaaatgaggctgaaacctactgggctgcattcccaggccgttaaagcattctaagtcgcagaatgagataggaagtcggcacaagatacaggtcataaagaccttgttgataaaacaggttgcagtaaataagccggctaaatcccaccaaaaccaagatggccatgaaagagacctctggtagtccttactactatactcctatcagcgccatgacagtttacgaatgccatggcaatgtcaggaagttaccctatatggtcttaaaaggggaggcatgaataatccacctgtttagcatatcatca
